(19) United States
(12) Patent Application Publication
(10) Pub. No.: US 2019/0352661 A1
(43) Pub. Date: Nov. 21, 2019

(54) METHODS OF INCREASING SPECIFIC PLANTS TRAITS BY OVER-EXPRESSING POLYPEPTIDES IN A PLANT

(71) Applicant: Evogene Ltd., Rehovot (IL)

(72) Inventors: Ronit RIMON KNOPF, Modiin (IL); Yaacov Micha BROG, Chevel Lachish (IL); Inbal Nurith DANGOOR, Gedera (IL); Cathy DAYAN-GLICK, Rehovot (IL); Shlomo GOREN, Bet-Shemesh (IL); Noa MATARSSO, Tel-Aviv (IL); Ruth VAN-OSS PINHASI, Kibbutz Shoval (IL); Limor PORATY-GAVRA, Rehovot (IL); Michal SHORESH, Holon (IL); Oori WEISSHAUS, Modiln (IL); Yael GALON WOLFENSON, Rehovot (IL); Hagai KARCHI, Moshav Sitriya (IL)

(73) Assignee: Evogene Ltd., Rehovot (IL)

(21) Appl. No.: 16/466,045

(22) PCT Filed: Dec. 19, 2017
(86) PCT No.: PCT/IB2017/058139

§ 371 Date: Jun. 3, 2019

Related U.S. Application Data
(60) Provisional application No. 62/436,500, filed on Dec. 20, 2016.
(60) Provisional application No. 62/522,765, filed on Jun. 21, 2017.

(51) Int. Cl. C12N 15/82

(52) U.S. Cl. CPC C12N 15/8261; C12N 15/8271; C12N 15/8242; C12N 15/8247

(57) ABSTRACT

Provided are isolated polypeptides which are at least 80% homologous to SEQ ID NOs: 2005, 1992-3040, isolated polynucleotides which are at least 80% identical to SEQ ID NOs: 138, 63, 50-1969, nucleic acid constructs comprising same, transgenic cells expressing same, transgenic plants expressing same and method of using same for increasing yield, abiotic stress tolerance, growth rate, biomass, vigor, oil content, photosynthetic capacity, seed yield, fiber yield, fiber quality, fiber length, and/or nitrogen use efficiency of a plant.

### FIELD AND BACKGROUND OF THE INVENTION

[0001] The present invention, in some embodiments thereof, relates to isolated polypeptides and polynucleotides, nucleic acid constructs comprising same, plant cells and plants over-expressing same, and more particularly, but not exclusively, to methods of using same for increasing specific traits in a plant such as yield (e.g., seed yield, oil yield), biomass, growth rate, vigor, oil content, fiber yield, fiber quality, fiber length, fiber length, photosynthetic capacity, fertilizer use efficiency (e.g., nitrogen use efficiency) and/or abiotic stress tolerance of a plant.

[0002] Yield is affected by various factors, such as, the number and size of the plant organs, plant architecture (for example, the number of branches), grains set length, number of filled grains, vigor (e.g. seedling), growth rate, root development, utilization of water, nutrients (e.g., nitrogen) and fertilizers, and stress tolerance.

[0003] Crops such as, corn, rice, wheat, canola and soybean account for over half of total human caloric intake, whether through direct consumption of the seeds themselves or through consumption of meat products raised on processed seeds or forage. Seeds are also a source of sugars, proteins and oils and metabolites used in industrial processes. The ability to increase plant yield, whether through increase dry matter accumulation rate, modifying cellulose or lignin composition, increase stalk strength, enlarge meristem size, change of plant branching pattern, erectness of leaves, increase in fertilization efficiency, enhanced seed dry matter accumulation rate, modification of seed development, enhanced seed filling or by increasing the content of oil, starch or protein in the seeds would have many applications in agricultural and non-agricultural uses such as in the biotechnological production of pharmaceuticals, antibodies or vaccines.

[0004] Vegetable or seed oils are the major source of energy and nutrition in human and animal diet. They are also used for the production of industrial products, such as paints, inks and lubricants. In addition, plant oils represent renewable sources of long-chain hydrocarbons which can be used as fuel. Since the currently used fossil fuels are finite resources and are gradually being depleted, fast growing biomass crops may be used as alternative fuels or for energy feedstocks and may reduce the dependence on fossil energy supplies. However, the major bottleneck for increasing consumption of plant oils as bio-fuel is the oil price, which is still higher than fossil fuel. In addition, the production rate of plant oil is limited by the availability of agricultural land and water. Thus, increasing plant oil yields from the same growing area can effectively overcome the shortage in production space and can decrease vegetable oil prices at the same time.

[0005] Studies aiming at increasing plant oil yields focus on the identification of genes involved in oil metabolism as well as in genes capable of increasing plant and seed yields in transgenic plants. Genes known to be involved in increasing plant oil yields include those participating in fatty acid synthesis or sequestering such as desaturase [e.g., DELTA6, DELTA12 or acyl-ACP (Ssi2; Arabidopsis Information Resource (TAIR; Arabidopsis (dot) org/), TAR No. AT2G43710)], OleosinA (TAIR No. AT3G01570) or FAD3 (TAIR No. AT2G29980), and various transcription factors and activators such as Lec1 [TAIR No. AT1G21970, Lotan et al. 1998. Cell. 26; 93(7):1195-205], Lec2 [TAIR No. AT1G28300, Santos Mendoza et al. 2005, FEBS Lett. 579(20:4666-70], Fus3 (TAR No. AT3G26790), ABI3 [TAR No. AT3G24650, Lara et al. 2003. J Biol Chem. 278(23): 21003-11] and Wril [TAIR No. AT3G54320, Cernac and Benning, 2004. Plant J. 40(4): 575-85].

[0006] Genetic engineering efforts aiming at increasing oil content in plants (e.g., in seeds) include upregulating endoplasmic reticulum (FAD3) and plastidal (FAD7) fatty acid desaturases in potato (Zabrouskov V., et al., 2002; Physiol Plant. 116:172-185); over-expressing the GmDof4 and GmDof11 transcription factors (Wang H W et al., 2007; Plant J. 52:716-29); over-expressing a yeast glycerol-3-phosphate dehydrogenase under the control of a seed-specific promoter (Vigeolas H, et al. 2007, Plant Biotechnol J. 5:431-41; U.S. Pat. Appl. No. 20060168684); using Arabidopsis FAE1 and yeast SLC1-1 genes for improvements in erucic acid and oil content in rapeseed (Katavic V, et al., 2000, Biochem Soc Trans. 28:935-7).

[0007] Various patent applications disclose genes and proteins which can increase oil content in plants. These include for example, U.S. Pat. Appl. No. 20080076179 (lipid metabolism protein); U.S. Pat. Appl. No. 20060206961 (the Ypr140w polypeptide); U.S. Pat. Appl. No. 20060174373 [triacylglycerols synthesis enhancing protein (TEP)]; U.S. Pat. Appl. Nos. 20070169219, 20070006345, 20070006346 and 20060195943 (disclose transgenic plants with improved nitrogen use efficiency which can be used for the conversion into fuel or chemical feedstocks); WO2008/122980 (polynucleotides for increasing oil content, growth rate, biomass, yield and/or vigor of a plant).

[0008] A common approach to promote plant growth has been, and continues to be, the use of natural as well as synthetic nutrients (fertilizers). Thus, fertilizers are the fuel behind the “green revolution”, directly responsible for the exceptional increase in crop yields during the last 40 years, and are considered the number one overhead expense in agriculture. For example, inorganic nitrogenous fertilizers such as ammonium nitrate, potassium nitrate, or urea, typically accounts for 40% of the costs associated with crops such as corn and wheat. Of the three macronutrients provided as main fertilizers [Nitrogen (N), Phosphate (P) and Potassium (K)], nitrogen is often the rate-limiting element in plant growth and all field crops have a fundamental dependence on inorganic nitrogenous fertilizer. Nitrogen is responsible for biosynthesis of amino and nucleic acids, prosthetic groups, plant hormones, plant chemical defenses, etc. and usually needs to be replenished every year, particularly for cereals, which comprise more than half of the cultivated areas worldwide. Thus, nitrogen is translocated to the shoot, where it is stored in the leaves and stalk during the rapid step of plant development and up until flowering. In corn for example, plants accumulate the bulk of their organic nitrogen during the period of grain germination, and until flowering. Once fertilization of the plant has occurred, grains begin to form and become the main sink of plant nitrogen. The stored nitrogen can be then redistributed from the leaves and stalk that served as storage compartments until grain formation.

[0009] Since fertilizer is rapidly depleted from most soil types, it must be supplied to growing crops two or three times during the growing season. In addition, the low nitrogen use efficiency (NUE) of the main crops (e.g., in the range of only 30-70%) negatively affects the input expenses for the farmer, due to the excess fertilizer applied. Moreover, the over and inefficient use of fertilizers are major factors responsible for environmental problems such as eutrophication of groundwater, lakes, rivers and seas, nitrate pollution in drinking water which can cause methemoglobinemia, phosphate pollution, atmospheric pollution and the like. However, in spite of the negative impact of fertilizers on the environment, and the limits on fertilizer use, which have been legislated in several countries, the use of fertilizers is expected to increase in order to support food and fiber production for rapid population growth on limited land resources. For example, it has been estimated that by 2050, more than 150 million tons of nitrogenous fertilizer will be used worldwide annually.

[0010] Increased use efficiency of nitrogen by plants should enable crops to be cultivated with lower fertilizer input, or alternatively to be cultivated on soils of poorer quality and would therefore have significant economic impact in both developed and developing agricultural systems.

[0011] Genetic improvement of fertilizer use efficiency (FUE) in plants can be generated either via traditional breeding or via genetic engineering. Attempts to generate plants with increased FUE have been described in U.S. Pat. Appl. Publication No. 20020046419 (U.S. Pat. No. 7,262,055 to Choo, et al.); U.S. Pat. Appl. No. 20050108791 to Edgerton et al.; U.S. Pat. Appl. No. 20060179511 to Chomet et al.; Good, A, et al. 2007 (Engineering nitrogen use efficiency with alanine aminotransferase. Canadian Journal of Botany 85: 252-262); and Good A G et al. 2004 (Trends Plant Sci. 9:597-605).

[0012] Yanagisawa et al. (Proc. Natl. Acad. Sci. U.S.A. 2004 101:7833-8) describe Dof1 transgenic plants which exhibit improved growth under low-nitrogen conditions.

[0013] U.S. Pat. No. 6,084,153 to Good et al. discloses the use of a stress responsive promoter to control the expression of Alanine Amine Transferase (AlaAT) and transgenic canola plants with improved drought and nitrogen deficiency tolerance when compared to control plants.

[0014] Abiotic stress (ABS; also referred to as “environmental stress”) conditions such as salinity, drought, flood, suboptimal temperature and toxic chemical pollution, cause substantial damage to agricultural plants. Most plants have evolved strategies to protect themselves against these conditions. However, if the severity and duration of the stress conditions are too great, the effects on plant development, growth and yield of most crop plants are profound. Furthermore, most of the crop plants are highly susceptible to abiotic stress and thus necessitate optimal growth conditions for commercial crop yields. Continuous exposure to stress causes major alterations in the plant metabolism which ultimately leads to cell death and consequently yield losses.

[0015] Drought is a gradual phenomenon, which involves periods of abnormally dry weather that persists long enough to produce serious hydrologic imbalances such as crop damage, water supply shortage and increased susceptibility to various diseases. In severe cases, drought can last many years and results in devastating effects on agriculture and water supplies. Furthermore, drought is associated with increase susceptibility to various diseases.

[0016] For most crop plants, the land regions of the world are too arid. In addition, overuse of available water results in increased loss of agriculturally-usable land (desertification), and increase of salt accumulation in soils adds to the loss of available water in soils.

[0017] Salinity, high salt levels, affects one in five hectares of irrigated land. None of the top five food crops, i.e., wheat, corn, rice, potatoes, and soybean, can tolerate excessive salt. Detrimental effects of salt on plants result from both water deficit, which leads to osmotic stress (similar to drought stress), and the effect of excess sodium ions on critical biochemical processes. As with freezing and drought, high salt causes water deficit; and the presence of high salt makes it difficult for plant roots to extract water from their environment. Soil salinity is thus one of the more important variables that determine whether a plant may thrive. In many parts of the world, sizable land areas are uncultivable due to naturally high soil salinity. Thus, salination of soils that are used for agricultural production is a significant and increasing problem in regions that rely heavily on agriculture, and is worsen by over-utilization, over-fertilization and water shortage, typically caused by climatic change and the demands of increasing population. Salt tolerance is of particular importance early in a plant's lifecycle, since evaporation from the soil surface causes upward water movement, and salt accumulates in the upper soil layer where the seeds are placed. On the other hand, germination normally takes place at a salt concentration which is higher than the mean salt level in the whole soil profile.

[0018] Salt and drought stress signal transduction consist of ionic and osmotic homeostasis signaling pathways. The ionic aspect of salt stress is signaled via the SOS pathway where a calcium-responsive SOS3-SOS2 protein kinase complex controls the expression and activity of ion transporters such as SOS1. The osmotic component of salt stress involves complex plant reactions that overlap with drought and/or cold stress responses.

[0019] Suboptimal temperatures affect plant growth and development through the whole plant life cycle. Thus, low temperatures reduce germination rate and high temperatures result in leaf necrosis. In addition, mature plants that are exposed to excess of heat may experience heat shock, which may arise in various organs, including leaves and particularly fruit, when transpiration is insufficient to overcome heat stress. Heat also damages cellular structures, including organelles and cytoskeleton, and impairs membrane function. Heat shock may produce a decrease in overall protein synthesis, accompanied by expression of heat shock proteins, e.g., chaperones, which are involved in refolding proteins denatured by heat. High-temperature damage to pollen almost always occurs in conjunction with drought stress, and rarely occurs under well-watered conditions. Combined stress can alter plant metabolism in novel ways. Excessive chilling conditions, e.g., low, but above freezing, temperatures affect crops of tropical origins, such as soybean, rice, maize, and cotton. Typical chilling damage includes wilting, necrosis, chlorosis or leakage of ions from cell membranes. The underlying mechanisms of chilling sensitivity are not completely understood yet, but probably involve the level of membrane saturation and other physiological deficiencies. Excessive light conditions, which occur under clear atmospheric conditions subsequent to cold late summer/autumn nights, can lead to photoinhibition of photosynthesis (disruption of photosynthesis). In addition, chilling may lead to yield losses and lower product quality through the delayed ripening of maize.

[0020] Common aspects of drought, cold and salt stress response [Reviewed in Xiong and Zhu (2002) Plant Cell Environ. 25: 131-139] include: (a) transient changes in the cytoplasmic calcium levels early in the signaling event; (b) signal transduction via mitogen-activated and/or calcium dependent protein kinases (CDPKs) and protein phosphatases; (c) increases in abscisic acid levels in response to stress triggering a subset of responses; (d) inositol phosphates as signal molecules (at least for a subset of the stress responsive transcriptional changes); (e) activation of phospholipases which in turn generates a diverse array of second messenger molecules, some of which might regulate the activity of stress responsive kinases; (f) induction of late embryogenesis abundant (LEA) type genes including the CRT/DRE responsive COR/RD genes; (g) increased levels of antioxidants and compatible osmolytes such as proline and soluble sugars; and (h) accumulation of reactive oxygen species such as superoxide, hydrogen peroxide, and hydroxyl radicals. Abscisic acid biosynthesis is regulated by osmotic stress at multiple steps. Both ABA- dependent and -independent osmotic stress signaling first modify constitutively expressed transcription factors, leading to the expression of early response transcriptional activators, which then activate downstream stress tolerance effector genes.

[0021] Several genes which increase tolerance to cold or salt stress can also improve drought stress protection, these include for example, the transcription factor AtCBF/DREB1, OsCDPK7 (Saijo et al. 2000, Plant J. 23: 319-327) or AVP1 (a vacuolar pyrophosphatase-proton pump, Gaxiola et al. 2001, Proc. Natl. Acad. Sci. USA 98: 11444-11449).

[0022] Studies have shown that plant adaptations to adverse environmental conditions are complex genetic traits with polygenic nature. Conventional means for crop and horticultural improvements utilize selective breeding techniques to identify plants having desirable characteristics. However, selective breeding is tedious, time consuming and has an unpredictable outcome. Furthermore, limited germplasm resources for yield improvement and incompatibility in crosses between distantly related plant species represent significant problems encountered in conventional breeding. Advances in genetic engineering have allowed mankind to modify the germplasm of plants by expression of genes-of-interest in plants. Such a technology has the capacity to generate crops or plants with improved economic, agronomic or horticultural traits.

[0023] Genetic engineering efforts, aimed at conferring abiotic stress tolerance to transgenic crops, have been described in various publications [Apse and Blumwald (Curr Opin Biotechnol. 13:146-150, 2002), Quesada et al. (Plant Physiol. 130:951-963, 2002), Holmström et al. (Nature 379: 683-684, 1996), Xu et al. (Plant Physiol 110: 249-257, 1996), Pilon-Smits and Ebskamp (Plant Physiol 107: 125-130, 1995) and Tarczynski et al. (Science 259: 508-510, 1993)].

[0024] Various patents and patent applications disclose genes and proteins which can be used for increasing tolerance of plants to abiotic stresses. These include for example, U.S. Pat. Nos. 5,296,462 and 5,356,816 (for increasing tolerance to cold stress); U.S. Pat. No. 6,670,528 (for increasing ABST); U.S. Pat. No. 6,720,477 (for increasing ABST); U.S. application Ser. Nos. 09/938,842 and 10/342,224 (for increasing ABST); U.S. application Ser. No. 10/231,035 (for increasing ABST); WO2004/104162 (for increasing ABST and biomass); WO2007/020638 (for increasing ABST, biomass, vigor and/or yield); WO2007/049275 (for increasing ABST, biomass, vigor and/or yield); WO2010/076756 (for increasing ABST, biomass and/or yield); WO2009/083958 (for increasing water use efficiency, fertilizer use efficiency, biotic/abiotic stress tolerance, yield and/or biomass); WO2010/020941 (for increasing nitrogen use efficiency, abiotic stress tolerance, yield and/or biomass); WO2009/141824 (for increasing plant utility); WO2010/049897 (for increasing plant yield).

[0025] Nutrient deficiencies cause adaptations of the root architecture, particularly notably for example is the root proliferation within nutrient rich patches to increase nutrient uptake. Nutrient deficiencies cause also the activation of plant metabolic pathways which maximize the absorption, assimilation and distribution processes such as by activating architectural changes. Engineering the expression of the triggered genes may cause the plant to exhibit the architectural changes and enhanced metabolism also under other conditions.

[0026] In addition, it is widely known that the plants usually respond to water deficiency by creating a deeper root system that allows access to moisture located in deeper soil layers. Triggering this effect will allow the plants to access nutrients and water located in deeper soil horizons particularly those readily dissolved in water like nitrates.

[0027] Cotton and cotton by-products provide raw materials that are used to produce a wealth of consumer-based products in addition to textiles including cotton foodstuffs, livestock feed, fertilizer and paper. The production, marketing, consumption and trade of cotton-based products generate an excess of $100 billion annually in the U.S. alone, making cotton the number one value- added crop.

[0028] Even though 90% of cotton's value as a crop resides in the fiber (lint), yield and fiber quality has declined due to general erosion in genetic diversity of cotton varieties, and an increased vulnerability of the crop to environmental conditions.

[0029] There are many varieties of cotton plant, from which cotton fibers with a range of characteristics can be obtained and used for various applications. Cotton fibers may be characterized according to a variety of properties, some of which are considered highly desirable within the textile industry for the production of increasingly high quality products and optimal exploitation of modem spinning technologies. Commercially desirable properties include length, length uniformity, fineness, maturity ratio, decreased fuzz fiber production, micronaire, bundle strength, and single fiber strength. Much effort has been put into the improvement of the characteristics of cotton fibers mainly focusing on fiber length and fiber fineness. In particular, there is a great demand for cotton fibers of specific lengths.

[0030] A cotton fiber is composed of a single cell that has differentiated from an epidermal cell of the seed coat, developing through four stages, i.e., initiation, elongation, secondary cell wall thickening and maturation stages. More specifically, the elongation of a cotton fiber commences in the epidermal cell of the ovule immediately following flowering, after which the cotton fiber rapidly elongates for approximately 21 days. Fiber elongation is then terminated, and a secondary cell wall is formed and grown through maturation to become a mature cotton fiber.

[0031] Several candidate genes which are associated with the elongation, formation, quality and yield of cotton fibers were disclosed in various patent applications such as U.S. Pat. No. 5,880,100 and U.S. patent applications Ser. Nos. 08/580,545, 08/867,484 and 09/262,653 (describing genes involved in cotton fiber elongation stage); WO0245485 (improving fiber quality by modulating sucrose synthase); U.S. Pat. No. 6,472,588 and WO0117333 (increasing fiber quality by transformation with a DNA encoding sucrose phosphate synthase); WO9508914 (using a fiber-specific promoter and a coding sequence encoding cotton peroxidase); WO9626639 (using an ovary specific promoter sequence to express plant growth modifying hormones in cotton ovule tissue, for altering fiber quality characteristics such as fiber dimension and strength); U.S. Pat. Nos. 5,981,834, 5,597,718, 5,620,882, 5,521,708 and 5,495,070 (coding sequences to alter the fiber characteristics of transgenic fiber producing plants); U.S. patent applications U.S. 2002049999 and U.S. 2003074697 (expressing a gene coding for endoxyloglucan transferase, catalase or peroxidase for improving cotton fiber characteristics); WO 01/40250 (improving cotton fiber quality by modulating transcription factor gene expression); WO 96/40924 (a cotton fiber transcriptional initiation regulatory region associated which is expressed in cotton fiber); EP0834566 (a gene which controls the fiber formation mechanism in cotton plant); WO2005/121364 (improving cotton fiber quality by modulating gene expression); WO2008/075364 (improving fiber quality, yield/biomass/vigor and/or abiotic stress tolerance of plants).

[0032] WO publication No. 2004/104162 discloses methods of increasing abiotic stress tolerance and/or biomass in plants and plants generated thereby.

[0033] WO publication No. 2004/111183 discloses nucleotide sequences for regulating gene expression in plant trichomes and constructs and methods utilizing same.

[0034] WO publication No. 2004/081173 discloses novel plant derived regulatory sequences and constructs and methods of using such sequences for directing expression of exogenous polynucleotide sequences in plants.

[0035] WO publication No. 2005/121364 discloses polynucleotides and polypeptides involved in plant fiber development and methods of using same for improving fiber quality, yield and/or biomass of a fiber producing plant.

[0036] WO publication No. 2007/049275 discloses isolated polypeptides, polynucleotides encoding same, transgenic plants expressing same and methods of using same for increasing fertilizer use efficiency, plant abiotic stress tolerance and biomass.

[0037] WO publication No. 2007/020638 discloses methods of increasing abiotic stress tolerance and/or biomass in plants and plants generated thereby.

[0038] WO publication No. 2008/122980 discloses genes constructs and methods for increasing oil content, growth rate and biomass of plants.

[0039] WO publication No. 2008/075364 discloses polynucleotides involved in plant fiber development and methods of using same.

[0040] WO publication No. 2009/083958 discloses methods of increasing water use efficiency, fertilizer use efficiency, biotic/abiotic stress tolerance, yield and biomass in plant and plants generated thereby.

[0041] WO publication No. 2009/141824 discloses isolated polynucleotides and methods using same for increasing plant utility.

[0042] WO publication No. 2009/013750 discloses genes, constructs and methods of increasing abiotic stress tolerance, biomass and/or yield in plants generated thereby.

[0043] WO publication No. 2010/020941 discloses methods of increasing nitrogen use efficiency, abiotic stress tolerance, yield and biomass in plants and plants generated thereby.

[0044] WO publication No. 2010/076756 discloses isolated polynucleotides for increasing abiotic stress tolerance, yield, biomass, growth rate, vigor, oil content, fiber yield, fiber quality, and/or nitrogen use efficiency of a plant.

[0045] WO2010/100595 publication discloses isolated polynucleotides and polypeptides, and methods of using same for increasing plant yield and/or agricultural characteristics.

[0046] WO publication No. 2010/049897 discloses isolated polynucleotides and polypeptides and methods of using same for increasing plant yield, biomass, growth rate, vigor, oil content, abiotic stress tolerance of plants and nitrogen use efficiency.

[0047] WO2010/143138 publication discloses isolated polynucleotides and polypeptides, and methods of using same for increasing nitrogen use efficiency, fertilizer use efficiency, yield, growth rate, vigor, biomass, oil content, abiotic stress tolerance and/or water use efficiency

[0048] WO publication No. 2011/080674 discloses isolated polynucleotides and polypeptides and methods of using same for increasing plant yield, biomass, growth rate, vigor, oil content, abiotic stress tolerance of plants and nitrogen use efficiency.

[0049] WO2011/015985 publication discloses polynucleotides and polypeptides for increasing desirable plant qualities.

[0050] WO2011/135527 publication discloses isolated polynucleotides and polypeptides for increasing plant yield and/or agricultural characteristics.

[0051] WO2012/028993 publication discloses isolated polynucleotides and polypeptides, and methods of using same for increasing nitrogen use efficiency, yield, growth rate, vigor, biomass, oil content, and/or abiotic stress tolerance.

[0052] WO2012/085862 publication discloses isolated polynucleotides and polypeptides, and methods of using same for improving plant properties.

[0053] WO2012/150598 publication discloses isolated polynucleotides and polypeptides and methods of using same for increasing plant yield, biomass, growth rate, vigor, oil content, abiotic stress tolerance of plants and nitrogen use efficiency.

[0054] WO2013/027223 publication discloses isolated polynucleotides and polypeptides, and methods of using same for increasing plant yield and/or agricultural characteristics.

[0055] WO2013/080203 publication discloses isolated polynucleotides and polypeptides, and methods of using same for increasing nitrogen use efficiency, yield, growth rate, vigor, biomass, oil content, and/or abiotic stress tolerance.

[0056] WO2013/098819 publication discloses isolated polynucleotides and polypeptides, and methods of using same for increasing yield of plants.

[0057] WO2013/128448 publication discloses isolated polynucleotides and polypeptides and methods of using same for increasing plant yield, biomass, growth rate, vigor, oil content, abiotic stress tolerance of plants and nitrogen use efficiency.

[0058] WO 2013/179211 publication discloses isolated polynucleotides and polypeptides, and methods of using same for increasing plant yield and/or agricultural characteristics.

[0059] WO2014/033714 publication discloses isolated polynucleotides, polypeptides and methods of using same for increasing abiotic stress tolerance, biomass and yield of plants.

[0060] WO2014/102773 publication discloses isolated polynucleotides and polypeptides, and methods of using same for increasing nitrogen use efficiency of plants.

[0061] WO2014/102774 publication discloses isolated polynucleotides and polypeptides, construct and plants comprising same and methods of using same for increasing nitrogen use efficiency of plants.

[0062] WO2014/188428 publication discloses isolated polynucleotides and polypeptides, and methods of using same for increasing plant yield and/or agricultural characteristics.

[0063] WO2015/029031 publication discloses isolated polynucleotides and polypeptides, and methods of using same for increasing plant yield and/or agricultural characteristics.

[0064] WO 2015/181823 publication discloses isolated polynucleotides, polypeptides and methods of using same for increasing abiotic stress tolerance, biomass and yield of plants.

[0065] WO 2016/030885 publication discloses isolated polynucleotides and polypeptides, and methods of using same for increasing plant yield and/or agricultural characteristics.

### SUMMARY OF THE INVENTION

[0066] According to an aspect of some embodiments of the present invention there is provided a method of increasing yield, growth rate, biomass, vigor, oil content, seed yield, fiber yield, fiber quality, fiber length, photosynthetic capacity, nitrogen use efficiency, and/or abiotic stress tolerance of a plant, comprising over-expressing within the plant a polypeptide comprising an amino acid sequence at least 80% identical to SEQ ID NO: 2005, 1992-3039 or 3040, thereby increasing the yield, growth rate, biomass, vigor, oil content, seed yield, fiber yield, fiber quality, fiber length, photosynthetic capacity, nitrogen use efficiency, and/or abiotic stress tolerance of the plant.

[0067] According to an aspect of some embodiments of the present invention there is provided a method of increasing yield, growth rate, biomass, vigor, oil content, seed yield, fiber yield, fiber quality, fiber length, photosynthetic capacity, nitrogen use efficiency, and/or abiotic stress tolerance of a plant, comprising over-expressing within the plant a polypeptide comprising an amino acid sequence selected from the group consisting of SEQ ID NOs: 2005, 1992-3040 and 3041-3059, thereby increasing the yield, growth rate, biomass, vigor, oil content, seed yield, fiber yield, fiber quality, fiber length, photosynthetic capacity, nitrogen use efficiency, and/or abiotic stress tolerance of the plant.

[0068] According to an aspect of some embodiments of the present invention there is provided a method of producing a crop comprising growing a crop plant over-expressing a polypeptide comprising an amino acid sequence at least 80% homologous to the amino acid sequence selected from the group consisting of SEQ ID NOs: 2005, 1992-3039 and 3040, wherein the crop plant is derived from plants which have been subjected to genome editing for over-expressing the polypeptide and/or which have been transformed with an exogenous polynucleotide encoding the polypeptide and which have been selected for increased yield, increased growth rate, increased biomass, increased vigor, increased oil content, increased seed yield, increased fiber yield, increased fiber quality, increased fiber length, increased photosynthetic capacity, increased nitrogen use efficiency, and/or increased abiotic stress tolerance as compared to a wild type plant of the same species which is grown under the same growth conditions, and the crop plant having the increased yield, increased growth rate, increased biomass, increased vigor, increased oil content, increased seed yield, increased fiber yield, increased fiber quality, increased fiber length, increased photosynthetic capacity, increased nitrogen use efficiency, and/or increased abiotic stress tolerance, thereby producing the crop.

[0069] According to an aspect of some embodiments of the present invention there is provided a method of increasing yield, growth rate, biomass, vigor, oil content, seed yield, fiber yield, fiber quality, fiber length, photosynthetic capacity, nitrogen use efficiency, and/or abiotic stress tolerance of a plant, comprising expressing within the plant an exogenous polynucleotide comprising a nucleic acid sequence at least 80% identical to SEQ ID NO: 138, 63, 50-1968 or 1969, thereby increasing the yield, growth rate, biomass, vigor, oil content, seed yield, fiber yield, fiber quality, fiber length, photosynthetic capacity, nitrogen use efficiency, and/or abiotic stress tolerance of the plant.

[0070] According to an aspect of some embodiments of the present invention there is provided a method of increasing yield, growth rate, biomass, vigor, oil content, seed yield, fiber yield, fiber quality, fiber length, photosynthetic capacity, nitrogen use efficiency, and/or abiotic stress tolerance of a plant, comprising expressing within the plant an exogenous polynucleotide comprising the nucleic acid sequence selected from the group consisting of SEQ ID NOs: 138, 63, 50-1069 and 1970-1991, thereby increasing the yield, growth rate, biomass, vigor, oil content, seed yield, fiber yield, fiber quality, fiber length, photosynthetic capacity, nitrogen use efficiency, and/or abiotic stress tolerance of the plant.

[0071] According to an aspect of some embodiments of the present invention there is provided a method of producing a crop comprising growing a crop plant transformed with an exogenous polynucleotide which comprises a nucleic acid sequence which is at least 80% identical to the nucleic acid sequence selected from the group consisting of SEQ ID NOs: 138, 63, 50-1069 and 1970-1991, wherein the crop plant is derived from plants which have been transformed with the exogenous polynucleotide and which have been selected for increased yield, increased growth rate, increased biomass, increased vigor, increased oil content, increased seed yield, increased fiber yield, increased fiber quality, increased fiber length, increased photosynthetic capacity, increased nitrogen use efficiency, and/or increased abiotic stress tolerance as compared to a wild type plant of the same species which is grown under the same growth conditions, and the crop plant having the increased yield, increased growth rate, increased biomass, increased vigor, increased oil content, increased seed yield, increased fiber yield, increased fiber quality, increased fiber length, increased photosynthetic capacity, increased nitrogen use efficiency, and/or increased abiotic stress tolerance, thereby producing the crop.

[0072] According to an aspect of some embodiments of the present invention there is provided an isolated polynucleotide comprising a nucleic acid sequence encoding a polypeptide which comprises an amino acid sequence at least 80% homologous to the amino acid sequence set forth in SEQ ID NO: 2005, 1992-3039 or 3040, wherein the amino acid sequence is capable of increasing yield, growth rate, biomass, vigor, oil content, seed yield, fiber yield, fiber quality, fiber length, photosynthetic capacity, nitrogen use efficiency, and/or abiotic stress tolerance of a plant. According to an aspect of some embodiments of the present invention there is provided an isolated polynucleotide comprising a nucleic acid sequence encoding a polypeptide which comprises the amino acid sequence selected from the group consisting of SEQ ID NOs: 2005, 1992-3040 and 3041-3059.

[0073] According to an aspect of some embodiments of the present invention there is provided an isolated polynucleotide comprising a nucleic acid sequence at least 80% identical to SEQ ID NOs: 138, 63, 50-1968 and 1969, wherein the nucleic acid sequence is capable of increasing yield, growth rate, biomass, vigor, oil content, seed yield, fiber yield, fiber quality, fiber length, photosynthetic capacity, nitrogen use efficiency, and/or abiotic stress tolerance of a plant.

[0074] According to an aspect of some embodiments of the present invention there is provided an isolated polynucleotide comprising the nucleic acid sequence selected from the group consisting of SEQ ID NOs: 138, 63, 50-1069 and 1970-1991.

[0075] According to an aspect of some embodiments of the present invention there is provided a nucleic acid construct comprising the isolated polynucleotide of some embodiments of the invention, and a promoter for directing transcription of the nucleic acid sequence in a host cell.

[0076] According to an aspect of some embodiments of the present invention there is provided an isolated polypeptide comprising an amino acid sequence at least 80% homologous to SEQ ID NO: 2005, 1992-3039 or 3040, wherein the amino acid sequence is capable of increasing yield, growth rate, biomass, vigor, oil content, seed yield, fiber yield, fiber quality, fiber length, photosynthetic capacity, nitrogen use efficiency, and/or abiotic stress tolerance of a plant.

[0077] According to an aspect of some embodiments of the present invention there is provided an isolated polypeptide comprising the amino acid sequence selected from the group consisting of SEQ ID NOs: 2005, 1992-3040 and 3041-3059.

[0078] According to an aspect of some embodiments of the present invention there is provided a plant cell exogenously expressing the polynucleotide of some embodiments of the invention, or the nucleic acid construct of some embodiments of the invention.

[0079] According to an aspect of some embodiments of the present invention there is provided a plant cell exogenously expressing the polypeptide of some embodiments of the invention.

[0080] According to an aspect of some embodiments of the present invention there is provided a plant over-expressing a polypeptide comprising an amino acid sequence at least 80% identical to SEQ ID NO: 2005, 1992-3039 or 3040 as compared to a wild type plant of the same species which is grown under the same growth conditions.

[0081] According to an aspect of some embodiments of the present invention there is provided a transgenic plant comprising the nucleic acid construct of some embodiments of the invention or the plant cell of some embodiments of the invention.

[0082] According to an aspect of some embodiments of the present invention there is provided a method of growing a crop, the method comprising seeding seeds and/or planting plantlets of a plant over-expressing the isolated polypeptide of some embodiments of the invention, wherein the plant is derived from parent plants which have been subjected to genome editing for over-expressing the polypeptide and/or which have been transformed with an exogenous polynucleotide encoding the polypeptide, the parent plants which have been selected for at least one trait selected from the group consisting of: increased nitrogen use efficiency, increased abiotic stress tolerance, increased biomass, increased growth rate, increased vigor, increased yield, increased fiber yield, increased fiber quality, increased fiber length, increased photosynthetic capacity, and increased oil content as compared to a control plant, thereby growing the crop.

[0083] According to an aspect of some embodiments of the present invention there is provided a method of selecting a plant having increased yield, growth rate, biomass, vigor, oil content, seed yield, fiber yield, fiber quality, fiber length, photosynthetic capacity, nitrogen use efficiency, and/or abiotic stress tolerance as compared to a wild type plant of the same species which is grown under the same growth conditions, the method comprising:

[0084] (a) providing plants which have been subjected to genome editing for over-expressing a polypeptide comprising an amino acid sequence at least 80% homologous to the amino acid sequence selected from the group consisting of SEQ ID NOs: 2005, 1992-3040 and/or which have been transformed with an exogenous polynucleotide encoding the polypeptide comprising an amino acid sequence at least 80% homologous to the amino acid sequence selected from the group consisting of SEQ ID NOs: 2005, 1992-3040,

[0085] (b) selecting from the plants of step (a) a plant having increased yield, growth rate, biomass, vigor, oil content, seed yield, fiber yield, fiber quality, fiber length, photosynthetic capacity, nitrogen use efficiency, and/or abiotic stress tolerance as compared to a wild type plant of the same species which is grown under the same growth conditions, thereby selecting the plant having the increased yield, growth rate, biomass, vigor, oil content, seed yield, fiber yield, fiber quality, fiber length, photosynthetic capacity, nitrogen use efficiency, and/or abiotic stress tolerance as compared to the wild type plant of the same species which is grown under the same growth conditions.

[0086] According to an aspect of some embodiments of the present invention there is provided a method of selecting a plant having increased yield, growth rate, biomass, vigor, oil content, seed yield, fiber yield, fiber quality, fiber length, photosynthetic capacity, nitrogen use efficiency, and/or abiotic stress tolerance as compared to a wild type plant of the same species which is grown under the same growth conditions, the method comprising:

[0087] (a) providing plants transformed with an exogenous polynucleotide at least 80% identical to the nucleic acid sequence selected from the group consisting of SEQ ID NOs: 138, 63, 50-1969,

[0088] (b) selecting from the plants of step (a) a plant having increased yield, growth rate, biomass, vigor, oil content, seed yield, fiber yield, fiber quality, fiber length, photosynthetic capacity, nitrogen use efficiency, and/or abiotic stress tolerance as compared to a wild type plant of the same species which is grown under the same growth conditions, thereby selecting the plant having the increased yield, growth rate, biomass, vigor, oil content, seed yield, fiber yield, fiber quality, fiber length, photosynthetic capacity, nitrogen use efficiency, and/or abiotic stress tolerance as compared to the wild type plant of the same species which is grown under the same growth conditions.

[0089] According to some embodiments of the invention the nucleic acid sequence encodes an amino acid sequence selected from the group consisting of SEQ ID NOs: 1992-3040 and 3041-3059.

[0090] According to some embodiments of the invention the nucleic acid sequence is selected from the group consisting of SEQ ID NOs: 138, 63, 50-1069 and 1970-1991.

[0091] According to some embodiments of the invention the polynucleotide consists of the nucleic acid sequence selected from the group consisting of SEQ ID NOs: 138, 63, 50-1069 and 1970-1991.

[0092] According to some embodiments of the invention the amino acid sequence is selected from the group consisting of SEQ ID NOs: 2005, 1992-3040 and 3041-3059.

[0093] According to some embodiments of the invention the plant cell forms part of a plant.

[0094] According to some embodiments of the invention the method further comprising growing the plant over-expressing the polypeptide under the abiotic stress.

[0095] According to some embodiments of the invention the abiotic stress is selected from the group consisting of salinity, drought, osmotic stress, water deprivation, flood, etiolation, low temperature, high temperature, heavy metal toxicity, anaerobiosis, nutrient deficiency, nitrogen deficiency, nutrient excess, atmospheric pollution and UV irradiation.

[0096] According to some embodiments of the invention the yield comprises seed yield or oil yield.

[0097] According to some embodiments of the invention the method further comprising growing the plant over-expressing the polypeptide under nitrogen-limiting conditions.

[0098] According to some embodiments of the invention the promoter is heterologous to the isolated polynucleotide and/or to the host cell.

[0099] According to some embodiments of the invention the promoter is heterologous to the isolated polynucleotide.

[0100] According to some embodiments of the invention the promoter is heterologous to the host cell.

[0101] According to some embodiments of the invention the control plant is a wild type plant of identical genetic background.

[0102] According to some embodiments of the invention the control plant is a wild type plant of the same species.

[0103] According to some embodiments of the invention the control plant is grown under identical growth conditions.

[0104] According to some embodiments of the invention the method further comprising selecting a plant having an increased yield, growth rate, biomass, vigor, oil content, seed yield, fiber yield, fiber quality, fiber length, photosynthetic capacity, nitrogen use efficiency, and/or abiotic stress tolerance as compared to the wild type plant of the same species which is grown under the same growth conditions.

[0105] According to some embodiments of the invention selecting is performed under non-stress conditions.

[0106] According to some embodiments of the invention selecting is performed under abiotic stress conditions.

[0107] Unless otherwise defined, all technical and/or scientific terms used herein have the same meaning as commonly understood by one of ordinary skill in the art to which the invention pertains. Although methods and materials similar or equivalent to those described herein can be used in the practice or testing of embodiments of the invention, exemplary methods and/or materials are described below. In case of conflict, the patent specification, including definitions, will control. In addition, the materials, methods, and examples are illustrative only and are not intended to be necessarily limiting.

### BRIEF DESCRIPTION OF THE SEVERAL VIEWS OF THE DRAWINGS

[0108] Some embodiments of the invention are herein described, by way of example only, with reference to the accompanying drawings. With specific reference now to the drawings in detail, it is stressed that the particulars shown are by way of example and for purposes of illustrative discussion of embodiments of the invention. In this regard, the description taken with the drawings makes apparent to those skilled in the art how embodiments of the invention may be practiced.

[0109] In the drawings:

[0110] FIG. 1 is a schematic illustration of the modified pGI binary plasmid containing the new At6669 promoter (SEQ ID NO: 25) and the GUSintron (pQYN 6669) used for expressing the isolated polynucleotide sequences of the invention. RB—T-DNA right border; LB—T-DNA left border; MCS—Multiple cloning site; RE—any restriction enzyme; NOS pro=nopaline synthase promoter; NPT-II=neomycin phosphotransferase gene; NOS ter=nopaline synthase terminator; Poly-A signal (polyadenylation signal); GUSintron—the GUS reporter gene (coding sequence and intron). The isolated polynucleotide sequences of the invention were cloned into the vector while replacing the GUSintron reporter gene.

[0111] FIG. 2 is a schematic illustration of the modified pGI binary plasmid containing the new At6669 promoter (SEQ ID NO: 25) (pQFN or pQFNc or pQsFN) used for expressing the isolated polynucleotide sequences of the invention. RB—T-DNA right border; LB—T-DNA left border; MCS—Multiple cloning site; RE—any restriction enzyme; NOS pro=nopaline synthase promoter; NPT-II=neomycin phosphotransferase gene; NOS ter=nopaline synthase terminator; Poly-A signal (polyadenylation signal); The isolated polynucleotide sequences of the invention were cloned into the MCS of the vector.

[0112] FIGS. 3A-F are images depicting visualization of root development of transgenic plants exogenously expressing the polynucleotide of some embodiments of the invention when grown in transparent agar plates under normal (FIGS. 3A-B), osmotic stress (15% PEG; FIGS. 3C-D) or nitrogen-limiting (FIGS. 3E-F) conditions. The different transgenes were grown in transparent agar plates for 17 days (7 days nursery and 10 days after transplanting). The plates were photographed every 3-4 days starting at day 1 after transplanting. FIG. 3A—An image of a photograph of plants taken following 10 after transplanting days on agar plates when grown under normal (standard) conditions. FIG. 3B—An image of root analysis of the plants shown in FIG. 3A in which the lengths of the roots measured are represented by arrows. FIG. 3C—An image of a photograph of plants taken following 10 days after transplanting on agar plates, grown under high osmotic (PEG 15%) conditions. FIG. 3D—An image of root analysis of the plants shown in FIG. 3C in which the lengths of the roots measured are represented by arrows. FIG. 3E—An image of a photograph of plants taken following 10 days after transplanting on agar plates, grown under low nitrogen conditions. FIG. 3F—An image of root analysis of the plants shown in FIG. 3E in which the lengths of the roots measured are represented by arrows.

[0113] FIG. 4 is a schematic illustration of the modified pGI binary plasmid containing the Root Promoter (pQNa RP) used for expressing the isolated polynucleotide sequences of the invention. RB—T-DNA right border; LB—T-DNA left border; NOS pro=nopaline synthase promoter; NPT-II=neomycin phosphotransferase gene; NOS ter=nopaline synthase terminator; Poly-A signal (polyadenylation signal). The isolated polynucleotide sequences according to some embodiments of the invention were cloned into the MCS (Multiple cloning site) of the vector.

[0114] FIG. 5 is a schematic illustration of the pQYN plasmid.

[0115] FIG. 6 is a schematic illustration of the pQFN plasmid.

[0116] FIG. 7 is a schematic illustration of the pQFYN plasmid.

[0117] FIG. 8 is a schematic illustration of the modified pGI binary plasmid (pQXNc) used for expressing the isolated polynucleotide sequences of some embodiments of the invention. RB—T-DNA right border; LB—T-DNA left border; NOS pro=nopaline synthase promoter; NPT-II=neomycin phosphotransferase gene; NOS ter=nopaline synthase terminator; RE=any restriction enzyme; Poly-A signal (polyadenylation signal); 35S=the 35S promoter (pQXNc), (SEQ ID NO: 21). The isolated polynucleotide sequences of some embodiments of the invention were cloned into the MCS (Multiple cloning site) of the vector.

[0118] FIGS. 9A-B are schematic illustrations of the pEBbVNi tDNA (FIG. 9A) and the pEBbNi tDNA (FIG. 9B) plasmids used in the Brachypodium experiments. pEBbVNi tDNA (FIG. 9A) was used for expression of the isolated polynucleotide sequences of some embodiments of the invention in Brachypodium. pEBbNi tDNA (FIG. 9B) was used for transformation into Brachypodium as a negative control. “RB”=right border; “2LBregion”=2 repeats of left border; “35S”=35S promoter (SEQ ID NO: 37 in FIG. 9A); “Ubiquitin promoter” (SEQ ID NO: 11) in both of FIGS. 9A and 9B; “NOS ter”=nopaline synthase terminator; “Bar ORF”—BAR open reading frame (GenBank Accession No. JQ293091.1; SEQ ID NO: 38). The isolated polynucleotide sequences of some embodiments of the invention were cloned into the Multiple cloning site of the vector using one or more of the indicated restriction enzyme sites.

[0119] FIG. 10 depicts seedling analysis of an Arabidopsis plant having shoots (upper part, marked “#1”) and roots (lower part, marked “#2”). Using an image analysis system the minimal convex area encompassed by the roots is determined. Such area corresponds to the root coverage of the plant.

[0120] FIG. 11 is a schematic illustration of the pQ6sVN plasmid. pQ6sVN was used for expression of the isolated polynucleotide sequences of some embodiments of the invention in Brachypodium. “35S(V)”=35S promoter (SEQ ID NO:37); “NOS ter”=nopaline synthase terminator; “Bar_GA”=BAR open reading frame optimized for expression in Brachypodium (SEQ ID NO: 39); “Hygro”=Hygromycin resistance gene. “Ubi1 promoter”=SEQ ID NO:11. The isolated polynucleotide sequences of some embodiments of the invention were cloned into the Multiple cloning site of the vector (downstream of the “35S(V)” promoter) using one or more of the indicated restriction enzyme sites.

[0121] FIG. 12 is a schematic illustration of the pQsFN plasmid containing the new At6669 promoter (SEQ ID NO: 25) used for expression the isolated polynucleotide sequences of the invention in Arabidopsis. RB—T-DNA right border; LB—T-DNA left border; MCS—Multiple cloning site; RE—any restriction enzyme; NOS pro=nopaline synthase promoter; NPT-II=neomycin phosphotransferase gene; NOS ter=nopaline synthase terminator; Poly-A signal (polyadenylation signal). The isolated polynucleotide sequences of the invention were cloned into the MCS of the vector.

[0122] FIG. 13 is schematic illustration pQ6sN plasmid, which is used as a negative control (“empty vector”) of the experiments performed when the plants were transformed with the pQ6sVN vector. “Ubi1” promoter (SEQ ID NO: 11); NOS ter=nopaline synthase terminator; “Bar_GA”=BAR open reading frame optimized for expression in Brachypodium (SEQ ID NO:39).

[0123] FIGS. 14A-J depict exemplary sequences for genome editing of a polypeptide of some embodiments of the invention. FIG. 14A—Shown is the endogenous sequence 5′ upstream flanking region (SEQ ID NO:42) of the genomic locus GRMZM2G069095. FIG. 14B—Shown is the endogenous sequence 3′-downstream flanking region (SEQ ID NO:43) of the GRMZM2G069095 genomic locus. FIG. 14C—Shown is the sequence of the 5′-UTR gRNA (SEQ ID NO: 40). FIG. 14D—Shown is the sequence of the 5′-UTR gRNA without NGG nucleotides (SEQ ID NO: 44). FIG. 14E—Shown is the sequence of the 3′-UTR gRNA (SEQ ID NO: 41). FIG. 14F—Shown is the sequence of the 3′-UTR gRNA after cut (SEQ ID NO: 45). FIG. 14G—Shown is the endogenous 5′-UTR (SEQ ID NO: 48). FIG. 14H—Shown is the endogenous 3′-UTR (SEQ ID NO: 49). FIG. 14I—Shown is the coding sequence (from the “ATG” start codon to the “TAG” termination codon, marked by bold and underlined) of the desired LBY474 sequence (SEQ ID NO: 47) encoding the polypeptide set forth by SEQ ID NO: 1981. FIG. 14J—Shown is an exemplary repair template (SEQ ID NO: 46) which includes the upstream flanking region (SEQ ID NO:42), followed by part of the gRNA after cutting (TCTCGC; shown in bold and italics), followed by the endogenous 5′-UTR (SEQ ID NO: 48) and the coding sequence (CDS) of the desired LBY474 sequence (SEQ ID NO: 47) indicated by the start (ATG) and the stop (TAG) codons (marked by bolded and underlined), followed by the endogenous 3′-UTR (SEQ ID NO:49) and the downstream flanking region (SEQ ID NO:43) with part of the gRNA after cutting (GGAATA, shown in bold and italics).

### DESCRIPTION OF SPECIFIC EMBODIMENTS

[0124] The present invention, in some embodiments thereof, relates to isolated polypeptides and polynucleotides, nucleic acid constructs comprising same, plant cells and plants over-expressing same, and more particularly, but not exclusively, to methods of using same for increasing specific traits in a plant such as yield (e.g., seed yield, oil yield), biomass, growth rate, vigor, oil content, fiber yield, fiber quality, fiber length, fiber length, photosynthetic capacity, fertilizer use efficiency (e.g., nitrogen use efficiency) and/or abiotic stress tolerance of a plant.

[0125] Before explaining at least one embodiment of the invention in detail, it is to be understood that the invention is not necessarily limited in its application to the details set forth in the following description or exemplified by the Examples. The invention is capable of other embodiments or of being practiced or carried out in various ways.

[0126] Thus, as shown in the Examples section which follows, the present inventors have utilized bioinformatics tools to identify polynucleotides which enhance/ increase fertilizer use efficiency (e.g., nitrogen use efficiency), yield (e.g., seed yield, oil yield, harvest index, oil content), growth rate, biomass, root growth, vigor, fiber yield, fiber quality, fiber length, photosynthetic capacity, and/or abiotic stress tolerance of a plant. Genes which affect the trait-of-interest were identified [SEQ ID NOs: 1992-2060, and 3041-3042 (for polypeptides); and SEQ ID NOs: 50-118, and 1970-1971 (for polynucleotides)] based on expression profiles of genes of several Arabidopsis, Barley, Sorghum, Maize, Brachypodium, soybean, tomato, cotton, bean B. Juncea, Foxtail millet, and wheat, hybrids, ecotypes and accessions in various tissues and growth conditions, homology with genes known to affect the trait-of-interest and using digital expression profile in specific tissues and conditions (Tables 1-304, and Examples 1-26 of the Examples section which follows). Homologous (e.g., orthologous or paralogues) polypeptides and polynucleotides having the same function in increasing fertilizer use efficiency (e.g., nitrogen use efficiency), yield (e.g., seed yield, oil yield, oil content), growth rate, root growth, biomass, vigor, fiber yield, fiber quality, fiber length, photosynthetic capacity, and/or abiotic stress tolerance of a plant were also identified [SEQ ID NOs: 1997, 2019, 2023, and 2077-3059 (for polypeptides), and SEQ ID NOs: 193-1991 (for polynucleotides); Table 305, Example 27 of the Examples section which follows]. The polynucleotides of some embodiments of the invention were cloned into binary vectors (Example 28, Table 306), and were further transformed into Arabidopsis and Brachypodium plants (Examples 29-31). Plants over-expressing the identified polypeptides (as compared to control, e.g., wild type plants) were evaluated for increased plant traits such as biomass, growth rate, root performance, photosynthetic capacity and yield under normal growth conditions, abiotic stress conditions and/or under nitrogen limiting growth conditions as compared to control plants grown under the same growth conditions (Tables 307-317; Examples 32-34, and 36-37). Altogether, these results suggest the use of the novel polynucleotides and polypeptides of the invention (e.g., SEQ ID NOs: 1992-3059 (polypeptides) and SEQ ID NOs: 50-1991 (polynucleotides)) for increasing nitrogen use efficiency, fertilizer use efficiency, yield (e.g., oil yield, seed yield, harvest index and oil content), growth rate, biomass, vigor, fiber yield, fiber quality, fiber length, photosynthetic capacity, water use efficiency and/or abiotic stress tolerance of a plant.

[0127] Thus, according to an aspect of some embodiments of the invention, there is provided method of increasing oil content, yield, seed yield, growth rate, biomass, vigor, fiber yield, fiber quality, fiber length, photosynthetic capacity, fertilizer use efficiency (e.g., nitrogen use efficiency) and/or abiotic stress tolerance of a plant, comprising expressing within the plant an exogenous polynucleotide comprising a nucleic acid sequence encoding a polypeptide at least about 80%, at least about 81%, at least about 82%, at least about 83%, at least about 84%, at least about 85%, at least about 86%, at least about 87%, at least about 88%, at least about 89%, at least about 90%, at least about 91%, at least about 92%, at least about 93%, at least about 94%, at least about 95%, at least about 96%, at least about 97%, at least about 98%, at least about 99%, or more say 100% homologous (e.g., identical) to the amino acid sequence selected from the group consisting of SEQ ID NOs: 1992-3040, e.g., using an exogenous polynucleotide which is at least about 80%, at least about 81%, at least about 82%, at least about 83%, at least about 84%, at least about 85%, at least about 86%, at least about 87%, at least about 88%, at least about 89%, at least about 90%, at least about 91%, at least about 92%, at least about 93%, at least about 94%, at least about 95%, at least about 96%, at least about 97%, at least about 98%, at least about 99%, or more say 100% identical to the polynucleotide selected from the group consisting of SEQ ID NOs: 50-1969, thereby increasing the oil content, yield, seed yield, growth rate, biomass, vigor, fiber yield, fiber quality, fiber length, photosynthetic capacity, fertilizer use efficiency (e.g., nitrogen use efficiency) and/or abiotic stress tolerance of the plant.

[0128] According to an aspect of some embodiments of the invention, there is provided method of increasing oil content, yield, growth rate, biomass, vigor, fiber yield, fiber quality, fiber length, photosynthetic capacity, fertilizer use efficiency (e.g., nitrogen use efficiency) and/or abiotic stress tolerance of a plant, comprising expressing within the plant an exogenous polynucleotide comprising a nucleic acid sequence encoding a polypeptide at least about 80%, at least about 81%, at least about 82%, at least about 83%, at least about 84%, at least about 85%, at least about 86%, at least about 87%, at least about 88%, at least about 89%, at least about 90%, at least about 91%, at least about 92%, at least about 93%, at least about 94%, at least about 95%, at least about 96%, at least about 97%, at least about 98%, at least about 99%, or more say 100% homologous to the amino acid sequence selected from the group consisting of SEQ ID NOs: 1992-3040, thereby increasing the oil content, yield, growth rate, biomass, vigor, fiber yield, fiber quality, fiber length, photosynthetic capacity, fertilizer use efficiency (e.g., nitrogen use efficiency) and/or abiotic stress tolerance of the plant.

[0129] As used herein the phrase “plant yield” refers to the amount (e.g., as determined by weight or size) or quantity (numbers) of tissues or organs produced per plant or per growing season. Hence increased yield could affect the economic benefit one can obtain from the plant in a certain growing area and/or growing time.

[0130] It should be noted that a plant yield can be affected by various parameters including, but not limited to, plant biomass; plant vigor; growth rate; seed yield; seed or grain quantity; seed or grain quality; oil yield; content of oil, starch and/or protein in harvested organs (e.g., seeds or vegetative parts of the plant); number of flowers (florets) per panicle (expressed as a ratio of number of filled seeds over number of primary panicles); harvest index; number of plants grown per area; number and size of harvested organs per plant and per area; number of plants per growing area (density); number of harvested organs in field; total leaf area; carbon assimilation and carbon partitioning (the distribution/allocation of carbon within the plant); resistance to shade; number of harvestable organs (e.g. seeds), seeds per pod, weight per seed; and modified architecture [such as increase stalk diameter, thickness or improvement of physical properties (e.g. elasticity)].

[0131] As used herein the phrase “seed yield” refers to the number or weight of the seeds per plant, pod or spike weight, seeds per pod, or per growing area or to the weight of a single seed, or to the oil extracted per seed. Hence seed yield can be affected by seed dimensions (e.g., length, width, perimeter, area and/or volume), number of (filled) seeds and seed filling rate and by seed oil content. Hence increase seed yield per plant could affect the economic benefit one can obtain from the plant in a certain growing area and/or growing time; and increase seed yield per growing area could be achieved by increasing seed yield per plant, and/or by increasing number of plants grown on the same given area or by increase harvest index (seed yield per the total biomass).

[0132] The term “seed” (also referred to as “grain” or “kernel”) as used herein refers to a small embryonic plant enclosed in a covering called the seed coat (usually with some stored food), the product of the ripened ovule of gymnosperm and angiosperm plants which occurs after fertilization and some growth within the mother plant.

[0133] The phrase “oil content” as used herein refers to the amount of lipids in a given plant organ, either the seeds (seed oil content) or the vegetative portion of the plant (vegetative oil content) and is typically expressed as percentage of dry weight (10% humidity of seeds) or wet weight (for vegetative portion).

[0134] It should be noted that oil content is affected by intrinsic oil production of a tissue (e.g., seed, vegetative portion), as well as the mass or size of the oil-producing tissue per plant or per growth period.

[0135] In one embodiment, increase in oil content of the plant can be achieved by increasing the size/mass of a plant's tissue(s) which comprise oil per growth period. Thus, increased oil content of a plant can be achieved by increasing the yield, growth rate, biomass and vigor of the plant.

[0136] As used herein the phrase “plant biomass” refers to the amount (e.g., measured in grams of air-dry tissue) of a tissue produced from the plant in a growing season, which could also determine or affect the plant yield or the yield per growing area. An increase in plant biomass can be in the whole plant or in parts thereof such as aboveground (harvestable) parts, vegetative biomass, leaf size or area, leaf thickness, roots and seeds.

[0137] As used herein the term “root biomass” refers to the total weight of the plant's root(s). Root biomass can be determined directly by weighing the total root material (fresh and/or dry weight) of a plant.

[0138] Additional or alternatively, the root biomass can be indirectly determined by measuring root coverage, root density and/or root length of a plant.

[0139] It should be noted that plants having a larger root coverage exhibit higher fertilizer (e.g., nitrogen) use efficiency and/or higher water use efficiency as compared to plants with a smaller root coverage.

[0140] As used herein the phrase “root coverage” refers to the total area or volume of soil or of any plant-growing medium encompassed by the roots of a plant.

[0141] According to some embodiments of the invention, the root coverage is the minimal convex volume encompassed by the roots of the plant.

[0142] It should be noted that since each plant has a characteristic root system, e.g., some plants exhibit a shallow root system (e.g., only a few centimeters below ground level), while others have a deep in soil root system (e.g., a few tens of centimeters or a few meters deep in soil below ground level), measuring the root coverage of a plant can be performed in any depth of the soil or of the plant-growing medium, and comparison of root coverage between plants of the same species (e.g., a transgenic plant exogenously expressing the polynucleotide of some embodiments of the invention and a control plant) should be performed by measuring the root coverage in the same depth.

[0143] According to some embodiments of the invention, the root coverage is the minimal convex area encompassed by the roots of a plant in a specific depth.

[0144] A non-limiting example of measuring root coverage is shown in FIG. 10.

[0145] As used herein the term “root density” refers to the density of roots in a given area (e.g., area of soil or any plant growing medium). The root density can be determined by counting the root number per a predetermined area at a predetermined depth (in units of root number per area, e.g., mm², cm² or m²).

[0146] As used herein the phrase “root length” refers to the total length of the longest root of a single plant.

[0147] As used herein the phrase “root length growth rate” refers to the change in total root length per plant per time unit (e.g., per day).

[0148] As used herein the phrase “growth rate” refers to the increase in plant organ/tissue size per time (can be measured in cm² per day or cm/day).

[0149] As used herein the phrase “photosynthetic capacity” (also known as “Aₘₐₓ”) is a measure of the maximum rate at which leaves are able to fix carbon during photosynthesis. It is typically measured as the amount of carbon dioxide that is fixed per square meter per second, for example as μmol m⁻² sec⁻¹. Plants are able to increase their photosynthetic capacity by several modes of action, such as by increasing the total leaves area (e.g., by increase of leaves area, increase in the number of leaves, and increase in plant's vigor, e.g., the ability of the plant to grow new leaves along time course) as well as by increasing the ability of the plant to efficiently execute carbon fixation in the leaves. Hence, the increase in total leaves area can be used as a reliable measurement parameter for photosynthetic capacity increment.

[0150] As used herein the phrase “plant vigor” refers to the amount (measured by weight) of tissue produced by the plant in a given time. Hence increased vigor could determine or affect the plant yield or the yield per growing time or growing area. In addition, early vigor (seed and/or seedling) results in improved field stand.

[0151] Improving early vigor is an important objective of modern rice breeding programs in both temperate and tropical rice cultivars. Long roots are important for proper soil anchorage in water-seeded rice. Where rice is sown directly into flooded fields, and where plants must emerge rapidly through water, longer shoots are associated with vigour. Where drill-seeding is practiced, longer mesocotyls and coleoptiles are important for good seedling emergence. The ability to engineer early vigor into plants would be of great importance in agriculture. For example, poor early vigor has been a limitation to the introduction of maize (Zea mays L.) hybrids based on Corn Belt germplasm in the European Atlantic.

[0152] As used herein the phrase “Harvest index” refers to the efficiency of the plant to allocate assimilates and convert the vegetative biomass in to reproductive biomass such as fruit and seed yield.

[0153] Harvest index is influenced by yield component, plant biomass and indirectly by all tissues participant in remobilization of nutrients and carbohydrates in the plants such as stem width, rachis width and plant height. Improving harvest index will improve the plant reproductive efficiency (yield per biomass production) hence will improve yield per growing area. The Harvest Index can be calculated using Formulas 15, 16, 17, 18 and 65 as described below.

[0154] As used herein the phrase “Grain filling period” refers to the time in which the grain or seed accumulates the nutrients and carbohydrates until seed maturation (when the plant and grains/seeds are dried).

[0155] Grain filling period is measured as number of days from flowering/heading until seed maturation. Longer period of “grain filling period” can support remobilization of nutrients and carbohydrates that will increase yield components such as grain/seed number, 1000 grain/seed weight and grain/seed yield.

[0156] As used herein the phrase “flowering” refers to the time from germination to the time when the first flower is open.

[0157] As used herein the phrase “heading” refers to the time from germination to the time when the first head immerges.

[0158] As used herein the phrase “plant height” refers to measuring plant height as indication for plant growth status, assimilates allocation and yield potential. In addition, plant height is an important trait to prevent lodging (collapse of plants with high biomass and height) under high density agronomical practice.

[0159] Plant height is measured in various ways depending on the plant species but it is usually measured as the length between the ground level and the top of the plant, e.g., the head or the reproductive tissue.

[0160] It should be noted that a plant trait such as those described herein [e.g., yield, growth rate, biomass, vigor, oil content, fiber yield, fiber quality, fiber length, harvest index, grain filling period, flowering, heading, plant height, photosynthetic capacity, fertilizer use efficiency (e.g., nitrogen use efficiency)] can be determined under stress (e.g., abiotic stress, nitrogen-limiting conditions) and/or non-stress (normal) conditions.

[0161] As used herein, the phrase “non-stress conditions” or “normal conditions” refers to the growth conditions (e.g., water, temperature, light-dark cycles, humidity, salt concentration, fertilizer concentration in soil, nutrient supply such as nitrogen, phosphorous and/or potassium), that do not significantly go beyond the everyday climatic and other abiotic conditions that plants may encounter, and which allow optimal growth, metabolism, reproduction and/or viability of a plant at any stage in its life cycle (e.g., in a crop plant from seed to a mature plant and back to seed again). Persons skilled in the art are aware of normal soil conditions and climatic conditions for a given plant in a given geographic location. It should be noted that while the non-stress conditions may include some mild variations from the optimal conditions (which vary from one type/species of a plant to another), such variations do not cause the plant to cease growing without the capacity to resume growth.

[0162] Following is a non-limiting description of non-stress (normal) growth conditions which can be used for growing the transgenic plants expressing the polynucleotides or polypeptides of some embodiments of the invention.

[0163] For example, normal conditions for growing Sorghum include irrigation with about 452,000 liter water per dunam (1000 square meters) and fertilization with about 14 units nitrogen per dunam per growing season.

[0164] Normal conditions for growing cotton include irrigation with about 580,000 liter water per dunam (1000 square meters) and fertilization with about 24 units nitrogen per dunam per growing season.

[0165] Normal conditions for growing bean include irrigation with about 524,000 liter water per dunam (1000 square meters) and fertilization with about 16 units nitrogen per dunam per growing season.

[0166] Normal conditions for growing B. Juncea include irrigation with about 861,000 liter water per dunam (1000 square meters) and fertilization with about 12 units nitrogen per dunam per growing season.

[0167] The phrase “abiotic stress” as used herein refers to any adverse effect on metabolism, growth, reproduction and/or viability of a plant. Accordingly, abiotic stress can be induced by suboptimal environmental growth conditions such as, for example, salinity, osmotic stress, water deprivation, drought, flooding, freezing, low or high temperature, heavy metal toxicity, anaerobiosis, nutrient deficiency (e.g., nitrogen deficiency or limited nitrogen), atmospheric pollution or UV irradiation. The implications of abiotic stress are discussed in the Background section.

[0168] The phrase “abiotic stress tolerance” as used herein refers to the ability of a plant to endure an abiotic stress without suffering a substantial alteration in metabolism, growth, productivity and/or viability.

[0169] Plants are subject to a range of environmental challenges. Several of these, including salt stress, general osmotic stress, drought stress and freezing stress, have the ability to impact whole plant and cellular water availability. Not surprisingly, then, plant responses to this collection of stresses are related. Zhu (2002) Ann. Rev. Plant Biol. 53: 247-273 et al. note that “most studies on water stress signaling have focused on salt stress primarily because plant responses to salt and drought are closely related and the mechanisms overlap”. Many examples of similar responses and pathways to this set of stresses have been documented. For example, the CBF transcription factors have been shown to condition resistance to salt, freezing and drought (Kasuga et al. (1999) Nature Biotech. 17: 287-291). The Arabidopsis rd29B gene is induced in response to both salt and dehydration stress, a process that is mediated largely through an ABA signal transduction process (Uno et al. (2000) Proc. Natl. Acad. Sci. USA 97: 11632-11637), resulting in altered activity of transcription factors that bind to an upstream element within the rd29B promoter. In Mesembryanthemum crystallinum (ice plant), Patharker and Cushman have shown that a calcium-dependent protein kinase (McCDPK1) is induced by exposure to both drought and salt stresses (Patharker and Cushman (2000) Plant J. 24: 679-691). The stress-induced kinase was also shown to phosphorylate a transcription factor, presumably altering its activity, although transcript levels of the target transcription factor are not altered in response to salt or drought stress. Similarly, Saijo et al. demonstrated that a rice salt/drought-induced calmodulin-dependent protein kinase (OsCDPK7) conferred increased salt and drought tolerance to rice when overexpressed (Saijo et al. (2000) Plant J. 23: 319-327).

[0170] Exposure to dehydration invokes similar survival strategies in plants as does freezing stress (see, for example, Yelenosky (1989) Plant Physiol 89: 444-451) and drought stress induces freezing tolerance (see, for example, Siminovitch et al. (1982) Plant Physiol 69: 250-255; and Guy et al. (1992) Planta 188: 265-270). In addition to the induction of cold-acclimation proteins, strategies that allow plants to survive in low water conditions may include, for example, reduced surface area, or surface oil or wax production. In another example increased solute content of the plant prevents evaporation and water loss due to heat, drought, salinity, osmoticum, and the like therefore providing a better plant tolerance to the above stresses.

[0171] It will be appreciated that some pathways involved in resistance to one stress (as described above), will also be involved in resistance to other stresses, regulated by the same or homologous genes. Of course, the overall resistance pathways are related, not identical, and therefore not all genes controlling resistance to one stress will control resistance to the other stresses. Nonetheless, if a gene conditions resistance to one of these stresses, it would be apparent to one skilled in the art to test for resistance to these related stresses. Methods of assessing stress resistance are further provided in the Examples section which follows.

[0172] As used herein, the phrase “drought conditions” refers to growth conditions with limited water availability. It should be noted that in assays used for determining the tolerance of a plant to drought stress the only stress induced is limited water availability, while all other growth conditions such as fertilization, temperature and light are the same as under normal conditions.

[0173] For example drought conditions for growing Brachypodium include irrigation with 240 milliliter at about 20% of tray filled capacity in order to induce drought stress, while under normal growth conditions trays irrigated with 900 milliliter whenever the tray weight reached 50% of its filled capacity.

[0174] As used herein the phrase “water use efficiency (WUE)” refers to the level of organic matter produced per unit of water consumed by the plant, i.e., the dry weight of a plant in relation to the plant's water use, e.g., the biomass produced per unit transpiration.

[0175] As used herein the phrase “fertilizer use efficiency” refers to the metabolic process(es) which lead to an increase in the plant's yield, biomass, vigor, and growth rate per fertilizer unit applied. The metabolic process can be the uptake, spread, absorbent, accumulation, relocation (within the plant) and use of one or more of the minerals and organic moieties absorbed by the plant, such as nitrogen, phosphates and/or potassium.

[0176] As used herein the phrase “fertilizer-limiting conditions” refers to growth conditions which include a level (e.g., concentration) of a fertilizer applied which is below the level needed for normal plant metabolism, growth, reproduction and/or viability.

[0177] As used herein the phrase “nitrogen use efficiency (NUE)” refers to the metabolic process(es) which lead to an increase in the plant's yield, biomass, vigor, and growth rate per nitrogen unit applied. The metabolic process can be the uptake, spread, absorbent, accumulation, relocation (within the plant) and use of nitrogen absorbed by the plant.

[0178] As used herein the phrase “nitrogen-limiting conditions” refers to growth conditions which include a level (e.g., concentration) of nitrogen (e.g., ammonium or nitrate) applied which is below the level needed for normal plant metabolism, growth, reproduction and/or viability.

[0179] Improved plant NUE and FUE is translated in the field into either harvesting similar quantities of yield, while implementing less fertilizers, or increased yields gained by implementing the same levels of fertilizers. Thus, improved NUE or FUE has a direct effect on plant yield in the field. Thus, the polynucleotides and polypeptides of some embodiments of the invention positively affect plant yield, seed yield, and plant biomass. In addition, the benefit of improved plant NUE will certainly improve crop quality and biochemical constituents of the seed such as protein yield and oil yield.

[0180] It should be noted that improved ABST will confer plants with improved vigor also under non-stress conditions, resulting in crops having improved biomass and/or yield e.g., elongated fibers for the cotton industry, higher oil content.

[0181] The term “fiber” is usually inclusive of thick-walled conducting cells such as vessels and tracheids and to fibrillar aggregates of many individual fiber cells. Hence, the term “fiber” refers to (a) thick-walled conducting and non-conducting cells of the xylem; (b) fibers of extraxylary origin, including those from phloem, bark, ground tissue, and epidermis; and (c) fibers from stems, leaves, roots, seeds, and flowers or inflorescences (such as those of Sorghum vulgare used in the manufacture of brushes and brooms).

[0182] Example of fiber producing plants, include, but are not limited to, agricultural crops such as cotton, silk cotton tree (Kapok, Ceiba pentandra), desert willow, creosote bush, winterfat, balsa, kenaf, roselle, jute, sisal abaca, flax, corn, sugar cane, hemp, ramie, kapok, coir, bamboo, spanish moss and Agave spp. (e.g. sisal).

[0183] As used herein the phrase “fiber quality” refers to at least one fiber parameter which is agriculturally desired, or required in the fiber industry (further described hereinbelow). Examples of such parameters, include but are not limited to, fiber length, fiber strength, fiber fitness, fiber weight per unit length, maturity ratio and uniformity (further described hereinbelow).

[0184] Cotton fiber (lint) quality is typically measured according to fiber length, strength and fineness. Accordingly, the lint quality is considered higher when the fiber is longer, stronger and finer.

[0185] As used herein the phrase “fiber yield” refers to the amount or quantity of fibers produced from the fiber producing plant.

[0186] As mentioned hereinabove, transgenic plants of the present invention can be used for improving myriad of commercially desired traits which are all interrelated as is discussed hereinbelow.

[0187] As used herein the term “trait” refers to a characteristic or quality of a plant which may overall (either directly or indirectly) improve the commercial value of the plant.

[0188] As used herein the term “increasing” refers to at least about 2%, at least about 3%, at least about 4%, at least about 5%, at least about 10%, at least about 15%, at least about 20%, at least about 30%, at least about 40%, at least about 50%, at least about 60%, at least about 70%, at least about 80%, increase in the trait [e.g., yield, seed yield, biomass, growth rate, root growth, vigor, oil content, fiber yield, fiber quality, fiber length, photosynthetic capacity, abiotic stress tolerance, and/or nitrogen use efficiency of a plant as compared to a control plant (a plant which is not modified with the biomolecules (polynucleotide or polypeptides) of the invention), such as a native plant, a wild type plant, a non-transformed plant or a non-genomic edited plant of the same species which is grown under the same (e.g., identical) growth conditions.

[0189] The phrase “over-expressing a polypeptide” as used herein refers to increasing the level of the polypeptide within the plant as compared to a control plant of the same species under the same growth conditions.

[0190] According to some embodiments of the invention the increased level of the polypeptide is in a specific cell type or organ of the plant.

[0191] According to some embodiments of the invention, the increased level of the polypeptide is in a temporal time point of the plant.

[0192] According to some embodiments of the invention, the increased level of the polypeptide is during the whole life cycle of the plant.

[0193] For example, over-expression of a polypeptide can be achieved by elevating the expression level of a native gene of a plant as compared to a control plant. This can be done for example, by means of genome editing which are further described hereinunder, e.g., by introducing mutation(s) in regulatory element(s) (e.g., an enhancer, a promoter, an untranslated region, an intronic region) which result in upregulation of the native gene, and/or by Homology Directed Repair (SDR), e.g., for introducing a “repair template” encoding the polypeptide-of-interest.

[0194] Additionally and/or alternatively, over--expression of a polypeptide can be achieved by increasing a level of a polypeptide-of-interest due to expression of a heterologous polynucleotide by means of recombinant DNA technology, e.g., using a nucleic acid construct comprising a polynucleotide encoding the polypeptide-of-interest.

[0195] It should be noted that in case the plant-of-interest (e.g., a plant for which over-expression of a polypeptide is desired) has no detectable expression level of the polypeptide-of-interest prior to employing the method of some embodiments of the invention, qualifying an “over-expression” of the polypeptide in the plant is performed by determination of a positive detectable expression level of the polypeptide-of-interest in a plant cell and/or a plant.

[0196] Additionally and/or alternatively in case the plant-of-interest (e.g., a plant for which over-expression of a polypeptide is desired) has some degree of detectable expression level of the polypeptide-of-interest prior to employing the method of some embodiments of the invention, qualifying an “over-expression” of the polypeptide in the plant is performed by determination of an increased level of expression of the polypeptide-of-interest in a plant cell and/or a plant as compared to a control plant cell and/or plant, respectively, of the same species which is grown under the same (e.g., identical) growth conditions.

[0197] Methods of detecting presence or absence of a polypeptide in a plant cell and/or in a plant, as well as quantification of protein expression levels are well known in the art (e.g., protein detection methods), and are further described hereinunder.

[0198] As used herein the phrase “expressing an exogenous polynucleotide encoding a polypeptide” refers to expression at the mRNA level.

[0199] As used herein, the phrase “exogenous polynucleotide” refers to a heterologous nucleic acid sequence which may not be naturally expressed within the plant (e.g., a nucleic acid sequence from a different species) or which overexpression in the plant is desired. The exogenous polynucleotide may be introduced into the plant in a stable or transient manner, so as to produce a ribonucleic acid (RNA) molecule and/or a polypeptide molecule. It should be noted that the exogenous polynucleotide may comprise a nucleic acid sequence which is identical or partially homologous to an endogenous nucleic acid sequence of the plant.

[0200] The term “endogenous” as used herein refers to any polynucleotide or polypeptide which is present and/or naturally expressed within a plant or a cell thereof.

[0201] According to some embodiments of the invention, the exogenous polynucleotide of the invention comprises a nucleic acid sequence encoding a polypeptide having an amino acid sequence at least about 80%, at least about 81%, at least about 82%, at least about 83%, at least about 84%, at least about 85%, at least about 86%, at least about 87%, at least about 88%, at least about 89%, at least about 90%, at least about 91%, at least about 92%, at least about 93%, at least about 94%, at least about 95%, at least about 96%, at least about 97%, at least about 98%, at least about 99%, or more say 100% homologous (e.g., identical) to the amino acid sequence selected from the group consisting of SEQ ID NOs: 1912-2922, 2991-3002 and 3004.

[0202] Homologous sequences include both orthologous and paralogous sequences. The term “paralogous” relates to gene-duplications within the genome of a species leading to paralogous genes. The term “orthologous” relates to homologous genes in different organisms due to ancestral relationship. Thus, orthologs are evolutionary counterparts derived from a single ancestral gene in the last common ancestor of given two species (Koonin E V and Galperin M Y (Sequence-Evolution-Function: Computational Approaches in Comparative Genomics. Boston: Kluwer Academic; 2003. Chapter 2, Evolutionary Concept in Genetics and Genomics. Available from: ncbi (dot) nlm (dot) nih (dot) gov/books/NBK20255) and therefore have great likelihood of having the same function.

[0203] One option to identify orthologues in monocot plant species is by performing a reciprocal blast search. This may be done by a first blast involving blasting the sequence-of-interest against any sequence database, such as the publicly available NCBI database which may be found at: ncbi (dot) nlm (dot) nih (dot) gov. If orthologues in rice were sought, the sequence-of-interest would be blasted against, for example, the 28,469 full-length cDNA clones from Oryza sativa Nipponbare available at NCBI. The blast results may be filtered. The full-length sequences of either the filtered results or the non-filtered results are then blasted back (second blast) against the sequences of the organism from which the sequence-of-interest is derived. The results of the first and second blasts are then compared. An orthologue is identified when the sequence resulting in the highest score (best hit) in the first blast identifies in the second blast the query sequence (the original sequence-of-interest) as the best hit. Using the same rational a paralogue (homolog to a gene in the same organism) is found. In case of large sequence families, the ClustalW program may be used [ebi (dot) ac (dot) uk/Tools/clustalw2/index (dot) html], followed by a neighbor-joining tree (wikipedia (dot) org/wiki/Neighbor-joining) which helps visualizing the clustering.

[0204] Homology (e.g., percent homology, sequence identity+sequence similarity) can be determined using any homology comparison software computing a pairwise sequence alignment.

[0205] As used herein, “sequence identity” or “identity” in the context of two nucleic acid or polypeptide sequences includes reference to the residues in the two sequences which are the same when aligned. When percentage of sequence identity is used in reference to proteins it is recognized that residue positions which are not identical often differ by conservative amino acid substitutions, where amino acid residues are substituted for other amino acid residues with similar chemical properties (e.g. charge or hydrophobicity) and therefore do not change the functional properties of the molecule. Where sequences differ in conservative substitutions, the percent sequence identity may be adjusted upwards to correct for the conservative nature of the substitution. Sequences which differ by such conservative substitutions are considered to have “sequence similarity” or “similarity”. Means for making this adjustment are well-known to those of skill in the art. Typically this involves scoring a conservative substitution as a partial rather than a full mismatch, thereby increasing the percentage sequence identity. Thus, for example, where an identical amino acid is given a score of 1 and a non-conservative substitution is given a score of zero, a conservative substitution is given a score between zero and 1. The scoring of conservative substitutions is calculated, e.g., according to the algorithm of Henikoff S and Henikoff JG. [Amino acid substitution matrices from protein blocks. Proc. Natl. Acad. Sci. U.S.A. 1992, 89(22): 10915-9].

[0206] Identity (e.g., percent homology) can be determined using any homology comparison software, including for example, the BlastN software of the National Center of Biotechnology Information (NCBI) such as by using default parameters.

[0207] According to some embodiments of the invention, the identity is a global identity, i.e., an identity over the entire amino acid or nucleic acid sequences of the invention and not over portions thereof.

[0208] According to some embodiments of the invention, the term “homology” or “homologous” refers to identity of two or more nucleic acid sequences; or identity of two or more amino acid sequences; or the identity of an amino acid sequence to one or more nucleic acid sequence.

[0209] According to some embodiments of the invention, the homology is a global homology, i.e., an homology over the entire amino acid or nucleic acid sequences of the invention and not over portions thereof.

[0210] The degree of homology or identity between two or more sequences can be determined using various known sequence comparison tools. Following is a non-limiting description of such tools which can be used along with some embodiments of the invention.

[0211] Pairwise global alignment was defined by S. B. Needleman and C. D. Wunsch, “A general method applicable to the search of similarities in the amino acid sequence of two proteins” Journal of Molecular Biology, 1970, pages 443-53, volume 48).

[0212] For example, when starting from a polypeptide sequence and comparing to other polypeptide sequences, the EMBOSS-6.0.1 Needleman-Wunsch algorithm (available from emboss(dot)sourceforge(dot)net/apps/cvs/emboss/apps/needle(dot)html) can be used to find the optimum alignment (including gaps) of two sequences along their entire length—a “Global alignment”. Default parameters for Needleman-Wunsch algorithm (EMBOSS-6.0.1) include: gapopen=10; gapextend=0.5; datafile=EBLOSUM62; brief=YES.

[0213] According to some embodiments of the invention, the parameters used with the EMBOSS-6.0.1 tool (for protein-protein comparison) include: gapopen=8; gapextend=2; datafile=EBLOSUM62; brief=YES.

[0214] According to some embodiments of the invention, the threshold used to determine homology using the EMBOSS-6.0.1 Needleman-Wunsch algorithm is 80%, 81%, 82%, 83%, 84%, 85%, 86%, 87%, 88%, 89%, 90%, 91%, 92%, 93%, 94%, 95%, 96%, 97%, 98%, 99%, or 100%.

[0215] When starting from a polypeptide sequence and comparing to polynucleotide sequences, the OneModel FramePlus algorithm [“Halperin, E., Faigler, S. and Gill-More, R. (1999)—FramePlus: aligning DNA to protein sequences. Bioinformatics, 15, 867-873”, available from biocceleration(dot)com/Products(dot)html] can be used with following default parameters: model=frame+_p2n.model mode=local.

[0216] According to some embodiments of the invention, the parameters used with the OneModel FramePlus algorithm are model=frame+_p2n.model, mode=qglobal. According to some embodiments of the invention, the threshold used to determine homology using the OneModel FramePlus algorithm is 80%, 81%, 82%, 83%, 84%, 85%, 86%, 87%, 88%, 89%, 90%, 91%, 92%, 93%, 94%, 95%, 96%, 97%, 98%, 99%, or 100%.

[0217] When starting with a polynucleotide sequence and comparing to other polynucleotide sequences the EMBOSS-6.0.1 Needleman-Wunsch algorithm (available from emboss(dot)sourceforge(dot)net/apps/cvs/emboss/apps/needle(dot)html) can be used with the following default parameters: (EMBOSS-6.0.1) gapopen=10; gapextend=0.5; datafile=EDNAFULL; brief=YES.

[0218] According to some embodiments of the invention, the parameters used with the EMBOSS-6.0.1 Needleman-Wunsch algorithm are gapopen=10; gapextend=0.2; datafile=EDNAFULL; brief=YES.

[0219] According to some embodiments of the invention, the threshold used to determine homology using the EMBOSS-6.0.1 Needleman-Wunsch algorithm for comparison of polynucleotides with polynucleotides is 80%, 81%, 82%, 83%, 84%, 85%, 86%, 87%, 88%, 89%, 90%, 91%, 92%, 93%, 94%, 95%, 96%, 97%, 98%, 99%, or 100%.

[0220] According to some embodiment, determination of the degree of homology further requires employing the Smith-Waterman algorithm (for protein-protein comparison or nucleotide-nucleotide comparison).

[0221] Default parameters for GenCore 6.0 Smith-Waterman algorithm include: model=sw.model.

[0222] According to some embodiments of the invention, the threshold used to determine homology using the Smith-Waterman algorithm is 80%, 81%, 82%, 83%, 84%, 85%, 86%, 87%, 88%, 89%, 90%, 91%, 92%, 93%, 94%, 95%, 96%, 97%, 98%, 99%, or 100%.

[0223] According to some embodiments of the invention, the global homology is performed on sequences which are pre-selected by local homology to the polypeptide or polynucleotide of interest (e.g., 60% identity over 60% of the sequence length), prior to performing the global homology to the polypeptide or polynucleotide of interest (e.g., 80% global homology on the entire sequence). For example, homologous sequences are selected using the BLAST software with the Blastp and tBlastn algorithms as filters for the first stage, and the needle (EMBOSS package) or Frame+ algorithm alignment for the second stage. Local identity (Blast alignments) is defined with a very permissive cutoff—60% Identity on a span of 60% of the sequences lengths because it is used only as a filter for the global alignment stage. In this specific embodiment (when the local identity is used), the default filtering of the Blast package is not utilized (by setting the parameter “−F F”).

[0224] In the second stage, homologs are defined based on a global identity of at least 80% to the core gene polypeptide sequence.

[0225] According to some embodiments of the invention, two distinct forms for finding the optimal global alignment for protein or nucleotide sequences are used:

[0226] 1. Between Two Proteins (Following the Blastp Filter): EMBOSS-6.0.1 Needleman-Wunsch algorithm with the following modified parameters: gapopen=8 gapextend=2. The rest of the parameters are unchanged from the default options listed here:

[0227] Standard (Mandatory) Qualifiers:

[0228] [asequence] sequence Sequence filename and optional format, or reference (input USA)

[0229] [bsequence] seqall Sequence(s) filename and optional format, or reference (input USA)

[0230] gapopen float [10.0 for any sequence]. The gap open penalty is the score taken away when a gap is created. The best value depends on the choice of comparison matrix. The default value assumes you are using the EBLOSUM62 matrix for protein sequences, and the EDNAFULL matrix for nucleotide sequences. (Floating point number from 1.0 to 100.0)

[0231] gapextend float [0.5 for any sequence]. The gap extension, penalty is added to the standard gap penalty for each base or residue in the gap. This is how long gaps are penalized. Usually you will expect a few long gaps rather than many short gaps, so the gap extension penalty should be lower than the gap penalty. An exception is where one or both sequences are single reads with possible sequencing errors in which case you would expect many single base gaps. You can get this result by setting the gap open penalty to zero (or very low) and using the gap extension penalty to control gap scoring. (Floating point number from 0.0 to 10.0)

[0232] [outfile] align [*.needle] Output alignment file name

[0233] Additional (Optional) Qualifiers:

[0234] datafile matrixf [EBLOSUM62 for protein, EDNAFULL for DNA]. This is the scoring matrix file used when comparing sequences. By default it is the file ‘EBLOSUM62’ (for proteins) or the file ‘EDNAFULL’ (for nucleic sequences). These files are found in the ‘data’ directory of the EMBOSS installation.

[0235] Advanced (Unprompted) Qualifiers:

[0236] [no]brief boolean [Y] Brief identity and similarity

[0237] Associated Qualifiers:

[0238] “asequence” associated qualifiers

[0239] sbegin1 integer Start of the sequence to be used

[0240] send1 integer End of the sequence to be used

[0241] sreverse1 boolean Reverse (if DNA)

[0242] sask1 boolean Ask for begin/end/reverse

[0243] snucleotide1 boolean Sequence is nucleotide

[0244] sprotein1 boolean Sequence is protein

[0245] slower1 boolean Make lower case

[0246] supper1 boolean Make upper case

[0247] sformat1 string Input sequence format

[0248] sdbname1 string Database name

[0249] sid1 string Entryname

[0250] ufo1 string UFO features

[0251] fformat1 string Features format

[0252] fopenfile1 string Features file name

[0253] “bsequence” associated qualifiers

[0254] sbegin2 integer Start of each sequence to be used

[0255] send2 integer End of each sequence to be used

[0256] sreverse2 boolean Reverse (if DNA)

[0257] sask2 boolean Ask for begin/end/reverse

[0258] snucleotide2 boolean Sequence is nucleotide

[0259] sprotein2 boolean Sequence is protein

[0260] slower2 boolean Make lower case

[0261] supper2 boolean Make upper case

[0262] sformat2 string Input sequence format

[0263] sdbname2 string Database name

[0264] sid2 string Entryname

[0265] ufo2 string UFO features

[0266] fformat2 string Features format

[0267] fopenfile2 string Features file name

[0268] “outfile” associated qualifiers

[0269] aformat3 string Alignment format

[0270] aextension3 string File name extension

[0271] adirectory3 string Output directory

[0272] aname3 string Base file name

[0273] awidth3 integer Alignment width

[0274] aaccshow3 boolean Show accession number in the header

[0275] adesshow3 boolean Show description in the header

[0276] ausashow3 boolean Show the full USA in the alignment

[0277] aglobal3 boolean Show the full sequence in alignment

[0278] General Qualifiers:

[0279] auto boolean Turn off prompts

[0280] stdout boolean Write first file to standard output

[0281] filter boolean Read first file from standard input, write first file to standard output

[0282] options boolean Prompt for standard and additional values

[0283] debug boolean Write debug output to program.dbg

[0284] verbose boolean Report some/full command line options

[0285] help boolean Report command line options. More information on associated and general qualifiers can be found with -help -verbose

[0286] warning Boolean Report warnings

[0287] error boolean Report errors

[0288] fatal boolean Report fatal errors

[0289] die boolean Report dying program messages

[0290] 2. Between a protein sequence and a nucleotide sequence (following the tblastn filter): GenCore 6.0 OneModel application utilizing the Frame+ algorithm with the following parameters: model=frame+_2n.model mode=qglobal q=protein. sequence db=nucleotide.sequence. The rest of the parameters are unchanged from the default options:

### Usage:

[0291] om-model=<model_fname> [-q=]query [-db=]database [options]
[0292] model=<model_fname> Specifies the model that you want to run. All models supplied by Compugen are located in the directory $CGNROOT/models/.

### Valid Command Line Parameters:

[0293] dev=<dev_name> Selects the device to be used by the application.

### Valid Devices are:

[0294] bic—Bioccelerator (valid for SW, XSW, FRAME_N2P, and FRAME_P2N models).
[0295] xlg—BioXL/G (valid for all models except XSW).
[0296] xlp—BioXL/P (valid for SW, FRAME+_N2P, and FRAME_P2N models).
[0297] xlh—BioXL/H (valid for SW, FRAME+_N2P, and FRAME_P2N models).

[0298] soft—Software device (for all models).

[0299] q=<query> Defines the query set. The query can be a sequence file or a database reference. You can specify a query by its name or by accession number. The format is detected automatically. However, you may specify a format using the -qfmt parameter. If you do not specify a query, the program prompts for one. If the query set is a database reference, an output file is produced for each sequence in the query.
[0300] db=<database name> Chooses the database set. The database set can be a sequence file or a database reference. The database format is detected automatically. However, you may specify a format using -dfmt parameter.
[0301] qacc Add this parameter to the command line if you specify query using accession numbers.
[0302] dacc Add this parameter to the command line if you specify a database using accession numbers. -dfmt/-qfmt=<format_type> Chooses the database/query format type. Possible formats are:

[0303] fasta—fasta with seq type auto-detected.

[0304] fastap—fasta protein seq.

[0305] fastan—fasta nucleic seq.

[0306] gcg—gcg format, type is auto-detected.

[0307] gcg9seq-gcg9 format, type is auto-detected.

[0308] gcg9seqp-gcg9 format protein seq.

[0309] gcg9seqn—gcg9 format nucleic seq.

[0310] nbrf-nbrf seq, type is auto-detected.

[0311] nbrfp-nbrf protein seq.

[0312] nbrfn—nbrf nucleic seq.

[0313] emb1—emb1 and swissprot format.

[0314] genbank—genbank format (nucleic).

[0315] blast—blast format.

[0316] nbrf_gcg-nbrf-gcg seq, type is auto-detected.

[0317] nbrf gcgp-nbrf-gcg protein seq.

[0318] nbrf gcgn-nbrf-gcg nucleic seq.

[0319] raw—raw ascii sequence, type is auto-detected.

[0320] rawp—raw ascii protein sequence.

[0321] rawn—raw ascii nucleic sequence.

[0322] pir—pir codata format, type is auto-detected.

[0323] profile—gcg profile (valid only for -qfmt

[0324] in SW, XSW, FRAME_P2N, and FRAME+_P2N).
[0325] out=<out_fname> The name of the output file.
[0326] suffix=<name> The output file name suffix.
[0327] gapop=<n> Gap open penalty. This parameter is not valid for FRAME+. For FrameSearch the default is 12.0. For other searches the default is 10.0.
[0328] gapext=<n> Gap extend penalty. This parameter is not valid for FRAME+. For FrameSearch the default is 4.0. For other models: the default for protein searches is 0.05, and the default for nucleic searches is 1.0.
[0329] qgapop=<n> The penalty for opening a gap in the query sequence. The default is 10.0. Valid for XSW.
[0330] qgapext=<n> The penalty for extending a gap in the query sequence. The default is 0.05. Valid for XSW.
[0331] start=<n> The position in the query sequence to begin the search.
[0332] end=<n> The position in the query sequence to stop the search.
[0333] qtrans Performs a translated search, relevant for a nucleic query against a protein database. The nucleic query is translated to six reading frames and a result is given for each frame.

[0334] Valid for SW and XSW.
[0335] dtrans Performs a translated search, relevant for a protein query against a DNA database. Each database entry is translated to six reading frames and a result is given for each frame.

[0336] Valid for SW and XSW.
[0337] Note: “-qtrans” and “-dtrans” options are mutually exclusive.
[0338] matrix=<matrix_file> Specifies the comparison matrix to be used in the search. The matrix must be in the BLAST format. If the matrix file is not located in $CGNROOT/tables/matrix, specify the full path as the value of the -matrix parameter.
[0339] trans=<transtab name> Translation table. The default location for the table is $CGNROOT/tables/trans.
[0340] onestrand Restricts the search to just the top strand of the query/database nucleic sequence.
[0341] list=<n> The maximum size of the output hit list. The default is 50.
[0342] docalign=<n> The number of documentation lines preceding each alignment. The default is 10.
[0343] thr_score=<score_name> The score that places limits on the display of results. Scores that are smaller than -thr_min value or larger than -thr_max value are not shown. Valid options are: quality.

[0344] zscore.

[0345] escore.
[0346] thr_max=<n> The score upper threshold. Results that are larger than -thr_max value are not shown.
[0347] thr_min=<n> The score lower threshold. Results that are lower than -thr_min value are not shown.
[0348] align=<n> The number of alignments reported in the output file.
[0349] noalign Do not display alignment.
[0350] Note: “-align” and “-noalign” parameters are mutually exclusive.
[0351] outfmt=<format_name> Specifies the output format type. The default format is PFS. Possible values are:

[0352] PFS—PFS text format

[0353] FASTA—FASTA text format

[0354] BLAST—BLAST text format
[0355] nonorm Do not perform score normalization.
[0356] norm=<norm_name> Specifies the normalization method. Valid options are:

[0357] log—logarithm normalization.

[0358] std—standard normalization.

[0359] stat—Pearson statistical method.
[0360] Note: “-nonorm” and “-norm” parameters cannot be used together.
[0361] Note: Parameters -xgapop, -xgapext, -fgapop, -fgapext, -ygapop, -ygapext, -delop, and -delext apply only to FRAME+.
[0362] xgapop=<n> The penalty for opening a gap when inserting a codon (triplet). The default is 12.0.
[0363] xgapext=<n> The penalty for extending a gap when inserting a codon (triplet). The default is 4.0.
[0364] ygapop=<n> The penalty for opening a gap when deleting an amino acid. The default is 12.0.
[0365] ygapext=<n> The penalty for extending a gap when deleting an amino acid. The default is 4.0.
[0366] fgapop=<n> The penalty for opening a gap when inserting a DNA base. The default is 6.0.
[0367] fgapext=<n> The penalty for extending a gap when inserting a DNA base. The default is 7.0.
[0368] delop=<n> The penalty for opening a gap when deleting a DNA base. The default is 6.0.
[0369] delext=<n> The penalty for extending a gap when deleting a DNA base. The default is 7.0.
[0370] silent No screen output is produced.
[0371] host=<host_name> The name of the host on which the server runs. By default, the application uses the host specified in the file $CGNROOT/cgnhosts.
[0372] wait Do not go to the background when the device is busy. This option is not relevant for the Parseq or Soft pseudo device.
[0373] batch Run the job in the background. When this option is specified, the file “$CGNROOT/defaults/batch.defaults” is used for choosing the batch command. If this file does not exist, the command “at now” is used to run the job.
[0374] Note:“-batch” and “-wait” parameters are mutually exclusive.
[0375] version Prints the software version number.
[0376] help Displays this help message. To get more specific help type:

[0377] “om-model=<model_fname>-help”.

[0378] According to some embodiments the homology is a local homology or a local identity.

[0379] Local alignments tools include, but are not limited to the BlastP, BlastN, BlastX or TBLASTN software of the National Center of Biotechnology Information (NCBI), FASTA, and the Smith-Waterman algorithm.

[0380] A tblastn search allows the comparison between a protein sequence to the six-frame translations of a nucleotide database. It can be a very productive way of finding homologous protein coding regions in unannotated nucleotide sequences such as expressed sequence tags (ESTs) and draft genome records (HTG), located in the BLAST databases est and htgs, respectively.

[0381] Default parameters for blastp include: Max target sequences: 100; Expected threshold: e⁻⁵; Word size: 3; Max matches in a query range: 0; Scoring parameters: Matrix—BLOSUM62; filters and masking: Filter—low complexity regions.

[0382] Local alignments tools, which can be used include, but are not limited to, the tBLASTX algorithm, which compares the six-frame conceptual translation products of a nucleotide query sequence (both strands) against a protein sequence database. Default parameters include: Max target sequences: 100; Expected threshold: 10; Word size: 3; Max matches in a query range: 0; Scoring parameters: Matrix—BLOSUM62; filters and masking: Filter—low complexity regions.

[0383] According to some embodiments of the invention, the exogenous polynucleotide of the invention encodes a polypeptide having an amino acid sequence at least about 80%, at least about 81%, at least about 82%, at least about 83%, at least about 84%, at least about 85%, at least about 86%, at least about 87%, at least about 88%, at least about 89%, at least about 90%, at least about 91%, at least about 92%, at least about 93%, at least about 94%, at least about 95%, at least about 96%, at least about 97%, at least about 98%, at least about 99%, or more say 100% identical to the amino acid sequence selected from the group consisting of SEQ ID NOs: 1992-3040.

[0384] According to some embodiments of the invention, the exogenous polynucleotide of the invention encodes a polypeptide having the amino acid sequence selected from the group consisting of SEQ ID NOs: 1992-3040 and 3041-3059.

[0385] According to some embodiments of the invention, the method of increasing yield, biomass, growth rate, vigor, oil content, fiber yield, fiber quality, fiber length, photosynthetic capacity, abiotic stress tolerance, and/or nitrogen use efficiency of a plant, is effected by expressing within the plant an exogenous polynucleotide comprising a nucleic acid sequence encoding a polypeptide at least at least about 80%, at least about 81%, at least about 82%, at least about 83%, at least about 84%, at least about 85%, at least about 86%, at least about 87%, at least about 88%, at least about 89%, at least about 90%, at least about 91%, at least about 92%, at least about 93%, at least about 94%, at least about 95%, at least about 96%, at least about 97%, at least about 98%, at least about 99%, or more say 100% identical to the amino acid sequence selected from the group consisting of SEQ ID NOs: 1992-3040, thereby increasing the yield, biomass, growth rate, vigor, oil content, fiber yield, fiber quality, fiber length, photosynthetic capacity, abiotic stress tolerance, and/or nitrogen use efficiency of the plant.

[0386] According to some embodiments of the invention, the exogenous polynucleotide encodes a polypeptide consisting of the amino acid sequence set forth by SEQ ID NO: 1992-3040, 3041-3058 or 3059.

[0387] According to an aspect of some embodiments of the invention, the method of increasing yield, biomass, growth rate, vigor, oil content, fiber yield, fiber quality, fiber length, photosynthetic capacity, abiotic stress tolerance, and/or nitrogen use efficiency of a plant, is effected by expressing within the plant an exogenous polynucleotide comprising a nucleic acid sequence encoding a polypeptide comprising an amino acid sequence selected from the group consisting of SEQ ID NOs: 1992-3040, thereby increasing the yield, biomass, growth rate, vigor, oil content, fiber yield, fiber quality, fiber length, photosynthetic capacity, abiotic stress tolerance, and/or nitrogen use efficiency of the plant.

[0388] According to an aspect of some embodiments of the invention, there is provided a method of increasing yield, biomass, growth rate, vigor, oil content, fiber yield, fiber quality, fiber length, photosynthetic capacity, abiotic stress tolerance, and/or nitrogen use efficiency of a plant, comprising expressing within the plant an exogenous polynucleotide comprising a nucleic acid sequence encoding a polypeptide selected from the group consisting of SEQ ID NOs: 1992-3040 and 3041-3059, thereby increasing the yield, biomass, growth rate, vigor, oil content, fiber yield, fiber quality, fiber length, photosynthetic capacity, abiotic stress tolerance, and/or nitrogen use efficiency of the plant.

[0389] According to some embodiments of the invention, the exogenous polynucleotide encodes a polypeptide consisting of the amino acid sequence set forth by SEQ ID NO: 1992-3040, 3041-3058 or 3059.

[0390] According to some embodiments of the invention the exogenous polynucleotide comprises a nucleic acid sequence which is at least about 80%, at least about 81%, at least about 82%, at least about 83%, at least about 84%, at least about 85%, at least about 86%, at least about 87%, at least about 88%, at least about 89%, at least about 90%, at least about 91%, at least about 92%, at least about 93%, at least about 93%, at least about 94%, at least about 95%, at least about 96%, at least about 97%, at least about 98%, at least about 99%, e.g., 100% identical to the nucleic acid sequence selected from the group consisting of SEQ ID NOs: 50-1969.

[0391] According to an aspect of some embodiments of the invention, there is provided a method of increasing yield, biomass, growth rate, vigor, oil content, fiber yield, fiber quality, fiber length, photosynthetic capacity, abiotic stress tolerance, and/or nitrogen use efficiency of a plant, comprising expressing within the plant an exogenous polynucleotide comprising a nucleic acid sequence at least about 80%, at least about 81%, at least about 82%, at least about 83%, at least about 84%, at least about 85%, at least about 86%, at least about 87%, at least about 88%, at least about 89%, at least about 90%, at least about 91%, at least about 92%, at least about 93%, at least about 93%, at least about 94%, at least about 95%, at least about 96%, at least about 97%, at least about 98%, at least about 99%, e.g., 100% identical to the nucleic acid sequence selected from the group consisting of SEQ ID NOs: 50-1969, thereby increasing the yield, biomass, growth rate, vigor, oil content, fiber yield, fiber quality, fiber length, photosynthetic capacity, abiotic stress tolerance, and/or nitrogen use efficiency of the plant.

[0392] According to some embodiments of the invention the exogenous polynucleotide is at least about 80%, at least about 81%, at least about 82%, at least about 83%, at least about 84%, at least about 85%, at least about 86%, at least about 87%, at least about 88%, at least about 89%, at least about 90%, at least about 91%, at least about 92%, at least about 93%, at least about 93%, at least about 94%, at least about 95%, at least about 96%, at least about 97%, at least about 98%, at least about 99%, e.g., 100% identical to the polynucleotide selected from the group consisting of SEQ ID NOs: 50-1969.

[0393] According to some embodiments of the invention the exogenous polynucleotide is set forth by SEQ ID NO: 50-1990 or 1991.

[0394] According to some embodiments of the invention the method of increasing yield, growth rate, biomass, vigor, oil content, seed yield, fiber yield, fiber quality, fiber length, photosynthetic capacity, nitrogen use efficiency, and/or abiotic stress tolerance of a plant further comprising selecting a plant having an increased yield, growth rate, biomass, vigor, oil content, seed yield, fiber yield, fiber quality, fiber length, photosynthetic capacity, nitrogen use efficiency, and/or abiotic stress tolerance as compared to the wild type plant of the same species which is grown under the same growth conditions.

[0395] According to some embodiments of the invention the method of increasing yield, growth rate, biomass, vigor, oil content, seed yield, fiber yield, fiber quality, fiber length, photosynthetic capacity, nitrogen use efficiency, and/or abiotic stress tolerance of a plant further comprising selecting a plant over-expressing the polypeptide of some embodiments of the invention for an increased yield, growth rate, biomass, vigor, oil content, seed yield, fiber yield, fiber quality, fiber length, photosynthetic capacity, nitrogen use efficiency, and/or abiotic stress tolerance as compared to a wild type plant of the same species which is grown under the same growth conditions or as compared to a plant transformed with a control vector and grown under the same growth conditions, wherein the control vector does not comprise (e.g., being devoid of) a nucleic acid sequence encoding the polypeptide of some embodiments of the invention.

[0396] It should be noted that selecting a plant having an increased trait as compared to a native (e.g., non-genome edited or non-transformed) plant grown under the same growth conditions can be performed by selecting for the trait, e.g., validating the ability of the plant over-expressing the polypeptide to exhibit the increased trait using well known assays (e.g., seedling analyses, greenhouse assays, field experiments) as is further described herein below.

[0397] According to some embodiments of the invention selecting is performed under non-stress conditions.

[0398] According to some embodiments of the invention selecting is performed under abiotic stress conditions.

[0399] According to some embodiments of the invention selecting is performed under nitrogen limiting (e.g., nitrogen deficient) conditions.

[0400] According to an aspect of some embodiments of the invention, there is provided a method of selecting a plant having increased yield, growth rate, biomass, vigor, oil content, seed yield, fiber yield, fiber quality, fiber length, photosynthetic capacity, nitrogen use efficiency, and/or abiotic stress tolerance as compared to a wild type plant of the same species which is grown under the same growth conditions, the method comprising:

[0401] (a) providing plants which have been subjected to genome editing for over-expressing a polypeptide comprising an amino acid sequence at least about 80%, at least about 81%, at least about 82%, at least about 83%, at least about 84%, at least about 85%, at least about 86%, at least about 87%, at least about 88%, at least about 89%, at least about 90%, at least about 91%, at least about 92%, at least about 93%, at least about 93%, at least about 94%, at least about 95%, at least about 96%, at least about 97%, at least about 98%, at least about 99%, e.g., 100% homologous (e.g., having sequence similarity or sequence identity) to the amino acid sequence selected from the group consisting of SEQ ID NOs: 1992-3040, and/or which have been transformed with an exogenous polynucleotide encoding the polypeptide comprising an amino acid sequence at least about 80%, at least about 81%, at least about 82%, at least about 83%, at least about 84%, at least about 85%, at least about 86%, at least about 87%, at least about 88%, at least about 89%, at least about 90%, at least about 91%, at least about 92%, at least about 93%, at least about 93%, at least about 94%, at least about 95%, at least about 96%, at least about 97%, at least about 98%, at least about 99%, e.g., 100% homologous (e.g., having sequence similarity or sequence identity) to the amino acid sequence selected from the group consisting of SEQ ID NOs: 1992-3040,

[0402] (b) selecting from the plants of step (a) a plant having increased yield, growth rate, biomass, vigor, oil content, seed yield, fiber yield, fiber quality, fiber length, photosynthetic capacity, nitrogen use efficiency, and/or abiotic stress tolerance (e.g., by selecting the plants for the increased trait),

[0403] thereby selecting the plant having increased yield, growth rate, biomass, vigor, oil content, seed yield, fiber yield, fiber quality, fiber length, photosynthetic capacity, nitrogen use efficiency, and/or abiotic stress tolerance as compared to the wild type plant of the same species which is grown under the same growth conditions.

[0404] According to an aspect of some embodiments of the invention, there is provided a method of selecting a transformed plant having increased yield, growth rate, biomass, vigor, oil content, seed yield, fiber yield, fiber quality, fiber length, photosynthetic capacity, nitrogen use efficiency, and/or abiotic stress tolerance as compared to a wild type plant of the same species which is grown under the same growth conditions, the method comprising:

[0405] (a) providing plants transformed with an exogenous polynucleotide at least about 80%, at least about 81%, at least about 82%, at least about 83%, at least about 84%, at least about 85%, at least about 86%, at least about 87%, at least about 88%, at least about 89%, at least about 90%, at least about 91%, at least about 92%, at least about 93%, at least about 93%, at least about 94%, at least about 95%, at least about 96%, at least about 97%, at least about 98%, at least about 99%, e.g., 100% identical to the nucleic acid sequence selected from the group consisting of SEQ ID NOs: 50-1969,

[0406] (b) selecting from the plants of step (a) a plant having increased yield, growth rate, biomass, vigor, oil content, seed yield, fiber yield, fiber quality, fiber length, photosynthetic capacity, nitrogen use efficiency, and/or abiotic stress tolerance,

[0407] thereby selecting the plant having increased yield, growth rate, biomass, vigor, oil content, seed yield, fiber yield, fiber quality, fiber length, photosynthetic capacity, nitrogen use efficiency, and/or abiotic stress tolerance as compared to the wild type plant of the same species which is grown under the same growth conditions.

[0408] According to some embodiments of the invention, the transformed plant is homozygote to the transgene, and accordingly all seeds generated thereby include the transgene.

[0409] As used herein the term “polynucleotide” refers to a single or double stranded nucleic acid sequence which is isolated and provided in the form of an RNA sequence, a complementary polynucleotide sequence (cDNA), a genomic polynucleotide sequence and/or a composite polynucleotide sequences (e.g., a combination of the above).

[0410] The term “isolated” refers to at least partially separated from the natural environment e.g., from a plant cell.

[0411] As used herein the phrase “complementary polynucleotide sequence” refers to a sequence, which results from reverse transcription of messenger RNA using a reverse transcriptase or any other RNA dependent DNA polymerase. Such a sequence can be subsequently amplified in vivo or in vitro using a DNA dependent DNA polymerase.

[0412] As used herein the phrase “genomic polynucleotide sequence” refers to a sequence derived (isolated) from a chromosome and thus it represents a contiguous portion of a chromosome.

[0413] As used herein the phrase “composite polynucleotide sequence” refers to a sequence, which is at least partially complementary and at least partially genomic. A composite sequence can include some exonal sequences required to encode the polypeptide of the present invention, as well as some intronic sequences interposing therebetween. The intronic sequences can be of any source, including of other genes, and typically will include conserved splicing signal sequences. Such intronic sequences may further include cis acting expression regulatory elements.

[0414] Nucleic acid sequences encoding the polypeptides of the present invention may be optimized for expression. Examples of such sequence modifications include, but are not limited to, an altered G/C content to more closely approach that typically found in the plant species of interest, and the removal of codons atypically found in the plant species commonly referred to as codon optimization.

[0415] The phrase “codon optimization” refers to the selection of appropriate DNA nucleotides for use within a structural gene or fragment thereof that approaches codon usage within the plant of interest. Therefore, an optimized gene or nucleic acid sequence refers to a gene in which the nucleotide sequence of a native or naturally occurring gene has been modified in order to utilize statistically-preferred or statistically-favored codons within the plant. The nucleotide sequence typically is examined at the DNA level and the coding region optimized for expression in the plant species determined using any suitable procedure, for example as described in Sardana et al. (1996, Plant Cell Reports 15:677-681). In this method, the standard deviation of codon usage, a measure of codon usage bias, may be calculated by first finding the squared proportional deviation of usage of each codon of the native gene relative to that of highly expressed plant genes, followed by a calculation of the average squared deviation. The formula used is: 1 SDCU=n=1 N[(Xn−Yn)/Yn]2/N, where Xn refers to the frequency of usage of codon n in highly expressed plant genes, where Yn to the frequency of usage of codon n in the gene of interest and N refers to the total number of codons in the gene of interest. A Table of codon usage from highly expressed genes of dicotyledonous plants is compiled using the data of Murray et al. (1989, Nuc Acids Res. 17:477-498).

[0416] One method of optimizing the nucleic acid sequence in accordance with the preferred codon usage for a particular plant cell type is based on the direct use, without performing any extra statistical calculations, of codon optimization Tables such as those provided on-line at the Codon Usage Database through the NIAS (National Institute of Agrobiological Sciences) DNA bank in Japan (kazusa (dot) or (dot) jp/codon/). The Codon Usage Database contains codon usage tables for a number of different species, with each codon usage Table having been statistically determined based on the data present in Genbank.

[0417] By using the above Tables to determine the most preferred or most favored codons for each amino acid in a particular species (for example, rice), a naturally-occurring nucleotide sequence encoding a protein of interest can be codon optimized for that particular plant species. This is effected by replacing codons that may have a low statistical incidence in the particular species genome with corresponding codons, in regard to an amino acid, that are statistically more favored. However, one or more less-favored codons may be selected to delete existing restriction sites, to create new ones at potentially useful junctions (5′ and 3′ ends to add signal peptide or termination cassettes, internal sites that might be used to cut and splice segments together to produce a correct full-length sequence), or to eliminate nucleotide sequences that may negatively effect mRNA stability or expression.

[0418] The naturally-occurring nucleotide sequence may already, in advance of any modification, contain a number of codons that correspond to a statistically-favored codon in a particular plant species. Therefore, codon optimization of the native nucleotide sequence may comprise determining which codons, within the native nucleotide sequence, are not statistically-favored with regards to a particular plant, and modifying these codons in accordance with a codon usage table of the particular plant to produce a codon optimized derivative. A modified nucleotide sequence may be fully or partially optimized for plant codon usage provided that the protein encoded by the modified nucleotide sequence is produced at a level higher than the protein encoded by the corresponding naturally occurring or native gene. Construction of synthetic genes by altering the codon usage is described in for example PCT Patent Application 93/07278.

[0419] According to some embodiments of the invention, the exogenous polynucleotide is a non- coding RNA. As used herein the phrase ‘non-coding RNA″ refers to an RNA molecule which does not encode an amino acid sequence (a polypeptide). Examples of such non-coding RNA molecules include, but are not limited to, an antisense RNA, a pre-miRNA (precursor of a microRNA), or a precursor of a Piwi-interacting RNA (piRNA).

[0420] Nonlimiting examples of non-coding polynucleotides include the polynucleotides set for by SEQ ID NOs: 195, 209, 244, 265, 269, 270, 283, 295, 297, 305, 307, 314, 325, 343, 360, 378, 381, 382, 387, 389, 390, 392, 394, 395, 407, 408, 412, 421, 431, 446, 447, 448, 449, 450, 451, 452, 453, 454, 455, 456, 457, 458, 459, 460, 461, 462, 463, 464, 465, 466, 467, 468, 469, 470, 471, 472, 473, 474, 475, 476, 477, 478, 479, 480, 481, 482, 483, 484, 485, 486, 487, 488, 489, 490, 491, 492, 493, 494, 495, 496, 497, 498, 499, 500, 503, 504, 505, 506, 507, 508, 509, 510, 511, 512, 513, 514, 515, 516, 517, 518, 519, 520, 521, 522, 523, 524, 525, 526, 527, 528, 529, 530, 531, 532, 533, 534, 535, 536, 537, 538, 539, 540, 541, 542, 543, 544, 545, 546, 547, 548, 549, 550, 551, 552, 553, 554, 555, 556, 557, 558, 559, 596, 597, 598, 599, 600, 601, 602, 603, 604, 605, 606, 607, 608, 609, 610, 611, 612, 613, 614, 615, 616, 617, 618, 619, 620, 621, 622, 623, 624, 625, 626, 627, 628, 629, 630, 631, 632, 633, 634, 635, 636, 637, 638, 639, 640, 641, 642, 650, 651, 652, 653, 654, 655, 656, 657, 658, 659, 660, 661, 662, 663, 664, 665, 666, 667, 668, 669, 670, 671, 672, 673, 674, 675, 676, 677, 678, 679, 680, 681, 682, 683, 684, 685, 686, 687, 688, 689, 690, 691, 692, 693, 694, 695, 696, 697, 698, 699, 700, 701, 702, 703, 704, 705, 706, 707, 708, 709, 710, 711, 712, 713, 714, 741, 742, 743, 744, 745, 746, 747, 748, 749, 750, 751, 752, 753, 754, 755, 756, 757, 758, 759, 760, 761, 762, 763, 764, 765, 766, 767, 768, 769, 770, 771, 772, 773, 774, 775, 776, 777, 778, 779, 780, 781, 782, 783, 784, 785, 786, 787, 788, 789, 790, 791, 792, 793, 794, 795, 796, 797, 798, 799, 800, 801, 802, 803, 804, 805, 806, 807, 808, 809, 810, 811, 812, 813, 814, 815, 816, 817, 818, 819, 820, 821, 822, 823, 824, 825, 826, 827, 828, 829, 830, 831, 832, 833, 834, 835, 836, 837, 838, 839, 840, 841, 842, 843, 844, 845, 846, 847, 848, 849, 850, 851, 852, 853, 854, 855, 856, 857, 858, 859, 860, 861, 862, 863, 864, 866, 892, 893, 894, 895, 896, 897, 898, 899, 900, 901, 902, 903, 904, 905, 906, 907, 908, 909, 910, 911, 912, 913, 914, 915, 916, 917, 918, 919, 920, 921, 922, 923, 923, 924, 925, 926, 927, 928, 929, 930, 931, 932, 933, 934, 935, 936, 937, 938, 939, 940, 941, 942, 943, 944, 945, 946, 947, 948, 949, 950, 951, 952, 953, 954, 955, 956, 957, 958, 959, 960, 961, 962, 963, 964, 965, 966, 967, 968, 969, 970, 971, 972, 973, 974, 975, 976, 977, 978, 979, 980, 981, 982, 983, 984, 986, 987, 988, 989, 990, 991, 992, 993, 994, 995, 996, 997, 998, 999, 1000, 1001, 1002, 1003, 1004, 1005, 1006, 1007, 1008, 1009, 1010, 1011, 1012, 1013, 1014, 1015, 1016, 1017, 1018, 1019, 1020, 1021, 1022, 1023, 1024, 1025, 1026, 1042, 1043, 1044, 1045, 1046, 1047, 1048, 1049, 1050, 1051, 1052, 1053, 1054, 1055, 1056, 1057, 1058, 1059, 1060, 1061, 1062, 1063, 1064, 1065, 1066, 1067, 1068, 1069, 1070, 1071, 1072, 1073, 1079, 1080, 1081, 1082, 1083, 1084, 1085, 1086, 1087, 1088, 1089, 1090, 1091, 1092, 1093, 1094, 1095, 1096, 1097, 1098, 1099, 1100, 1101, 1102, 1103, 1104, 1105, 1106, 1107, 1108, 1109, 1110, 1111, 1112, 1113, 1114, 1115, 1116, 1117, 1118, 1119, 1120, 1121, 1122, 1123, 1124, 1125, 1126, 1127, 1128, 1129, 1130, 1131, 1132, 1133, 1134, 1135, 1136, 1137, 1138, 1139, 1140, 1149, 1150, 1151, 1152, 1153, 1154, 1155, 1156, 1157, 1158, 1159, 1186, 1231, 1235, 1236, 1239, 1267, 1268, 1276, 1289, 1295, 1316, 1331, 1334, 1337, 1338, 1339, 1341, 1342, 1349, 1354, 1362, 1374, 1386, 1389, 1416, 1417, 1424, 1425, 1432, 1433, 1445, 1446, 1456, 1510, 1511, 1512, 1524, 1534, 1545, 1557, 1560, 1574, 1584, 1592, 1598, 1601, 1623, 1669, 1679, 1726, 1727, 1801, 1817, 1826, 1838, 1839, 1847, 1848, 1849, 1851, 1861, 1864, 1865, 1880, 1885, 1886, 1887, 1888, 1889, 1906, 1918, 1937, 1942, 1943, 1944, 1945, 1946, 1947, 1948, 1949, 1951, 1955, 1956, 1961, 1967, and 1969.

[0421] Thus, the invention encompasses nucleic acid sequences described hereinabove; fragments thereof, sequences hybridizable therewith, sequences homologous thereto, sequences encoding similar polypeptides with different codon usage, altered sequences characterized by mutations, such as deletion, insertion or substitution of one or more nucleotides, either naturally occurring or man induced, either randomly or in a targeted fashion.

[0422] According to some embodiments of the invention, the exogenous polynucleotide encodes a polypeptide comprising an amino acid sequence at least 80%, at least about 81%, at least about 82%, at least about 83%, at least about 84%, at least about 85%, at least about 86%, at least about 87%, at least about 88%, at least about 89%, at least about 90%, at least about 91%, at least about 92%, at least about 93%, at least about 93%, at least about 94%, at least about 95%, at least about 96%, at least about 97%, at least about 98%, at least about 99%, e.g., 100% identical to the amino acid sequence of a naturally occurring plant orthologue or a naturally occurring plant paralogue of the polypeptide selected from the group consisting of SEQ ID NOs: 1992-3040.

[0423] According to some embodiments of the invention, the polypeptide comprising an amino acid sequence at least 80%, at least about 81%, at least about 82%, at least about 83%, at least about 84%, at least about 85%, at least about 86%, at least about 87%, at least about 88%, at least about 89%, at least about 90%, at least about 91%, at least about 92%, at least about 93%, at least about 93%, at least about 94%, at least about 95%, at least about 96%, at least about 97%, at least about 98%, at least about 99%, e.g., 100% identical to the amino acid sequence of a naturally occurring plant orthologue or a naturally occurring plant paralogue of the polypeptide selected from the group consisting of SEQ ID NOs: 1992-3040.

[0424] The invention provides an isolated polynucleotide comprising a nucleic acid sequence at least about 80%, at least about 81%, at least about 82%, at least about 83%, at least about 84%, at least about 85%, at least about 86%, at least about 87%, at least about 88%, at least about 89%, at least about 90%, at least about 91%, at least about 92%, at least about 93%, at least about 93%, at least about 94%, at least about 95%, at least about 96%, at least about 97%, at least about 98%, at least about 99%, e.g., 100% identical to the polynucleotide selected from the group consisting of SEQ ID NOs: 50-1969.

[0425] According to some embodiments of the invention the nucleic acid sequence is capable of increasing nitrogen use efficiency, fertilizer use efficiency, yield (e.g., seed yield, oil yield, harvest index), flowering (e.g., early flowering), grain filling period, growth rate, vigor, biomass, oil content, fiber yield, fiber quality, fiber length, photosynthetic capacity, abiotic stress tolerance and/or water use efficiency, of a plant.

[0426] According to some embodiments of the invention the isolated polynucleotide comprising the nucleic acid sequence selected from the group consisting of SEQ ID NOs: 50-1069 and 1970-1991.

[0427] According to some embodiments of the invention the isolated polynucleotide is set forth by SEQ ID NO: 50-1990 or 1991.

[0428] The invention provides an isolated polynucleotide comprising a nucleic acid sequence encoding a polypeptide which comprises an amino acid sequence at least about 80%, at least about 81%, at least about 82%, at least about 83%, at least about 84%, at least about 85%, at least about 86%, at least about 87%, at least about 88%, at least about 89%, at least about 90%, at least about 91%, at least about 92%, at least about 93%, at least about 93%, at least about 94%, at least about 95%, at least about 96%, at least about 97%, at least about 98%, at least about 99%, or more say 100% homologous to the amino acid sequence selected from the group consisting of SEQ ID NO: 1992-3039 or 3040.

[0429] According to some embodiments of the invention the amino acid sequence is capable of increasing nitrogen use efficiency, fertilizer use efficiency, yield, growth rate, root growth, vigor, biomass, oil content, fiber yield, fiber quality, fiber length, photosynthetic capacity, abiotic stress tolerance and/or water use efficiency of a plant.

[0430] The invention provides an isolated polynucleotide comprising a nucleic acid sequence encoding a polypeptide which comprises the amino acid sequence selected from the group consisting of SEQ ID NOs: 1992-3040 and 3041-3059.

[0431] According to an aspect of some embodiments of the invention, there is provided a nucleic acid construct comprising the isolated polynucleotide of the invention, and a promoter for directing transcription of the nucleic acid sequence in a host cell.

[0432] The invention provides an isolated polypeptide comprising an amino acid sequence at least about 80%, at least about 81%, at least about 82%, at least about 83%, at least about 84%, at least about 85%, at least about 86%, at least about 87%, at least about 88%, at least about 89%, at least about 90%, at least about 91%, at least about 92%, at least about 93%, at least about 93%, at least about 94%, at least about 95%, at least about 96%, at least about 97%, at least about 98%, at least about 99%, or more say 100% homologous (e.g., identical) to an amino acid sequence selected from the group consisting of SEQ ID NOs: 1992-3040.

[0433] According to some embodiments of the invention, the polypeptide comprising an amino acid sequence selected from the group consisting of SEQ ID NOs: 1992-3040 and 3041-3059.

[0434] According to some embodiments of the invention, the polypeptide is set forth by SEQ ID NO: 1992-3058 or 3059.

[0435] The invention also encompasses fragments of the above described polypeptides and polypeptides having mutations, such as deletions, insertions or substitutions of one or more amino acids, either naturally occurring or man induced, either randomly or in a targeted fashion.

[0436] The term “plant” as used herein encompasses a whole plant, a grafted plant, ancestor(s) and progeny of the plants and plant parts, including seeds, shoots, stems, roots (including tubers), rootstock, scion, and plant cells, tissues and organs. The plant may be in any form including suspension cultures, embryos, meristematic regions, callus tissue, leaves, gametophytes, sporophytes, pollen, and microspores. Plants that are particularly useful in the methods of the invention include all plants which belong to the superfamily Viridiplantae, in particular monocotyledonous and dicotyledonous plants including a fodder or forage legume, ornamental plant, food crop, tree, or shrub selected from the list comprising Acacia spp., Acer spp., Actinidia spp., Aesculus spp., Agathis australis, Albizia amara, Alsophila tricolor, Andropogon spp., Arachis spp., Areca catechu, Astelia fragrans, Astragalus cicer, Baikiaea plurijuga, Betula spp., Brassica spp., Bruguiera gymnorrhiza, Burkea africana, Butea frondosa, Cadaba farinosa, Calliandra spp, Camellia sinensis, Canna indica, Capsicum spp., Cassia spp., Centroema pubescens, Chacoomeles spp., Cinnamomum cassia, Coffea arabica, Colophospermum mopane, Coronillia varia, Cotoneaster serotina, Crataegus spp., Cucumis spp., Cupressus spp., Cyathea dealbata, Cydonia oblonga, Cryptomeria japonica, Cymbopogon spp., Cynthea dealbata, Cydonia oblonga, Dalbergia monetaria, Davallia divaricata, Desmodium spp., Dicksonia squarosa, Dibeteropogon amplectens, Dioclea spp, Dolichos spp., Dorycnium rectum, Echinochloa pyramidalis, Ehraffia spp., Eleusine coracana, Eragrestis spp., Erythrina spp., Eucalypfus spp., Euclea schimperi, Eulalia vi/losa, Pagopyrum spp., Feijoa sellowlana, Fragaria spp., Flemingia spp, Freycinetia banksli, Geranium thunbergii, GinAgo biloba, Glycine javanica, Gliricidia spp, Gossypium hirsutum, Grevillea spp., Guibourtia coleosperma, Hedysarum spp., Hemaffhia altissima, Heteropogon contoffus, Hordeum vulgare, Hyparrhenia rufa, Hypericum erectum, Hypeffhelia dissolute, Indigo incamata, Iris spp., Leptarrhena pyrolifolia, Lespediza spp., Lettuca spp., Leucaena leucocephala, Loudetia simplex, Lotonus bainesli, Lotus spp., Macrotyloma axillare, Malus spp., Manihot esculenta, Medicago saliva, Metasequoia glyptostroboides, Musa sapientum, Nicotianum spp., Onobrychis spp., Ornithopus spp., Oryza spp., Peltophorum africanum, Pennisetum spp., Persea gratissima, Petunia spp., Phaseolus spp., Phoenix canariensis, Phormium cookianum, Photinia spp., Picea glauca, Pinus spp., Pisum sativam, Podocarpus totara, Pogonarthria fleckii, Pogonaffhria squarrosa, Populus spp., Prosopis cineraria, Pseudotsuga menziesii, Pterolobium stellatum, Pyrus communis, Quercus spp., Rhaphiolepsis umbellata, Rhopalostylis sapida, Rhus natalensis, Ribes grossularia, Ribes spp., Robinia pseudoacacia, Rosa spp., Rubus spp., Salix spp., Schyzachyrium sanguineum, Sciadopitys vefficillata, Sequoia sempervirens, Sequoiadendron giganteum, Sorghum bicolor, Spinacia spp., Sporobolus fimbriatus, Stiburus alopecuroides, Stylosanthos humilis, Tadehagi spp, Taxodium distichum, Themeda triandra, Trifolium spp., Triticum spp., Tsuga heterophylla, Vaccinium spp., Vicia spp., Vitis vinifera, Watsonia pyramidata, Zantedeschia aethiopica, Zea mays, amaranth, artichoke, asparagus, broccoli, Brussels sprouts, cabbage, canola, carrot, cauliflower, celery, collard greens, flax, kale, lentil, oilseed rape, okra, onion, potato, rice, soybean, straw, sugar beet, sugar cane, sunflower, tomato, squash tea, maize, wheat, barley, rye, oat, peanut, pea, lentil and alfalfa, cotton, rapeseed, canola, pepper, sunflower, tobacco, eggplant, eucalyptus, a tree, an ornamental plant, a perennial grass and a forage crop. Alternatively algae and other non-Viridiplantae can be used for the methods of the present invention.

[0437] According to some embodiments of the invention, the plant used by the method of the invention is a crop plant such as rice, maize, wheat, barley, peanut, potato, sesame, olive tree, palm oil, banana, soybean, sunflower, canola, sugarcane, alfalfa, millet, leguminosae (bean, pea), flax, lupinus, rapeseed, tobacco, poplar and cotton.

[0438] According to some embodiments of the invention the plant is a dicotyledonous plant.

[0439] According to some embodiments of the invention the plant is a monocotyledonous plant.

[0440] According to some embodiments of the invention, there is provided a plant cell exogenously expressing the polynucleotide of some embodiments of the invention, the nucleic acid construct of some embodiments of the invention and/or the polypeptide of some embodiments of the invention.

[0441] According to some embodiments of the invention, expressing the exogenous polynucleotide of the invention within the plant is effected by transforming one or more cells of the plant with the exogenous polynucleotide, followed by generating a mature plant from the transformed cells and cultivating the mature plant under conditions suitable for expressing the exogenous polynucleotide within the mature plant.

[0442] According to some embodiments of the invention, the transformation is effected by introducing to the plant cell a nucleic acid construct which includes the exogenous polynucleotide of some embodiments of the invention and at least one promoter for directing transcription of the exogenous polynucleotide in a host cell (a plant cell). Further details of suitable transformation approaches are provided hereinbelow.

[0443] As mentioned, the nucleic acid construct according to some embodiments of the invention comprises a promoter sequence and the isolated polynucleotide of some embodiments of the invention.

[0444] According to some embodiments of the invention, the isolated polynucleotide is operably linked to the promoter sequence.

[0445] A coding nucleic acid sequence is “operably linked” to a regulatory sequence (e.g., promoter) if the regulatory sequence is capable of exerting a regulatory effect on the coding sequence linked thereto.

[0446] As used herein, the term “promoter” refers to a region of DNA which lies upstream of the transcriptional initiation site of a gene to which RNA polymerase binds to initiate transcription of RNA. The promoter controls where (e.g., which portion of a plant) and/or when (e.g., at which stage or condition in the lifetime of an organism) the gene is expressed.

[0447] According to some embodiments of the invention, the promoter is heterologous to the isolated polynucleotide and/or to the host cell.

[0448] As used herein the phrase “heterologous promoter” refers to a promoter from a different species with respect to the species from which the polynucleotide is isolated, or to a promoter from the same species but from a different gene locus within the plant's genome with respect to the gene locus from which the polynucleotide sequence is isolated.

[0449] According to some embodiments of the invention, the isolated polynucleotide is heterologous to the plant cell (e.g., the polynucleotide is derived from a different plant species when compared to the plant cell, thus the isolated polynucleotide and the plant cell are not from the same plant species).

[0450] Any suitable promoter sequence can be used by the nucleic acid construct of the present invention. Preferably the promoter is a constitutive promoter, a tissue-specific, or an abiotic stress-inducible promoter.

[0451] According to some embodiments of the invention, the promoter is a plant promoter, which is suitable for expression of the exogenous polynucleotide in a plant cell.

[0452] Suitable promoters for expression in wheat include, but are not limited to, Wheat SPA promoter (SEQ ID NO: 1; Albanietal, Plant Cell, 9: 171-184, 1997, which is fully incorporated herein by reference), wheat LMW (SEQ ID NO: 2 (longer LMW promoter), and SEQ ID NO: 3 (LMW promoter) and HMW glutenin-1 (SEQ ID NO: 4 (Wheat HMW glutenin-1 longer promoter); and SEQ ID NO: 5 (Wheat HMW glutenin-1 Promoter); Thomas and Flavell, The Plant Cell 2:1171-1180; Furtado et al., 2009 Plant Biotechnology Journal 7:240-253, each of which is fully incorporated herein by reference), wheat alpha, beta and gamma gliadins [e.g., SEQ ID NO: 6 (wheat alpha gliadin, B genome, promoter); SEQ ID NO: 7 (wheat gamma gliadin promoter); EMBO 3:1409-15, 1984, which is fully incorporated herein by reference], wheat TdPR60 [SEQ ID NO:8 (wheat TdPR60 longer promoter) or SEQ ID NO:9 (wheat TdPR60 promoter); Kovalchuk et al., Plant Mol Biol 71:81-98, 2009, which is fully incorporated herein by reference], maize Ub1 Promoter [cultivar Nongda 105 (SEQ ID NO:10); GenBank: DQ141598.1; Taylor et al., Plant Cell Rep 1993 12: 491-495, which is fully incorporated herein by reference; and cultivar B73 (SEQ ID NO:11); Christensen, A H, et al. Plant Mol. Biol. 18 (4), 675-689 (1992), which is fully incorporated herein by reference]; rice actin 1 (SEQ ID NO:12; Mc Elroy et al. 1990, The Plant Cell, Vol. 2, 163-171, which is fully incorporated herein by reference), rice GOS2 [SEQ ID NO: 13 (rice GOS2 longer promoter) and SEQ ID NO: 14 (rice GOS2 Promoter); De Pater et al. Plant J. 1992; 2: 837-44, which is fully incorporated herein by reference], Arabidopsis Pho1 [SEQ ID NO: 15 (Arabidopsis Pho1 Promoter); Hamburger et al., Plant Cell. 2002; 14: 889-902, which is fully incorporated herein by reference], ExpansinB promoters, e.g., rice ExpB5 [SEQ ID NO:16 (rice ExpB5 longer promoter) and SEQ ID NO: 17 (rice ExpB5 promoter)] and Barley ExpB1 [SEQ ID NO: 18 (barley ExpB1 Promoter), Won et al. Mol Cells. 2010; 30:369-76, which is fully incorporated herein by reference], barley SS2 (sucrose synthase 2) [(SEQ ID NO: 19), Guerin and Carbonero, Plant Physiology May 1997 vol. 114 no. 1 55-62, which is fully incorporated herein by reference], and rice PG5a [SEQ ID NO:20, U.S. Pat. No. 7,700,835, Nakase et al., Plant Mol Biol. 32:621-30, 1996, each of which is fully incorporated herein by reference].

[0453] Suitable constitutive promoters include, for example, CaMV 35S promoter [SEQ ID NO: 21 (CaMV 35S (pQXNc) Promoter); SEQ ID NO: 22 (PJJ 35S from Brachypodium); SEQ ID NO: 23 (CaMV 35S (OLD) Promoter) (Odell et al., Nature 313:810-812, 1985)], Arabidopsis At6669 promoter (SEQ ID NO: 24 (Arabidopsis At6669 (OLD) Promoter); see PCT Publication No. WO04081173A2 or the new At6669 promoter (SEQ ID NO: 25 (Arabidopsis At6669 (NEW) Promoter)); maize Ub1 Promoter [cultivar Nongda 105 (SEQ ID NO:10); GenBank: DQ141598.1; Taylor et al., Plant Cell Rep 1993 12: 491-495, which is fully incorporated herein by reference; and cultivar B73 (SEQ ID NO:11); Christensen, A H, et al. Plant Mol. Biol. 18 (4), 675-689 (1992), which is fully incorporated herein by reference]; rice actin 1 (SEQ ID NO: 12, McElroy et al., Plant Cell 2:163-171, 1990); pEMU (Last et al., Theor. Appl. Genet. 81:581-588, 1991); CaMV 19S (Nilsson et al., Physiol. Plant 100:456-462, 1997); rice GOS2 [SEQ ID NO: 13 (rice GOS2 longer Promoter) and SEQ ID NO: 14 (rice GOS2 Promoter), de Pater et al, Plant J Nov;2(6):837-44, 1992]; RBCS promoter (SEQ ID NO:26); Rice cyclophilin (Bucholz et al, Plant Mol Biol. 25(5):837-43, 1994); Maize H3 histone (Lepetit et al, Mol. Gen. Genet. 231: 276-285, 1992); Actin 2 (An et al, Plant J. 10(1);107-121, 1996) and Synthetic Super MAS (Ni et al., The Plant Journal 7: 661-76, 1995). Other constitutive promoters include those in U.S. Pat. Nos. 5,659,026, 5,608,149; 5,608,144; 5,604,121; 5,569,597: 5,466,785; 5,399,680; 5,268,463; and 5,608,142.

[0454] Suitable tissue-specific promoters include, but not limited to, leaf-specific promoters [e.g., AT5G06690 (Thioredoxin) (high expression, SEQ ID NO: 27), AT5G61520 (AtSTP3) (low expression, SEQ ID NO: 28) described in Buttner et al 2000 Plant, Cell and Environment 23, 175-184, or the promoters described in Yamamoto et al., Plant J. 12:255-265, 1997; Kwon et al., Plant Physiol. 105:357-67, 1994; Yamamoto et al., Plant Cell Physiol. 35:773-778, 1994; Gotor et al., Plant J. 3:509-18, 1993; Orozco et al., Plant Mol. Biol. 23:1129-1138, 1993; and Matsuoka et al., Proc. Natl. Acad. Sci. USA 90:9586-9590, 1993; as well as Arabidopsis STP3 (AT5G61520) promoter (Buttner et al., Plant, Cell and Environment 23:175-184, 2000)], seed-preferred promoters [e.g., Napin (originated from Brassica napus which is characterized by a seed specific promoter activity; Stuitje A. R. et. al. Plant Biotechnology Journal 1 (4): 301-309; SEQ ID NO: 29 (Brassica napus NAPIN Promoter) from seed specific genes (Simon, et al., Plant Mol. Biol. 5. 191, 1985; Scofield, et al., J. Biol. Chem. 262: 12202, 1987; Baszczynski, et al., Plant Mol. Biol. 14: 633, 1990), rice PG5a (SEQ ID NO: 20; US 7,700,835), early seed development Arabidopsis BAN (AT1G61720) (SEQ ID NO: 30, US 2009/0031450 A1), late seed development Arabidopsis ABI3 (AT3G24650) (SEQ ID NO: 31 (Arabidopsis ABI3 (AT3G24650) longer Promoter) or SEQ ID NO: 32 (Arabidopsis ABI3 (AT3G24650) Promoter)) (Ng et al., Plant Molecular Biology 54: 25-38, 2004), Brazil Nut albumin (Pearson' et al., Plant Mol. Biol. 18: 235-245, 1992), legumin (Ellis, et al. Plant Mol. Biol. 10: 203-214, 1988), Glutelin (rice) (Takaiwa, et al., Mol. Gen. Genet. 208: 15-22, 1986; Takaiwa, et al., FEBS Letts. 221: 43-47, 1987), Zein (Matzke et al Plant Mol Biol, 143).323-32 1990), napA (Stalberg, et al, Planta 199: 515-519, 1996), Wheat SPA (SEQ ID NO:1; Albanietal, Plant Cell, 9: 171-184, 1997), sunflower oleosin (Cummins, et al., Plant Mol. Biol. 19: 873-876, 1992)], endosperm specific promoters [e.g., wheat LMW (SEQ ID NO: 2 (Wheat LMW Longer Promoter), and SEQ ID NO: 3 (Wheat LMW Promoter) and HMW glutenin-1 [(SEQ ID NO: 4 (Wheat HMW glutenin-1 longer Promoter)); and SEQ ID NO: 5 (Wheat HMW glutenin-1 Promoter), Thomas and Flavell, The Plant Cell 2:1171-1180, 1990; Mol Gen Genet 216:81-90, 1989; NAR 17:461-2), wheat alpha, beta and gamma gliadins (SEQ ID NO: 6 (wheat alpha gliadin (B genome) promoter); SEQ ID NO: 7 (wheat gamma gliadin promoter); EMBO 3:1409-15, 1984), Barley 1tr1 promoter, barley B1, C, D hordein (Theor Appl Gen 98:1253-62, 1999; Plant J 4:343-55, 1993; Mol Gen Genet 250:750-60, 1996), Barley DOF (Mena et al, The Plant Journal, 116(1): 53-62, 1998), Biz2 (EP99106056.7), Barley SS2 (SEQ ID NO: 19 (Barley SS2 Promoter); Guerin and Carbonero Plant Physiology 114: 1 55-62, 1997), wheat Tarp60 (Kovalchuk et al., Plant Mol Biol 71:81-98, 2009), barley D-hordein (D-Hor) and B-hordein (B-Hor) (Agnelo Furtado, Robert J. Henry and Alessandro Pellegrineschi (2009)], Synthetic promoter (Vicente-Carbajosa et al., Plant J. 13: 629-640, 1998), rice prolamin NRP33, rice -globulin Glb-1 (Wu et al, Plant Cell Physiology 39(8) 885-889, 1998), rice alpha-globulin REB/OHP-1 (Nakase et al. Plant Mol. Biol. 33: 513-S22, 1997), rice ADP-glucose PP (Trans Res 6:157-68, 1997), maize ESR gene family (Plant J 12:235-46, 1997), sorgum gamma-kafirin (PMB 32:1029-35, 1996)], embryo specific promoters [e.g., rice OSH1 (Sato et al, Proc. Natl. Acad. Sci. USA, 93: 8117-8122), KNOX (Postma-Haarsma et al, Plant Mol. Biol. 39:257-71, 1999), rice oleosin (Wu et at, J. Biochem., 123:386, 1998)], and flower-specific promoters [e.g., AtPRP4, chalene synthase (chsA) (Van der Meer, et al., Plant Mol. Biol. 15, 95-109, 1990), LAT52 (Twell et al Mol. Gen Genet. 217:240-245; 1989), Arabidopsis apetala-3 (Tilly et al., Development. 125:1647-57, 1998), Arabidopsis APETALA 1 (AT1G69120, AP1) (SEQ ID NO: 33 (Arabidopsis (AT1G69120) APETALA 1)) (Hempel et al., Development 124:3845-3853, 1997)], and root promoters [e.g., the ROOTP promoter [SEQ ID NO: 34]; rice ExpB5 [SEQ ID NO:17 (rice ExpB5 Promoter); or SEQ ID NO: 16 (rice ExpB5 longer Promoter)] and barley ExpB1 promoters (SEQ ID NO:18) (Won et al. Mol. Cells 30: 369-376, 2010); Arabidopsis ATTPS-CIN (AT3G25820) promoter (SEQ ID NO: 35; Chen et al., Plant Phys 135:1956-66, 2004); Arabidopsis Pho1 promoter (SEQ ID NO: 15, Hamburger et al., Plant Cell. 14: 889-902, 2002), which is also slightly induced by stress].

[0455] Suitable abiotic stress-inducible promoters include, but not limited to, salt-inducible promoters such as RD29A (Yamaguchi-Shinozalei et al., Mol. Gen. Genet. 236:331-340, 1993); drought-inducible promoters such as maize rab17 gene promoter (Pla et. al., Plant Mol. Biol. 21:259-266, 1993), maize rab28 gene promoter (Busk et. al., Plant J. 11:1285-1295, 1997) and maize Ivr2 gene promoter (Pelleschi et. al., Plant Mol. Biol. 39:373-380, 1999); heat-inducible promoters such as heat tomato hsp80-promoter from tomato (U.S. Pat. No. 5,187,267).

[0456] The nucleic acid construct of some embodiments of the invention can further include an appropriate selectable marker and/or an origin of replication. According to some embodiments of the invention, the nucleic acid construct utilized is a shuttle vector, which can propagate both in E. coli (wherein the construct comprises an appropriate selectable marker and origin of replication) and be compatible with propagation in cells. The construct according to the present invention can be, for example, a plasmid, a bacmid, a phagemid, a cosmid, a phage, a virus or an artificial chromosome.

[0457] The nucleic acid construct of some embodiments of the invention can be utilized to stably or transiently transform plant cells. In stable transformation, the exogenous polynucleotide is integrated into the plant genome and as such it represents a stable and inherited trait. In transient transformation, the exogenous polynucleotide is expressed by the cell transformed but it is not integrated into the genome and as such it represents a transient trait.

[0458] There are various methods of introducing foreign genes into both monocotyledonous and dicotyledonous plants (Potrykus, I., Annu. Rev. Plant. Physiol., Plant. Mol. Biol. (1991) 42:205-225; Shimamoto et al., Nature (1989) 338:274-276).

[0459] The principle methods of causing stable integration of exogenous DNA into plant genomic DNA include two main approaches:

[0460] (i) Agrobacterium-mediated gene transfer: Klee et al. (1987) Annu. Rev. Plant Physiol. 38:467-486; Klee and Rogers in Cell Culture and Somatic Cell Genetics of Plants, Vol. 6, Molecular Biology of Plant Nuclear Genes, eds. Schell, J., and Vasil, L. K., Academic Publishers, San Diego, Calif. (1989) p. 2-25; Gatenby, in Plant Biotechnology, eds. Kung, S. and Arntzen, C. J., Butterworth Publishers, Boston, Mass. (1989) p. 93-112.

[0461] (ii) Direct DNA uptake: Paszkowski et al., in Cell Culture and Somatic Cell Genetics of Plants, Vol. 6, Molecular Biology of Plant Nuclear Genes eds. Schell, J., and Vasil, L. K., Academic Publishers, San Diego, Calif. (1989) p. 52-68; including methods for direct uptake of DNA into protoplasts, Toriyama, K. et al. (1988) Bio/Technology 6:1072-1074. DNA uptake induced by brief electric shock of plant cells: Zhang et al. Plant Cell Rep. (1988) 7:379-384. Fromm et al. Nature (1986) 319:791-793. DNA injection into plant cells or tissues by particle bombardment, Klein et al. Bio/Technology (1988) 6:559-563; McCabe et al. Bio/Technology (1988) 6:923-926; Sanford, Physiol. Plant. (1990) 79:206-209; by the use of micropipette systems: Neuhaus et al., Theor. Appl. Genet. (1987) 75:30-36; Neuhaus and Spangenberg, Physiol. Plant. (1990) 79:213-217; glass fibers or silicon carbide whisker transformation of cell cultures, embryos or callus tissue, U.S. Pat. No. 5,464,765 or by the direct incubation of DNA with germinating pollen, DeWet et al. in Experimental Manipulation of Ovule Tissue, eds. Chapman, G. P. and Mantell, S. H. and Daniels, W. Longman, London, (1985) p. 197-209; and Ohta, Proc. Natl. Acad. Sci. USA (1986) 83:715-719.

[0462] The Agrobacterium system includes the use of plasmid vectors that contain defined DNA segments that integrate into the plant genomic DNA. Methods of inoculation of the plant tissue vary depending upon the plant species and the Agrobacterium delivery system. A widely used approach is the leaf disc procedure which can be performed with any tissue explant that provides a good source for initiation of whole plant differentiation. See, e.g., Horsch et al. in Plant Molecular Biology Manual A5, Kluwer Academic Publishers, Dordrecht (1988) p. 1-9. A supplementary approach employs the Agrobacterium delivery system in combination with vacuum infiltration. The Agrobacterium system is especially viable in the creation of transgenic dicotyledonous plants.

[0463] There are various methods of direct DNA transfer into plant cells. In electroporation, the protoplasts are briefly exposed to a strong electric field. In microinjection, the DNA is mechanically injected directly into the cells using very small micropipettes. In microparticle bombardment, the DNA is adsorbed on microprojectiles such as magnesium sulfate crystals or tungsten particles, and the microprojectiles are physically accelerated into cells or plant tissues.

[0464] Following stable transformation plant propagation is exercised. The most common method of plant propagation is by seed. Regeneration by seed propagation, however, has the deficiency that due to heterozygosity there is a lack of uniformity in the crop, since seeds are produced by plants according to the genetic variances governed by Mendelian rules. Basically, each seed is genetically different and each will grow with its own specific traits. Therefore, it is preferred that the transformed plant be produced such that the regenerated plant has the identical traits and characteristics of the parent transgenic plant. Therefore, it is preferred that the transformed plant be regenerated by micropropagation which provides a rapid, consistent reproduction of the transformed plants.

[0465] Micropropagation is a process of growing new generation plants from a single piece of tissue that has been excised from a selected parent plant or cultivar. This process permits the mass reproduction of plants having the preferred tissue expressing the fusion protein. The new generation plants which are produced are genetically identical to, and have all of the characteristics of, the original plant. Micropropagation allows mass production of quality plant material in a short period of time and offers a rapid multiplication of selected cultivars in the preservation of the characteristics of the original transgenic or transformed plant. The advantages of cloning plants are the speed of plant multiplication and the quality and uniformity of plants produced.

[0466] Micropropagation is a multi-stage procedure that requires alteration of culture medium or growth conditions between stages. Thus, the micropropagation process involves four basic stages: Stage one, initial tissue culturing; stage two, tissue culture multiplication; stage three, differentiation and plant formation; and stage four, greenhouse culturing and hardening. During stage one, initial tissue culturing, the tissue culture is established and certified contaminant-free. During stage two, the initial tissue culture is multiplied until a sufficient number of tissue samples are produced from the seedlings to meet production goals. During stage three, the tissue samples grown in stage two are divided and grown into individual plantlets. At stage four, the transformed plantlets are transferred to a greenhouse for hardening where the plants' tolerance to light is gradually increased so that it can be grown in the natural environment.

[0467] According to some embodiments of the invention, the transgenic plants are generated by transient transformation of leaf cells, meristematic cells or the whole plant.

[0468] Transient transformation can be effected by any of the direct DNA transfer methods described above or by viral infection using modified plant viruses.

[0469] Viruses that have been shown to be useful for the transformation of plant hosts include CaMV, Tobacco mosaic virus (TMV), brome mosaic virus (BMV) and Bean Common Mosaic Virus (BV or BCMV). Transformation of plants using plant viruses is described in U.S. Pat. No. 4,855,237 (bean golden mosaic virus; BGV), EP-A 67,553 (TMV), Japanese Published Application No. 63-14693 (TMV), EPA 194,809 (BV), EPA 278,667 (BV); and Gluzman, Y. et al., Communications in Molecular Biology: Viral Vectors, Cold Spring Harbor Laboratory, New York, pp. 172-189 (1988). Pseudovirus particles for use in expressing foreign DNA in many hosts, including plants are described in WO 87/06261.

[0470] According to some embodiments of the invention, the virus used for transient transformations is avirulent and thus is incapable of causing severe symptoms such as reduced growth rate, mosaic, ring spots, leaf roll, yellowing, streaking, pox formation, tumor formation and pitting. A suitable avirulent virus may be a naturally occurring avirulent virus or an artificially attenuated virus. Virus attenuation may be effected by using methods well known in the art including, but not limited to, sub-lethal heating, chemical treatment or by directed mutagenesis techniques such as described, for example, by Kurihara and Watanabe (Molecular Plant Pathology 4:259-269, 2003), Gal-on et al. (1992), Atreya et al. (1992) and Huet et al. (1994).

[0471] Suitable virus strains can be obtained from available sources such as, for example, the American Type culture Collection (ATCC) or by isolation from infected plants. Isolation of viruses from infected plant tissues can be effected by techniques well known in the art such as described, for example by Foster and Taylor, Eds. “Plant Virology Protocols: From Virus Isolation to Transgenic Resistance (Methods in Molecular Biology (Humana Pr), Vol 81)”, Humana Press, 1998. Briefly, tissues of an infected plant believed to contain a high concentration of a suitable virus, preferably young leaves and flower petals, are ground in a buffer solution (e.g., phosphate buffer solution) to produce a virus infected sap which can be used in subsequent inoculations.

[0472] Construction of plant RNA viruses for the introduction and expression of non-viral exogenous polynucleotide sequences in plants is demonstrated by the above references as well as by Dawson, W. O. et al., Virology (1989) 172:285-292; Takamatsu et al. EMBO J. (1987) 6:307-311; French et al. Science (1986) 231:1294-1297; Takamatsu et al. FEBS Letters (1990) 269:73-76; and U.S. Pat. No. 5,316,931.

[0473] When the virus is a DNA virus, suitable modifications can be made to the virus itself. Alternatively, the virus can first be cloned into a bacterial plasmid for ease of constructing the desired viral vector with the foreign DNA. The virus can then be excised from the plasmid. If the virus is a DNA virus, a bacterial origin of replication can be attached to the viral DNA, which is then replicated by the bacteria. Transcription and translation of this DNA will produce the coat protein which will encapsidate the viral DNA. If the virus is an RNA virus, the virus is generally cloned as a cDNA and inserted into a plasmid. The plasmid is then used to make all of the constructions. The RNA virus is then produced by transcribing the viral sequence of the plasmid and translation of the viral genes to produce the coat protein(s) which encapsidate the viral RNA.

[0474] In one embodiment, a plant viral polynucleotide is provided in which the native coat protein coding sequence has been deleted from a viral polynucleotide, a non-native plant viral coat protein coding sequence and a non-native promoter, preferably the subgenomic promoter of the non-native coat protein coding sequence, capable of expression in the plant host, packaging of the recombinant plant viral polynucleotide, and ensuring a systemic infection of the host by the recombinant plant viral polynucleotide, has been inserted. Alternatively, the coat protein gene may be inactivated by insertion of the non-native polynucleotide sequence within it, such that a protein is produced. The recombinant plant viral polynucleotide may contain one or more additional non-native subgenomic promoters. Each non-native subgenomic promoter is capable of transcribing or expressing adjacent genes or polynucleotide sequences in the plant host and incapable of recombination with each other and with native subgenomic promoters. Non-native (foreign) polynucleotide sequences may be inserted adjacent the native plant viral subgenomic promoter or the native and a non-native plant viral subgenomic promoters if more than one polynucleotide sequence is included. The non-native polynucleotide sequences are transcribed or expressed in the host plant under control of the subgenomic promoter to produce the desired products.

[0475] In a second embodiment, a recombinant plant viral polynucleotide is provided as in the first embodiment except that the native coat protein coding sequence is placed adjacent one of the non-native coat protein subgenomic promoters instead of a non-native coat protein coding sequence.

[0476] In a third embodiment, a recombinant plant viral polynucleotide is provided in which the native coat protein gene is adjacent its subgenomic promoter and one or more non-native subgenomic promoters have been inserted into the viral polynucleotide. The inserted non-native subgenomic promoters are capable of transcribing or expressing adjacent genes in a plant host and are incapable of recombination with each other and with native subgenomic promoters. Non-native polynucleotide sequences may be inserted adjacent the non-native subgenomic plant viral promoters such that the sequences are transcribed or expressed in the host plant under control of the subgenomic promoters to produce the desired product.

[0477] In a fourth embodiment, a recombinant plant viral polynucleotide is provided as in the third embodiment except that the native coat protein coding sequence is replaced by a non-native coat protein coding sequence.

[0478] The viral vectors are encapsidated by the coat proteins encoded by the recombinant plant viral polynucleotide to produce a recombinant plant virus. The recombinant plant viral polynucleotide or recombinant plant virus is used to infect appropriate host plants. The recombinant plant viral polynucleotide is capable of replication in the host, systemic spread in the host, and transcription or expression of foreign gene(s) (exogenous polynucleotide) in the host to produce the desired protein.

[0479] Techniques for inoculation of viruses to plants may be found in Foster and Taylor, eds. “Plant Virology Protocols: From Virus Isolation to Transgenic Resistance (Methods in Molecular Biology (Humana Pr), Vol 81)”, Humana Press, 1998; Maramorosh and Koprowski, eds. “Methods in Virology” 7 vols, Academic Press, New York 1967-1984; Hill, S. A. “Methods in Plant Virology”, Blackwell, Oxford, 1984; Walkey, D. G. A. “Applied Plant Virology”, Wiley, New York, 1985; and Kado and Agrawa, eds. “Principles and Techniques in Plant Virology”, Van Nostrand-Reinhold, New York.

[0480] In addition to the above, the polynucleotide of the present invention can also be introduced into a chloroplast genome thereby enabling chloroplast expression.

[0481] A technique for introducing exogenous polynucleotide sequences to the genome of the chloroplasts is known. This technique involves the following procedures. First, plant cells are chemically treated so as to reduce the number of chloroplasts per cell to about one. Then, the exogenous polynucleotide is introduced via particle bombardment into the cells with the aim of introducing at least one exogenous polynucleotide molecule into the chloroplasts. The exogenous polynucleotides selected such that it is integratable into the chloroplast's genome via homologous recombination which is readily effected by enzymes inherent to the chloroplast. To this end, the exogenous polynucleotide includes, in addition to a gene of interest, at least one polynucleotide stretch which is derived from the chloroplast's genome. In addition, the exogenous polynucleotide includes a selectable marker, which serves by sequential selection procedures to ascertain that all or substantially all of the copies of the chloroplast genomes following such selection will include the exogenous polynucleotide. Further details relating to this technique are found in U.S. Pat. Nos. 4,945,050; and 5,693,507 which are incorporated herein by reference. A polypeptide can thus be produced by the protein expression system of the chloroplast and become integrated into the chloroplast's inner membrane.

[0482] According to some embodiments, there is provided a method of improving nitrogen use efficiency, yield, growth rate, biomass, root growth, vigor, oil content, oil yield, seed yield, fiber yield, fiber quality, fiber length, photosynthetic capacity, and/or abiotic stress tolerance of a grafted plant, the method comprising providing a scion that does not transgenically express a polynucleotide encoding a polypeptide at least 80% homologous to the amino acid sequence selected from the group consisting of SEQ ID NOs: 1992-3040 and 3041-3059 and a plant rootstock that transgenically expresses a polynucleotide encoding a polypeptide at least about 80%, at least about 81%, at least about 82%, at least about 83%, at least about 84%, at least about 85%, at least about 86%, at least about 87%, at least about 88%, at least about 89%, at least about 90%, at least about 91%, at least about 92%, at least about 93%, at least about 93%, at least about 94%, at least about 95%, at least about 96%, at least about 97%, at least about 98%, at least about 99%, e.g., 100% homologous (or identical) to the amino acid sequence selected from the group consisting of SEQ ID NOs: 1992-3040 (e.g., in a constitutive, tissue specific or inducible, e.g., in an abiotic stress responsive manner), thereby improving the nitrogen use efficiency, yield, growth rate, biomass, vigor, oil content, seed yield, fiber yield, fiber quality, fiber length, photosynthetic capacity, and/or abiotic stress tolerance of the grafted plant.

[0483] In some embodiments, the plant scion is non-transgenic.

[0484] Several embodiments relate to a grafted plant exhibiting improved nitrogen use efficiency, yield, growth rate, biomass, vigor, oil content, seed yield, fiber yield, fiber quality, fiber length, photosynthetic capacity, and/or abiotic stress tolerance, comprising a scion that does not transgenically express a polynucleotide encoding a polypeptide at least 80% homologous to the amino acid sequence selected from the group consisting of SEQ ID NOs: 1992-3040 and 3041-3059 and a plant rootstock that transgenically expresses a polynucleotide encoding a polypeptide at least about 80%, at least about 81%, at least about 82%, at least about 83%, at least about 84%, at least about 85%, at least about 86%, at least about 87%, at least about 88%, at least about 89%, at least about 90%, at least about 91%, at least about 92%, at least about 93%, at least about 93%, at least about 94%, at least about 95%, at least about 96%, at least about 97%, at least about 98%, at least about 99%, e.g., 100% homologous (or identical) to the amino acid sequence selected from the group consisting of SEQ ID NOs: 1992-3040.

[0485] In some embodiments, the plant root stock transgenically expresses a polynucleotide encoding a polypeptide at least about 80%, at least about 81%, at least about 82%, at least about 83%, at least about 84%, at least about 85%, at least about 86%, at least about 87%, at least about 88%, at least about 89%, at least about 90%, at least about 91%, at least about 92%, at least about 93%, at least about 93%, at least about 94%, at least about 95%, at least about 96%, at least about 97%, at least about 98%, at least about 99%, e.g., 100% homologous (or identical) to the amino acid sequence selected from the group consisting of SEQ ID NOs: 1992-3040 in a stress responsive manner.

[0486] According to some embodiments of the invention, the plant root stock transgenically expresses a polynucleotide encoding a polypeptide selected from the group consisting of SEQ ID NOs: 1992-3040 and 3041-3059.

[0487] According to some embodiments of the invention, the plant root stock transgenically expresses a polynucleotide comprising a nucleic acid sequence at least about 80%, at least about 81%, at least about 82%, at least about 83%, at least about 84%, at least about 85%, at least about 86%, at least about 87%, at least about 88%, at least about 89%, at least about 90%, at least about 91%, at least about 92%, at least about 93%, at least about 93%, at least about 94%, at least about 95%, at least about 96%, at least about 97%, at least about 98%, at least about 99%, e.g., 100% identical to the polynucleotide selected from the group consisting of SEQ ID NOs: 50-1969.

[0488] According to some embodiments of the invention, the plant root stock transgenically expresses a polynucleotide selected from the group consisting of SEQ ID NOs: 50-1069 and 1970-1991.

[0489] Since processes which increase nitrogen use efficiency, fertilizer use efficiency, oil content, yield, seed yield, fiber yield, fiber quality, fiber length, photosynthetic capacity, growth rate, root growth, biomass, vigor and/or abiotic stress tolerance of a plant can involve multiple genes acting additively or in synergy (see, for example, in Quesda et al., Plant Physiol. 130:951-063, 2002), the present invention also envisages expressing a plurality of exogenous polynucleotides in a single host plant to thereby achieve superior effect on nitrogen use efficiency, fertilizer use efficiency, oil content, yield, seed yield, fiber yield, fiber quality, fiber length, photosynthetic capacity, growth rate, root growth, biomass, vigor and/or abiotic stress tolerance.

[0490] Expressing a plurality of exogenous polynucleotides in a single host plant can be effected by co-introducing multiple nucleic acid constructs, each including a different exogenous polynucleotide, into a single plant cell. The transformed cell can then be regenerated into a mature plant using the methods described hereinabove.

[0491] Alternatively, expressing a plurality of exogenous polynucleotides in a single host plant can be effected by co-introducing into a single plant-cell a single nucleic-acid construct including a plurality of different exogenous polynucleotides. Such a construct can be designed with a single promoter sequence which can transcribe a polycistronic messenger RNA including all the different exogenous polynucleotide sequences. To enable co-translation of the different polypeptides encoded by the polycistronic messenger RNA, the polynucleotide sequences can be inter-linked via an internal ribosome entry site (IRES) sequence which facilitates translation of polynucleotide sequences positioned downstream of the IRES sequence. In this case, a transcribed polycistronic RNA molecule encoding the different polypeptides described above will be translated from both the capped 5′ end and the two internal IRES sequences of the polycistronic RNA molecule to thereby produce in the cell all different polypeptides. Alternatively, the construct can include several promoter sequences each linked to a different exogenous polynucleotide sequence.

[0492] The plant cell transformed with the construct including a plurality of different exogenous polynucleotides, can be regenerated into a mature plant, using the methods described hereinabove.

[0493] Alternatively, expressing a plurality of exogenous polynucleotides in a single host plant can be effected by introducing different nucleic acid constructs, including different exogenous polynucleotides, into a plurality of plants. The regenerated transformed plants can then be cross-bred and resultant progeny selected for superior abiotic stress tolerance, water use efficiency, fertilizer use efficiency, growth, biomass, yield and/or vigor traits, using conventional plant breeding techniques.

[0494] According to some embodiments of the invention, over-expression of the polypeptide of the invention is achieved by means of genome editing.

[0495] Genome editing is a powerful mean to impact target traits by modifications of the target plant genome sequence. Such modifications can result in new or modified alleles or regulatory elements. Thus, genome editing employs reverse genetics by artificially engineered nucleases to cut and create specific double-stranded breaks at a desired location(s) in the genome, which are then repaired by cellular endogenous processes such as, homology directed repair (HDR) and non-homologous end-joining (NHEJ). NHEJ directly joins the DNA ends in a double-stranded break, while HDR utilizes a homologous sequence as a template for regenerating the missing DNA sequence at the break point. In order to introduce specific nucleotide modifications to the genomic DNA, a DNA repair template containing the desired sequence must be present during HDR. Genome editing cannot be performed using traditional restriction endonucleases since most restriction enzymes recognize a few base pairs on the DNA as their target and the probability is very high that the recognized base pair combination will be found in many locations across the genome resulting in multiple cuts not limited to a desired location. To overcome this challenge and create site-specific single- or double-stranded breaks, several distinct classes of nucleases have been discovered and bioengineered to date. These include the meganucleases, Zinc finger nucleases (ZFNs), transcription-activator like effector nucleases (TALENs) and CRISPR/Cas system.

[0496] Since most genome-editing techniques can leave behind minimal traces of DNA alterations evident in a small number of nucleotides as compared to transgenic plants, crops created through gene editing could avoid the stringent regulation procedures commonly associated with genetically modified (GM) crop development. On the other hand, the traces of genome-edited techniques can be used for marker assisted selection (MAS) as is further described hereinunder. Target plants for the mutagenesis/genome editing methods according to the invention are any plants of interest including monocot or dicot plants.

[0497] Over expression of a polypeptide by genome editing can be achieved by: (i) replacing an endogenous sequence encoding the polypeptide of interest or a regulatory sequence under the control which it is placed, and/or (ii) inserting a new gene encoding the polypeptide of interest in a targeted region of the genome, and/or (iii) introducing point mutations which result in up-regulation of the gene encoding the polypeptide of interest (e.g., by altering the regulatory sequences such as promoter, enhancers, 5′-UTR and/or 3′-UTR, or mutations in the coding sequence).

[0498] Homology Directed Repair (HDR)

[0499] Homology Directed Repair (HDR) can be used to generate specific nucleotide changes (also known as gene “edits”) ranging from a single nucleotide change to large insertions. In order to utilize HDR for gene editing, a DNA “repair template” containing the desired sequence must be delivered into the cell type of interest with the guide RNA [gRNA(s)] and Cas9 or Cas9 nickase. The repair template must contain the desired edit as well as additional homologous sequence immediately upstream and downstream of the target (termed left and right homology arms). The length and binding position of each homology arm is dependent on the size of the change being introduced. The repair template can be a single stranded oligonucleotide, double-stranded oligonucleotide, or double-stranded DNA plasmid depending on the specific application. It is worth noting that the repair template must lack the Protospacer Adjacent Motif (PAM) sequence that is present in the genomic DNA, otherwise the repair template becomes a suitable target for Cas9 cleavage. For example, the PAM could be mutated such that it is no longer present, but the coding region of the gene is not affected (i.e. a silent mutation).

[0500] The efficiency of UDR is generally low (<10% of modified alleles) even in cells that express Cas9, gRNA and an exogenous repair template. For this reason, many laboratories are attempting to artificially enhance UDR by synchronizing the cells within the cell cycle stage when FIDR is most active, or by chemically or genetically inhibiting genes involved in Non-Homologous End Joining (NHEJ). The low efficiency of HDR has several important practical implications. First, since the efficiency of Cas9 cleavage is relatively high and the efficiency of HDR is relatively low, a portion of the Cas9-induced double strand breaks (DSBs) will be repaired via NHEJ. In other words, the resulting population of cells will contain some combination of wild-type alleles, NHEJ-repaired alleles, and/or the desired HDR-edited allele. Therefore, it is important to confirm the presence of the desired edit experimentally, and if necessary, isolate clones containing the desired edit.

[0501] The HDR method was successfully used for targeting a specific modification in a coding sequence of a gene in plants (Budhagatapalli Nagaveni et al. 2015. “Targeted Modification of Gene Function Exploiting Homology-Directed Repair of TALEN-Mediated Double-Strand Breaks in Barley”. G3 (Bethesda). 2015 September; 5(9): 1857-1863). Thus, the gfp-specific transcription activator-like effector nucleases were used along with a repair template that, via HDR, facilitates conversion of gfp into yfp, which is associated with a single amino acid exchange in the gene product. The resulting yellow-fluorescent protein accumulation along with sequencing confirmed the success of the genomic editing.

[0502] Similarly, Zhao Yongping et al. 2016 (An alternative strategy for targeted gene replacement in plants using a dual-sgRNA/Cas9 design. Scientific Reports 6, Article number: 23890 (2016)) describe co-transformation of Arabidopsis plants with a combinatory dual-sgRNA/Cas9 vector that successfully deleted miRNA gene regions (MIR169a and MIR827a) and second construct that contains sites homologous to Arabidopsis TERMINAL FLOWER 1 (TFL1) for homology-directed repair (HDR) with regions corresponding to the two sgRNAs on the modified construct to provide both targeted deletion and donor repair for targeted gene replacement by HDR.

[0503] One example of such approach includes editing a selected genomic region as to express the polypeptide of interest. In the current example, the target genomic region is the maize locus GRMZM2G069095 (based on genome version Zea mays AGPv3) and the polypeptide to be over-expressed is the maize LBY474 comprising the amino acid sequence set forth in SEQ ID NO:2066. It is to be explicitly understood that other genome loci can be used as targets for genome editing for over-expressing other polypeptides of the invention based on the same principles.

[0504] FIG. 14A depicts the sequence of the endogenous 5′ upstream flanking region of the genomic sequence GRMZM2G069095 (SEQ ID NO:42) and FIG. 14B depicts the sequence of the endogenous 3′-downstream flanking region of this genomic locus (SEQ ID NO:43). FIG. 14C depicts the sequence of the 5′-UTR gRNA (SEQ ID NO: 40) and FIG. 14D depicts the sequence of the 5′-UTR gRNA without NGG nucleotides (SEQ ID NO: 44). FIG. 14E depicts the sequence of the 3′-UTR gRNA (SEQ ID NO: 41) and FIG. 14F depicts the sequence of the 3′-UTR gRNA after cut (SEQ ID NO: 45). FIG. 14G depicts the endogenous 5′-UTR (SEQ ID NO: 48) and FIG. 14H depicts the endogenous 3′-UTR (SEQ ID NO: 49). FIG. 14I depicts the coding sequence (from the “ATG” start codon to the “TAG” termination codon, marked by bold and underlined) of the desired LBY474 sequence (SEQ ID NO: 47) encoding the polypeptide set forth by SEQ ID NO: 2066.

[0505] The complete exemplary repair template (SEQ ID NO: 46) is depicted in FIG. 14J. The repair template includes: (1) the upstream flanking region (1 kbp) sequence (SEQ ID NO:42) including part of the gRNA after cutting (SEQ ID NO: 44; shown in bold and italics); (2) 5′ UTR of genomic DNA from Cas9 cutting site to ATG (SEQ ID NO: 48; (3) the coding sequence (CDS) of the desired LBY474 sequence (SEQ ID NO:47) marked in lower case with the start (ATG) and the stop (TGA) codons marked in bold and underlined; (4) 3′ UTR of genomic DNA from the stop codon to Cas9 cutting site (SEQ ID NO: 49) including the predicted part of the gRNA after cutting (SEQ ID NO: 45, shown in bold and italics and (5) the downstream flanking region (1 kbp) sequence (SEQ ID NO:43).

[0506] The repair template is delivered into the cell type of interest along with the 5′ and 3′ guide RNA sequences (SEQ ID NO: 40 and SEQ ID NO: 41, respectively).

[0507] Activation of Target Genes Using CRISPR/Cas9

[0508] Many bacteria and archea contain endogenous RNA-based adaptive immune systems that can degrade nucleic acids of invading phages and plasmids. These systems consist of clustered regularly interspaced short palindromic repeat (CRISPR) genes that produce RNA components and CRISPR associated (Cas) genes that encode protein components. The CRISPR RNAs (crRNAs) contain short stretches of homology to specific viruses and plasmids and act as guides to direct Cas nucleases to degrade the complementary nucleic acids of the corresponding pathogen. Studies of the type II CRISPR/Cas system of Streptococcus pyogenes have shown that three components form an RNA/protein complex and together are sufficient for sequence-specific nuclease activity: the Cas9 nuclease, a crRNA containing 20 base pairs of homology to the target sequence, and a trans-activating crRNA (tracrRNA) (Jinek et al. Science (2012) 337: 816-821). It was further demonstrated that a synthetic chimeric guide RNA (gRNA) composed of a fusion between crRNA and tracrRNA could direct Cas9 to cleave DNA targets that are complementary to the crRNA in vitro. It was also demonstrated that transient expression of CRISPR-associated endonuclease (Cas9) in conjunction with synthetic gRNAs can be used to produce targeted double-stranded brakes in a variety of different species.

[0509] The CRISPR/Cas9 system is a remarkably flexible tool for genome manipulation. A unique feature of Cas9 is its ability to bind target DNA independently of its ability to cleave target DNA. Specifically, both RuvC- and HNH-nuclease domains can be rendered inactive by point mutations (D10A and H840A in SpCas9), resulting in a nuclease dead Cas9 (dCas9) molecule that cannot cleave target DNA. The dCas9 molecule retains the ability to bind to target DNA based on the gRNA targeting sequence. The dCas9 can be tagged with transcriptional activators, and targeting these dCas9 fusion proteins to the promoter region results in robust transcription activation of downstream target genes. The simplest dCas9-based activators consist of dCas9 fused directly to a single transcriptional activator. Importantly, unlike the genome modifications induced by Cas9 or Cas9 nickase, dCas9-mediated gene activation is reversible, since it does not permanently modify the genomic DNA.

[0510] Indeed, genome editing was successfully used to over-express a protein of interest in a plant by, for example, mutating a regulatory sequence, such as a promoter to overexpress the endogenous polynucleotide operably linked to the regulatory sequence. For example, U.S. Patent Application Publication No. 20160102316 to Rubio Munoz, Vicente et al. which is fully incorporated herein by reference, describes plants with increased expression of an endogenous DDA1 plant nucleic acid sequence wherein the endogenous DDA1 promoter carries a mutation introduced by mutagenesis or genome editing which results in increased expression of the DDA1 gene, using for example, CRISPR. The method involves targeting of Cas9 to the specific genomic locus, in this case DDA1, via a 20 nucleotide guide sequence of the single-guide RNA. An online CRISPR Design Tool can identify suitable target sites (tools(dot)genome-engineering(dot)org. Ran et al. Genome engineering using the CRISPR-Cas9 system nature protocols, VOL. 8 NO. 11, 2281-2308, 2013).

[0511] The CRISPR-Cas system was used for altering gene expression in plants as described in U.S. Patent Application publication No. 20150067922 to Yang; Yinong et al., which is fully incorporated herein by reference. Thus, the engineered, non-naturally occurring gene editing system comprises two regulatory elements, wherein the first regulatory element (a) operable in a plant cell operably linked to at least one nucleotide sequence encoding a CRISPR-Cas system guide RNA (gRNA) that hybridizes with the target sequence in the plant, and a second regulatory element (b) operable in a plant cell operably linked to a nucleotide sequence encoding a Type-II CRISPR-associated nuclease, wherein components (a) and (b) are located on same or different vectors of the system, whereby the guide RNA targets the target sequence and the CRISPR-associated nuclease cleaves the DNA molecule, thus altering the expression of a gene product in a plant. It should be noted that the CRISPR-associated nuclease and the guide RNA do not naturally occur together.

[0512] In addition, as described above, point mutations which activate a gene-of-interest and/or which result in over-expression of a polypeptide-of-interest can be also introduced into plants by means of genome editing. Such mutation can be for example, deletions of repressor sequences which result in activation of the gene-of-interest; and/or mutations which insert nucleotides and result in activation of regulatory sequences such as promoters and/or enhancers.

[0513] Meganucleases—Meganucleases are commonly grouped into four families: the LAGLIDADG family, the GIY-YIG family, the His-Cys box family and the HNH family. These families are characterized by structural motifs, which affect catalytic activity and recognition sequence. For instance, members of the LAGLIDADG family are characterized by having either one or two copies of the conserved LAGLIDADG motif. The four families of meganucleases are widely separated from one another with respect to conserved structural elements and, consequently, DNA recognition sequence specificity and catalytic activity. Meganucleases are found commonly in microbial species and have the unique property of having very long recognition sequences (>14bp) thus making them naturally very specific for cutting at a desired location. This can be exploited to make site-specific double-stranded breaks in genome editing. One of skill in the art can use these naturally occurring meganucleases, however the number of such naturally occurring meganucleases is limited. To overcome this challenge, mutagenesis and high throughput screening methods have been used to create meganuclease variants that recognize unique sequences. For example, various meganucleases have been fused to create hybrid enzymes that recognize a new sequence. Alternatively, DNA interacting amino acids of the meganuclease can be altered to design sequence specific meganucleases (see e.g., U.S. Pat. No. 8,021,867). Meganucleases can be designed using the methods described in e.g., Certo, M T et al. Nature Methods (2012) 9:073-975; U.S. Pat. Nos. 8,304,222; 8,021,867; 8,119,381; 8,124,369; 8,129,134; 8,133,697; 8,143,015; 8,143,016; 8,148,098; or 8,163,514, the contents of each are incorporated herein by reference in their entirety. Alternatively, meganucleases with site specific cutting characteristics can be obtained using commercially available technologies e.g., Precision Biosciences' Directed Nuclease Editor™ genome editing technology.

[0514] ZFNs and TALENs—Two distinct classes of engineered nucleases, zinc-finger nucleases (ZFNs) and transcription activator-like effector nucleases (TALENs), have both proven to be effective at producing targeted double-stranded breaks (Christian et al., 2010; Kim et al., 1996; Li et al., 2011; Mahfouz et al., 2011; Miller et al., 2010).

[0515] Basically, ZFNs and TALENs restriction endonuclease technology utilizes a non-specific DNA cutting enzyme which is linked to a specific DNA binding domain (either a series of zinc finger domains or TALE repeats, respectively). Typically a restriction enzyme whose DNA recognition site and cleaving site are separate from each other is selected. The cleaving portion is separated and then linked to a DNA binding domain, thereby yielding an endonuclease with very high specificity for a desired sequence. An exemplary restriction enzyme with such properties is Fok1. Additionally Fok1 has the advantage of requiring dimerization to have nuclease activity and this means the specificity increases dramatically as each nuclease partner recognizes a unique DNA sequence. To enhance this effect, Fok1 nucleases have been engineered that can only function as heterodimers and have increased catalytic activity. The heterodimer functioning nucleases avoid the possibility of unwanted homodimer activity and thus increase specificity of the double-stranded break.

[0516] Thus, for example to target a specific site, ZFNs and TALENs are constructed as nuclease pairs, with each member of the pair designed to bind adjacent sequences at the targeted site. Upon transient expression in cells, the nucleases bind to their target sites and the Fok1 domains heterodimerize to create a double-stranded break. Repair of these double-stranded breaks through the nonhomologous end-joining (NHEJ) pathway most often results in small deletions or small sequence insertions. Since each repair made by NHEJ is unique, the use of a single nuclease pair can produce an allelic series with a range of different deletions at the target site. The deletions typically range anywhere from a few base pairs to a few hundred base pairs in length, but larger deletions have successfully been generated in cell culture by using two pairs of nucleases simultaneously (Carlson et al., 2012; Lee et al., 2010). In addition, when a fragment of DNA with homology to the targeted region is introduced in conjunction with the nuclease pair, the double-stranded break can be repaired via homology directed repair to generate specific modifications (Li et al., 2011; Miller et al., 2010; Urnov et al., 2005).

[0517] Although the nuclease portions of both ZFNs and TALENs have similar properties, the difference between these engineered nucleases is in their DNA recognition peptide. ZFNs rely on Cys2-His2 zinc fingers and TALENs on TALEs. Both of these DNA recognizing peptide domains have the characteristic that they are naturally found in combinations in their proteins. Cys2-His2 Zinc fingers typically found in repeats that are 3 bp apart and are found in diverse combinations in a variety of nucleic acid interacting proteins. TALEs on the other hand are found in repeats with a one-to-one recognition ratio between the amino acids and the recognized nucleotide pairs. Because both zinc fingers and TALEs happen in repeated patterns, different combinations can be tried to create a wide variety of sequence specificities. Approaches for making site-specific zinc finger endonucleases include, e.g., modular assembly (where Zinc fingers correlated with a triplet sequence are attached in a row to cover the required sequence), OPEN (low-stringency selection of peptide domains vs. triplet nucleotides followed by high-stringency selections of peptide combination vs. the final target in bacterial systems), and bacterial one-hybrid screening of zinc finger libraries, among others. ZFNs can also be designed and obtained commercially from e.g., Sangamo Biosciences™ (Richmond, Calif.).

[0518] Method for designing and obtaining TALENs are described in e.g. Reyon et al. Nature Biotechnology 2012 May; 30(5):460-5; Miller et al. Nat Biotechnol. (2011) 29: 143-148; Cermak et al. Nucleic Acids Research (2011) 39 (12): e82 and Zhang et al. Nature Biotechnology (2011) 29 (2): 149-53. A recently developed web-based program named Mojo Hand was introduced by Mayo Clinic for designing TAL and TALEN constructs for genome editing applications (can be accessed through world wide web(dot)talendesign(dot)org). TALEN can also be designed and obtained commercially from e.g., Sangamo Biosciences™ (Richmond, Calif.).

[0519] The CRIPSR/Cas system for genome editing contains two distinct components: a gRNA and an endonuclease e.g. Cas9.

[0520] The gRNA is typically a 20 nucleotide sequence encoding a combination of the target homologous sequence (crRNA) and the endogenous bacterial RNA that links the crRNA to the Cas9 nuclease (tracrRNA) in a single chimeric transcript. The gRNA/Cas9 complex is recruited to the target sequence by the base-pairing between the gRNA sequence and the complement genomic DNA. For successful binding of Cas9, the genomic target sequence must also contain the correct Protospacer Adjacent Motif (PAM) sequence immediately following the target sequence. The binding of the gRNA/Cas9 complex localizes the Cas9 to the genomic target sequence so that the Cas9 can cut both strands of the DNA causing a double-strand break. Just as with ZFNs and TALENs, the double-stranded brakes produced by CRISPR/Cas can undergo homologous recombination or NHEJ.

[0521] The Cas9 nuclease has two functional domains: RuvC and HNH, each cutting a different DNA strand. When both of these domains are active, the Cas9 causes double strand breaks in the genomic DNA.

[0522] A significant advantage of CRISPR/Cas is that the high efficiency of this system coupled with the ability to easily create synthetic gRNAs enables multiple genes to be targeted simultaneously. In addition, the majority of cells carrying the mutation present biallelic mutations in the targeted genes.

[0523] However, apparent flexibility in the base-pairing interactions between the gRNA sequence and the genomic DNA target sequence allows imperfect matches to the target sequence to be cut by Cas9.

[0524] Modified versions of the Cas9 enzyme containing a single inactive catalytic domain, either RuvC- or HNH-, are called ‘nickases’. With only one active nuclease domain, the Cas9 nickase cuts only one strand of the target DNA, creating a single-strand break or ‘nick’. A single-strand break, or nick, is normally quickly repaired through the HDR pathway, using the intact complementary DNA strand as the template. However, two proximal, opposite strand nicks introduced by a Cas9 nickase are treated as a double-strand break, in what is often referred to as a ‘double nick’ CRISPR system. A double-nick can be repaired by either NHEJ or HDR depending on the desired effect on the gene target. Thus, if specificity and reduced off-target effects are crucial, using the Cas9 nickase to create a double-nick by designing two gRNAs with target sequences in close proximity and on opposite strands of the genomic DNA would decrease off-target effect as either gRNA alone will result in nicks that will not change the genomic DNA.

[0525] Modified versions of the Cas9 enzyme containing two inactive catalytic domains (dead Cas9, or dCas9) have no nuclease activity while still able to bind to DNA based on gRNA specificity. The dCas9 can be utilized as a platform for DNA transcriptional regulators to activate or repress gene expression by fusing the inactive enzyme to known regulatory domains. For example, the binding of dCas9 alone to a target sequence in genomic DNA can interfere with gene transcription.

[0526] There are a number of publically available tools available to help choose and/or design target sequences as well as lists of bioinformatically determined unique gRNAs for different genes in different species such as the Feng Zhang lab's Target Finder, the Michael Boutros lab's Target Finder (E-CRISP), the RGEN Tools: Cas-OFFinder, the CasFinder: Flexible algorithm for identifying specific Cas9 targets in genomes and the CRISPR Optimal Target Finder.

[0527] In order to use the CRISPR system, both gRNA and Cas9 should be expressed in a target cell. The insertion vector can contain both cassettes on a single plasmid or the cassettes are expressed from two separate plasmids. CRISPR plasmids are commercially available such as the px330 plasmid from Addgene.

[0528] “Hit and run” or “in-out”—involves a two-step recombination procedure. In the first step, an insertion-type vector containing a dual positive/negative selectable marker cassette is used to introduce the desired sequence alteration. The insertion vector contains a single continuous region of homology to the targeted locus and is modified to carry the mutation of interest. This targeting construct is linearized with a restriction enzyme at a one site within the region of homology, electroporated into the cells, and positive selection is performed to isolate homologous recombinants. These homologous recombinants contain a local duplication that is separated by intervening vector sequence, including the selection cassette. In the second step, targeted clones are subjected to negative selection to identify cells that have lost the selection cassette via intrachromosomal recombination between the duplicated sequences. The local recombination event removes the duplication and, depending on the site of recombination, the allele either retains the introduced mutation or reverts to wild type. The end result is the introduction of the desired modification without the retention of any exogenous sequences.

[0529] The “double-replacement” or “tag and exchange” strategy—involves a two-step selection procedure similar to the hit and run approach, but requires the use of two different targeting constructs. In the first step, a standard targeting vector with 3′ and 5′ homology arms is used to insert a dual positive/negative selectable cassette near the location where the mutation is to be introduced. After electroporation and positive selection, homologously targeted clones are identified. Next, a second targeting vector that contains a region of homology with the desired mutation is electroporated into targeted clones, and negative selection is applied to remove the selection cassette and introduce the mutation. The final allele contains the desired mutation while eliminating unwanted exogenous sequences.

[0530] Site-Specific Recombinases—The Cre recombinase derived from the P1 bacteriophage and Flp recombinase derived from the yeast Saccharomyces cerevisiae are site-specific DNA recombinases each recognizing a unique 34 base pair DNA sequence (termed “Lox” and “FRT”, respectively) and sequences that are flanked with either Lox sites or FRT sites can be readily removed via site-specific recombination upon expression of Cre or Flp recombinase, respectively. For example, the Lox sequence is composed of an asymmetric eight base pair spacer region flanked by 13 base pair inverted repeats. Cre recombines the 34 base pair lox DNA sequence by binding to the 13 base pair inverted repeats and catalyzing strand cleavage and religation within the spacer region. The staggered DNA cuts made by Cre in the spacer region are separated by 6 base pairs to give an overlap region that acts as a homology sensor to ensure that only recombination sites having the same overlap region recombine.

[0531] Basically, the site specific recombinase system offers means for the removal of selection cassettes after homologous recombination. This system also allows for the generation of conditional altered alleles that can be inactivated or activated in a temporal or tissue-specific manner. Of note, the Cre and Flp recombinases leave behind a Lox or FRT “scar” of 34 base pairs. The Lox or FRT sites that remain are typically left behind in an intron or 3′ UTR of the modified locus, and current evidence suggests that these sites usually do not interfere significantly with gene function.

[0532] Thus, Cre/Lox and Flp/FRT recombination involves introduction of a targeting vector with 3′ and 5′ homology arms containing the mutation of interest, two Lox or FRT sequences and typically a selectable cassette placed between the two Lox or FRT sequences. Positive selection is applied and homologous recombinants that contain targeted mutation are identified. Transient expression of Cre or Flp in conjunction with negative selection results in the excision of the selection cassette and selects for cells where the cassette has been lost. The final targeted allele contains the Lox or FRT scar of exogenous sequences.

[0533] Transposases—As used herein, the term “transposase” refers to an enzyme that binds to the ends of a transposon and catalyzes the movement of the transposon to another part of the genome.

[0534] As used herein the term “transposon” refers to a mobile genetic element comprising a nucleotide sequence which can move around to different positions within the genome of a single cell. In the process the transposon can cause mutations and/or change the amount of a DNA in the genome of the cell.

[0535] A number of transposon systems that are able to also transpose in cells e.g. vertebrates have been isolated or designed, such as Sleeping Beauty [Izsvák and Ivics Molecular Therapy (2004) 9, 147-156], piggyBac [Wilson et al. Molecular Therapy (2007) 15, 139-145], Tol2 [Kawakami et al. PNAS (2000) 97 (21): 11403-11408] or Frog Prince [Miskey et al. Nucleic Acids Res. December 1, (2003) 31(23): 6873-6881]. Generally, DNA transposons translocate from one DNA site to another in a simple, cut-and-paste manner. Each of these elements has their own advantages, for example, Sleeping Beauty is particularly useful in region-specific mutagenesis, whereas Tol2 has the highest tendency to integrate into expressed genes. Hyperactive systems are available for Sleeping Beauty and piggyBac. Most importantly, these transposons have distinct target site preferences, and can therefore introduce sequence alterations in overlapping, but distinct sets of genes. Therefore, to achieve the best possible coverage of genes, the use of more than one element is particularly preferred. The basic mechanism is shared between the different transposases, therefore we will describe piggyBac (PB) as an example.

[0536] PB is a 2.5 kb insect transposon originally isolated from the cabbage looper moth, Trichoplusia ni. The PB transposon consists of asymmetric terminal repeat sequences that flank a transposase, PBase. PBase recognizes the terminal repeats and induces transposition via a “cut-and-paste” based mechanism, and preferentially transposes into the host genome at the tetranucleotide sequence TTAA. Upon insertion, the TTAA target site is duplicated such that the PB transposon is flanked by this tetranucleotide sequence. When mobilized, PB typically excises itself precisely to reestablish a single TTAA site, thereby restoring the host sequence to its pretransposon state. After excision, PB can transpose into a new location or be permanently lost from the genome.

[0537] Typically, the transposase system offers an alternative means for the removal of selection cassettes after homologous recombination quit similar to the use Cre/Lox or Flp/FRT. Thus, for example, the PB transposase system involves introduction of a targeting vector with 3′ and 5′ homology arms containing the mutation of interest, two PB terminal repeat sequences at the site of an endogenous TTAA sequence and a selection cassette placed between PB terminal repeat sequences. Positive selection is applied and homologous recombinants that contain targeted mutation are identified. Transient expression of PBase removes in conjunction with negative selection results in the excision of the selection cassette and selects for cells where the cassette has been lost. The final targeted allele contains the introduced mutation with no exogenous sequences.

[0538] For PB to be useful for the introduction of sequence alterations, there must be a native TTAA site in relatively close proximity to the location where a particular mutation is to be inserted. Genome editing using recombinant adeno-associated virus (rAA V) platform—this genome-editing platform is based on rAAV vectors which enable insertion, deletion or substitution of DNA sequences in the genomes of live mammalian cells. The rAAV genome is a single-stranded deoxyribonucleic acid (ssDNA) molecule, either positive- or negative-sensed, which is about 4.7 kb long. These single-stranded DNA viral vectors have high transduction rates and have a unique property of stimulating endogenous homologous recombination in the absence of double-strand DNA breaks in the genome. One of skill in the art can design a rAAV vector to target a desired genomic locus and perform both gross and/or subtle endogenous gene alterations in a cell. rAAV genome editing has the advantage in that it targets a single allele and does not result in any off-target genomic alterations. rAAV genome editing technology is commercially available, for example, the rAAV GENESIS™ system from Horizon™ (Cambridge, UK).

[0539] Methods for qualifying efficacy and detecting sequence alteration are well known in the art and include, but not limited to, DNA sequencing, electrophoresis, an enzyme-based mismatch detection assay and a hybridization assay such as PCR, RT-PCR, RNase protection, in-situ hybridization, primer extension, Southern blot, Northern Blot and dot blot analysis.

[0540] Sequence alterations in a specific gene can also be determined at the protein level using e.g. chromatography, electrophoretic methods, immunodetection assays such as ELISA and Western blot analysis and immunohistochemistry.

[0541] In addition, one ordinarily skilled in the art can readily design a knock-in/knock-out construct including positive and/or negative selection markers for efficiently selecting transformed cells that underwent a homologous recombination event with the construct. Positive selection provides a means to enrich the population of clones that have taken up foreign DNA. Non-limiting examples of such positive markers include glutamine synthetase, dihydrofolate reductase (DHFR), markers that confer antibiotic resistance, such as neomycin, hygromycin, puromycin, and blasticidin S resistance cassettes. Negative selection markers are necessary to select against random integrations and/or elimination of a marker sequence (e.g. positive marker). Non-limiting examples of such negative markers include the herpes simplex-thymidine kinase (HSV-TK) which converts ganciclovir (GCV) into a cytotoxic nucleoside analog, hypoxanthine phosphoribosyltransferase (HPRT) and adenine phosphoribosytransferase (ARPT).

[0542] According to some embodiments of the invention, the method further comprising growing the plant over-expressing the polypeptide under the abiotic stress.

[0543] Non-limiting examples of abiotic stress conditions include, salinity, osmotic stress, drought, water deprivation, excess of water (e.g., flood, waterlogging), etiolation, low temperature (e.g., cold stress), high temperature, heavy metal toxicity, anaerobiosis, nutrient deficiency (e.g., nitrogen deficiency or nitrogen limitation), nutrient excess, atmospheric pollution and UV irradiation.

[0544] According to some embodiments of the invention, the method further comprising growing the plant over-expressing the polypeptide under fertilizer limiting conditions (e.g., nitrogen-limiting conditions). Non-limiting examples include growing the plant on soils with low nitrogen content (40-50% Nitrogen of the content present under normal or optimal conditions), or even under sever nitrogen deficiency (0-10% Nitrogen of the content present under normal or optimal conditions), wherein the normal or optimal conditions include about 6-15 mM Nitrogen, e.g., 6-10 mM Nitrogen.

[0545] Thus, the invention encompasses plants exogenously expressing the polynucleotide(s), the nucleic acid constructs and/or polypeptide(s) of the invention.

[0546] Once expressed within the plant cell or the entire plant, the level of the polypeptide can be determined by methods well known in the art such as, activity assays, Western blots using antibodies capable of specifically binding the polypeptide, Enzyme-Linked Immuno Sorbent Assay (ELISA), radio-immuno-as says (RIA), immunohistochemistry, immunocytochemistry, immunofluorescence and the like.

[0547] Methods of determining the level in the plant of the RNA transcribed from the exogenous polynucleotide are well known in the art and include, for example, Northern blot analysis, reverse transcription polymerase chain reaction (RT-PCR) analysis (including quantitative, semi-quantitative or real-time RT-PCR) and RNA-in situ hybridization.

[0548] The sequence information and annotations uncovered by the present teachings can be harnessed in favor of classical breeding. Thus, sub-sequence data of those polynucleotides described above, can be used as markers for marker assisted selection (MAS), in which a marker is used for indirect selection of a genetic determinant or determinants of a trait of interest (e.g., biomass, growth rate, oil content, yield, abiotic stress tolerance, water use efficiency, nitrogen use efficiency and/or fertilizer use efficiency). Nucleic acid data of the present teachings (DNA or RNA sequence) may contain or be linked to polymorphic sites or genetic markers on the genome such as restriction fragment length polymorphism (RFLP), microsatellites and single nucleotide polymorphism (SNP), DNA fingerprinting (DFP), amplified fragment length polymorphism (AFLP), expression level polymorphism, polymorphism of the encoded polypeptide and any other polymorphism at the DNA or RNA sequence.

[0549] Examples of marker assisted selections include, but are not limited to, selection for a morphological trait (e.g., a gene that affects form, coloration, male sterility or resistance such as the presence or absence of awn, leaf sheath coloration, height, grain color, aroma of rice); selection for a biochemical trait (e.g., a gene that encodes a protein that can be extracted and observed; for example, isozymes and storage proteins); selection for a biological trait (e.g., pathogen races or insect biotypes based on host pathogen or host parasite interaction can be used as a marker since the genetic constitution of an organism can affect its susceptibility to pathogens or parasites).

[0550] The polynucleotides and polypeptides described hereinabove can be used in a wide range of economical plants, in a safe and cost effective manner.

[0551] Plant lines exogenously expressing the polynucleotide or the polypeptide of the invention are screened to identify those that show the greatest increase of the desired plant trait.

[0552] Thus, according to an additional embodiment of the present invention, there is provided a method of evaluating a trait of a plant, the method comprising: (a) expressing in a plant or a portion thereof the nucleic acid construct of some embodiments of the invention; and (b) evaluating a trait of a plant as compared to a wild type plant of the same type (e.g., a plant not transformed with the claimed biomolecules), thereby evaluating the trait of the plant.

[0553] According to an aspect of some embodiments of the invention there is provided a method of producing a crop comprising growing a crop of a plant expressing an exogenous polynucleotide comprising a nucleic acid sequence encoding a polypeptide at least about 80%, at least about 81%, at least about 82%, at least about 83%, at least about 84%, at least about 85%, at least about 86%, at least about 87%, at least about 88%, at least about 89%, at least about 90%, at least about 91%, at least about 92%, at least about 93%, at least about 94%, at least about 95%, at least about 96%, at least about 97%, at least about 98%, at least about 99%, or more say 100% homologous (e.g., identical) to the amino acid sequence selected from the group consisting of SEQ ID NOs: 1992-3040, wherein the plant is derived from a plant (parent plant) that has been transformed to express the exogenous polynucleotide and that has been selected for increased abiotic stress tolerance, increased water use efficiency, increased growth rate, increased vigor, increased biomass, increased oil content, increased yield, increased seed yield, increased fiber yield, increased fiber quality, increased fiber length, increased photosynthetic capacity, and/or increased fertilizer use efficiency (e.g., increased nitrogen use efficiency) as compared to a control plant, thereby producing the crop.

[0554] According to an aspect of some embodiments of the present invention there is provided a method of producing a crop comprising growing a crop plant transformed with an exogenous polynucleotide encoding a polypeptide at least 80%, at least about 81%, at least about 82%, at least about 83%, at least about 84%, at least about 85%, at least about 86%, at least about 87%, at least about 88%, at least about 89%, at least about 90%, at least about 91%, at least about 92%, at least about 93%, at least about 94%, at least about 95%, at least about 96%, at least about 97%, at least about 98%, at least about 99%, or more say 100% homologous (e.g., identical) to the amino acid sequence selected from the group consisting of SEQ ID NOs: 1992-3040 and 3041-3059, wherein the crop plant is derived from plants which have been transformed with the exogenous polynucleotide and which have been selected for increased abiotic stress tolerance, increased water use efficiency, increased growth rate, increased vigor, increased biomass, increased oil content, increased yield, increased seed yield, increased fiber yield, increased fiber quality, increased fiber length, increased photosynthetic capacity, and/or increased fertilizer use efficiency (e.g., increased nitrogen use efficiency) as compared to a wild type plant of the same species which is grown under the same growth conditions, and the crop plant having the increased abiotic stress tolerance, increased water use efficiency, increased growth rate, increased vigor, increased biomass, increased oil content, increased yield, increased seed yield, increased fiber yield, increased fiber quality, increased fiber length, increased photosynthetic capacity, and/or increased fertilizer use efficiency (e.g., increased nitrogen use efficiency), thereby producing the crop.

[0555] According to some embodiments of the invention the polypeptide is selected from the group consisting of SEQ ID NOs: 1992-3040 and 3041-3059.

[0556] According to an aspect of some embodiments of the invention there is provided a method of producing a crop comprising growing a crop of a plant expressing an exogenous polynucleotide which comprises a nucleic acid sequence which is at least about 80%, at least about 81%, at least about 82%, at least about 83%, at least about 84%, at least about 85%, at least about 86%, at least about 87%, at least about 88%, at least about 89%, at least about 90%, at least about 91%, at least about 92%, at least about 93%, at least about 93%, at least about 94%, at least about 95%, at least about 96%, at least about 97%, at least about 98%, at least about 99%, e.g., 100% identical to the nucleic acid sequence selected from the group consisting of SEQ ID NOs: 50-1969, wherein the plant is derived from a plant selected for increased abiotic stress tolerance, increased water use efficiency, increased growth rate, increased vigor, increased biomass, increased oil content, increased yield, increased seed yield, increased fiber yield, increased fiber quality, increased fiber length, increased photosynthetic capacity, and/or increased fertilizer use efficiency (e.g., increased nitrogen use efficiency) as compared to a control plant, thereby producing the crop.

[0557] According to an aspect of some embodiments of the present invention there is provided a method of producing a crop comprising growing a crop plant transformed with an exogenous polynucleotide at least 80%, at least about 81%, at least about 82%, at least about 83%, at least about 84%, at least about 85%, at least about 86%, at least about 87%, at least about 88%, at least about 89%, at least about 90%, at least about 91%, at least about 92%, at least about 93%, at least about 94%, at least about 95%, at least about 96%, at least about 97%, at least about 98%, at least about 99%, or more say 100% identical to the nucleic acid sequence selected from the group consisting of SEQ ID NOs: 50-1969, wherein the crop plant is derived from plants which have been transformed with the exogenous polynucleotide and which have been selected for increased abiotic stress tolerance, increased water use efficiency, increased growth rate, increased vigor, increased biomass, increased oil content, increased yield, increased seed yield, increased fiber yield, increased fiber quality, increased fiber length, increased photosynthetic capacity, and/or increased fertilizer use efficiency (e.g., increased nitrogen use efficiency) as compared to a wild type plant of the same species which is grown under the same growth conditions, and the crop plant having the increased abiotic stress tolerance, increased water use efficiency, increased growth rate, increased vigor, increased biomass, increased oil content, increased yield, increased seed yield, increased fiber yield, increased fiber quality, increased fiber length, increased photosynthetic capacity, and/or increased fertilizer use efficiency (e.g., increased nitrogen use efficiency), thereby producing the crop.

[0558] According to some embodiments of the invention the exogenous polynucleotide is selected from the group consisting of SEQ ID NOs: 50-1069 and 1970-1991.

[0559] According to an aspect of some embodiments of the invention there is provided a method of growing a crop comprising seeding seeds and/or planting plantlets of a plant over-expressing the isolated polypeptide of the invention, wherein the plant is derived from parent plants which have been subjected to genome editing for over-expressing the polypeptide and/or which were transformed with an exogenous polynucleotide encoding the polypeptide, the parent plants have been selected for at least one trait selected from the group consisting of increased abiotic stress tolerance, increased water use efficiency, increased growth rate, increased vigor, increased biomass, increased oil content, increased yield, increased seed yield, increased fiber yield, increased fiber quality, increased fiber length, increased photosynthetic capacity, and/or increased fertilizer use efficiency (e.g., increased nitrogen use efficiency) as compared to a control plant, thereby growing the crop.

[0560] According to some embodiments of the invention, the plant (e.g., which is grown from the seeds or plantlets of some embodiments of the invention) has identical traits and characteristics as of the parent plant.

[0561] According to some embodiments of the invention the method of growing a crop comprising seeding seeds and/or planting plantlets of a plant over-expressing a polypeptide which comprises an amino acid sequence at least about 80%, at least about 81%, at least about 82%, at least about 83%, at least about 84%, at least about 85%, at least about 86%, at least about 87%, at least about 88%, at least about 89%, at least about 90%, at least about 91%, at least about 92%, at least about 93%, at least about 93%, at least about 94%, at least about 95%, at least about 96%, at least about 97%, at least about 98%, at least about 99%, e.g., 100% identical to SEQ ID NO: 1992-3040y, wherein the plant is derived from parent plants which have been subjected to genome editing for over-expressing the polypeptide and/or which have been transformed with an exogenous polynucleotide encoding the polypeptide and which have been selected for at least one trait selected from the group consisting of increased abiotic stress tolerance, increased water use efficiency, increased growth rate, increased vigor, increased biomass, increased oil content, increased yield, increased seed yield, increased fiber yield, increased fiber quality, increased fiber length, increased photosynthetic capacity, and/or increased fertilizer use efficiency (e.g., increased nitrogen use efficiency) as compared to a control plant, thereby growing the crop.

[0562] According to some embodiments of the invention the polypeptide is selected from the group consisting of SEQ ID NOs: 1992-3040 and 3041-3059.

[0563] According to some embodiments of the invention the method of growing a crop comprising seeding seeds and/or planting plantlets of a plant transformed with an exogenous polynucleotide comprising the nucleic acid sequence at least about 80%, at least about 81%, at least about 82%, at least about 83%, at least about 84%, at least about 85%, at least about 86%, at least about 87%, at least about 88%, at least about 89%, at least about 90%, at least about 91%, at least about 92%, at least about 93%, at least about 93%, at least about 94%, at least about 95%, at least about 96%, at least about 97%, at least about 98%, at least about 99%, e.g., 100% identical to SEQ ID NO: 50-1968 or 1969, wherein the plant is derived from plants which have been transformed with the exogenous polynucleotide and which have been selected for at least one trait selected from the group consisting of increased abiotic stress tolerance, increased water use efficiency, increased growth rate, increased vigor, increased biomass, increased oil content, increased yield, increased seed yield, increased fiber yield, increased fiber quality, increased fiber length, increased photosynthetic capacity, and/or increased fertilizer use efficiency (e.g., increased nitrogen use efficiency) as compared to a non-transformed plant, thereby growing the crop.

[0564] According to some embodiments of the invention the exogenous polynucleotide is selected from the group consisting of SEQ ID NOs: 50-1069 and 1970-1991.

[0565] According to an aspect of some embodiments of the present invention there is provided a method of growing a crop comprising:

[0566] (a) selecting a parent plant transformed with an exogenous polynucleotide comprising a nucleic acid sequence encoding a polypeptide at least about 80%, at least about 81%, at least about 82%, at least about 83%, at least about 84%, at least about 85%, at least about 86%, at least about 87%, at least about 88%, at least about 89%, at least about 90%, at least about 91%, at least about 92%, at least about 93%, at least about 93%, at least about 94%, at least about 95%, at least about 96%, at least about 97%, at least about 98%, at least about 99%, e.g., 100% identical to the polypeptide selected from the group consisting of SEQ ID NOs: 1992-3040 for at least one trait selected from the group consisting of: increased yield, increased growth rate, increased biomass, increased vigor, increased oil content, increased seed yield, increased fiber yield, increased fiber quality, increased fiber length, increased photosynthetic capacity, increased nitrogen use efficiency, and increased abiotic stress tolerance as compared to a non-transformed plant of the same species which is grown under the same growth conditions, and

[0567] (b) growing a progeny crop plant of the parent plant, wherein the progeny crop plant which comprises the exogenous polynucleotide has the increased yield, the increased growth rate, the increased biomass, the increased vigor, the increased oil content, the increased seed yield, the increased fiber yield, the increased fiber quality, the increased fiber length, the increased photosynthetic capacity, the increased nitrogen use efficiency, and/or the increased abiotic stress,

[0568] thereby growing the crop.

[0569] According to an aspect of some embodiments of the present invention there is provided a method of producing seeds of a crop comprising:

[0570] (a) selecting a parent plant which has been subjected to genome editing for over-expressing a polypeptide comprising an amino acid sequence at least about 80%, at least about 81%, at least about 82%, at least about 83%, at least about 84%, at least about 85%, at least about 86%, at least about 87%, at least about 88%, at least about 89%, at least about 90%, at least about 91%, at least about 92%, at least about 93%, at least about 93%, at least about 94%, at least about 95%, at least about 96%, at least about 97%, at least about 98%, at least about 99%, e.g., 100% identical to the polypeptide selected from the group consisting of SEQ ID NOs: 1992-3040 and/or which has been transformed with an exogenous polynucleotide encoding the polypeptide for at least one trait selected from the group consisting of: increased yield, increased growth rate, increased biomass, increased vigor, increased oil content, increased seed yield, increased fiber yield, increased fiber quality, increased fiber length, increased photosynthetic capacity, increased nitrogen use efficiency, and increased abiotic stress as compared to a control plant of the same species which is grown under the same growth conditions,

[0571] (b) growing a seed producing plant from the parent plant resultant of step (a), wherein the seed producing plant which over-expresses the polypeptide having the increased yield, the increased growth rate, the increased biomass, the increased vigor, the increased oil content, the increased seed yield, the increased fiber yield, the increased fiber quality, the increased fiber length, the increased photosynthetic capacity, the increased nitrogen use efficiency, and/or the increased abiotic stress, and

[0572] (c) producing seeds from the seed producing plant resultant of step (b),

[0573] thereby producing seeds of the crop.

[0574] According to some embodiments of the invention, the seeds produced from the seed producing plant comprise the exogenous polynucleotide.

[0575] According to an aspect of some embodiments of the present invention there is provided a method of growing a crop comprising:

[0576] (a) selecting a parent plant which has been subjected to genome editing for over-expressing a polypeptide selected from the group consisting of SEQ ID NOs: 1992-3040, and/or which has been transformed with an exogenous polynucleotide encoding the polypeptide for at least one trait selected from the group consisting of: increased yield, increased growth rate, increased biomass, increased vigor, increased oil content, increased seed yield, increased fiber yield, increased fiber quality, increased fiber length, increased photosynthetic capacity, increased nitrogen use efficiency, and increased abiotic stress tolerance as compared to a non-transformed plant of the same species which is grown under the same growth conditions, and

[0577] (b) growing progeny crop plant of the parent plant, wherein the progeny crop plant which over-expresses the polypeptide has the increased yield, the increased growth rate, the increased biomass, the increased vigor, the increased oil content, the increased seed yield, the increased fiber yield, the increased fiber quality, the increased fiber length, the increased photosynthetic capacity, the increased nitrogen use efficiency, and/or the increased abiotic stress,

[0578] thereby growing the crop.

[0579] According to an aspect of some embodiments of the present invention there is provided a method of producing seeds of a crop comprising:

[0580] (a) selecting a parent plant which has been subjected to genome editing for over-expressing a polypeptide selected from the group consisting of SEQ ID NOs: 1992-3040 and/or which has been transformed with an exogenous polynucleotide encoding the polypeptide for at least one trait selected from the group consisting of: increased yield, increased growth rate, increased biomass, increased vigor, increased oil content, increased seed yield, increased fiber yield, increased fiber quality, increased fiber length, increased photosynthetic capacity, increased nitrogen use efficiency, and increased abiotic stress as compared to a non-transformed plant of the same species which is grown under the same growth conditions,

[0581] (b) growing a seed producing plant from the parent plant resultant of step (a), wherein the seed producing plant which over-expresses the polypeptide has the increased yield, the increased growth rate, the increased biomass, the increased vigor, the increased oil content, the increased seed yield, the increased fiber yield, the increased fiber quality, the increased fiber length, the increased photosynthetic capacity, the increased nitrogen use efficiency, and/or the increased abiotic stress, and

[0582] (c) producing seeds from the seed producing plant resultant of step (b),

[0583] thereby producing seeds of the crop.

[0584] According to some embodiments of the invention the exogenous polynucleotide is selected from the group consisting of SEQ ID NOs: 50-1969.

[0585] The effect of the transgene (the exogenous polynucleotide encoding the polypeptide) on abiotic stress tolerance can be determined using known methods such as detailed below and in the Examples section which follows.

[0586] Abiotic stress tolerance—Transformed (i.e., expressing the transgene) and non-transformed (wild type) plants are exposed to an abiotic stress condition, such as water deprivation, suboptimal temperature (low temperature, high temperature), nutrient deficiency, nutrient excess, a salt stress condition, osmotic stress, heavy metal toxicity, anaerobiosis, atmospheric pollution and UV irradiation.

[0587] Salinity tolerance assay—Transgenic plants with tolerance to high salt concentrations are expected to exhibit better germination, seedling vigor or growth in high salt. Salt stress can be effected in many ways such as, for example, by irrigating the plants with a hyperosmotic solution, by cultivating the plants hydroponically in a hyperosmotic growth solution (e.g., Hoagland solution), or by culturing the plants in a hyperosmotic growth medium [e.g., 50% Murashige-Skoog medium (MS medium)]. Since different plants vary considerably in their tolerance to salinity, the salt concentration in the irrigation water, growth solution, or growth medium can be adjusted according to the specific characteristics of the specific plant cultivar or variety, so as to inflict a mild or moderate effect on the physiology and/or morphology of the plants (for guidelines as to appropriate concentration see, Bernstein and Kafkafi, Root Growth Under Salinity Stress In: Plant Roots, The Hidden Half 3rd ed. Waisel Y, Eshel A and Kafkafi U. (editors) Marcel Dekker Inc., New York, 2002, and reference therein).

[0588] For example, a salinity tolerance test can be performed by irrigating plants at different developmental stages with increasing concentrations of sodium chloride (for example 50 mM, 100 mM, 200 mM, 400 mM NaCl) applied from the bottom and from above to ensure even dispersal of salt. Following exposure to the stress condition the plants are frequently monitored until substantial physiological and/or morphological effects appear in wild type plants. Thus, the external phenotypic appearance, degree of wilting and overall success to reach maturity and yield progeny are compared between control and transgenic plants.

[0589] Quantitative parameters of tolerance measured include, but are not limited to, the average wet and dry weight, growth rate, leaf size, leaf coverage (overall leaf area), the weight of the seeds yielded, the average seed size and the number of seeds produced per plant. Transformed plants not exhibiting substantial physiological and/or morphological effects, or exhibiting higher biomass than wild-type plants, are identified as abiotic stress tolerant plants.

[0590] Osmotic tolerance test—Osmotic stress assays (including sodium chloride and mannitol assays) are conducted to determine if an osmotic stress phenotype was sodium chloride-specific or if it was a general osmotic stress related phenotype. Plants which are tolerant to osmotic stress may have more tolerance to drought and/or freezing. For salt and osmotic stress germination experiments, the medium is supplemented for example with 50 mM, 100 mM, 200 mM NaCl or 100 mM, 200 mM NaCl, 400 mM mannitol.

[0591] Drought tolerance assay/Osmoticum assay—Tolerance to drought is performed to identify the genes conferring better plant survival after acute water deprivation. To analyze whether the transgenic plants are more tolerant to drought, an osmotic stress produced by the non-ionic osmolyte sorbitol in the medium can be performed. Control and transgenic plants are germinated and grown in plant-agar plates for 4 days, after which they are transferred to plates containing 500 mM sorbitol. The treatment causes growth retardation, then both control and transgenic plants are compared, by measuring plant weight (wet and dry), yield, and by growth rates measured as time to flowering.

[0592] Conversely, soil-based drought screens are performed with plants overexpressing the polynucleotides detailed above. Seeds from control Arabidopsis plants, or other transgenic plants overexpressing the polypeptide of the invention are germinated and transferred to pots. Drought stress is obtained after irrigation is ceased accompanied by placing the pots on absorbent paper to enhance the soil-drying rate. Transgenic and control plants are compared to each other when the majority of the control plants develop severe wilting. Plants are re-watered after obtaining a significant fraction of the control plants displaying a severe wilting. Plants are ranked comparing to controls for each of two criteria: tolerance to the drought conditions and recovery (survival) following re-watering.

[0593] Cold stress tolerance—To analyze cold stress, mature (25 day old) plants are transferred to 4° C. chambers for 1 or 2 weeks, with constitutive light. Later on plants are moved back to greenhouse. Two weeks later damages from chilling period, resulting in growth retardation and other phenotypes, are compared between both control and transgenic plants, by measuring plant weight (wet and dry), and by comparing growth rates measured as time to flowering, plant size, yield, and the like.

[0594] Heat stress tolerance—Heat stress tolerance is achieved by exposing the plants to temperatures above 34° C. for a certain period. Plant tolerance is examined after transferring the plants back to 22° C. for recovery and evaluation after 5 days relative to internal controls (non-transgenic plants) or plants not exposed to neither cold or heat stress.

[0595] Water use efficiency—can be determined as the biomass produced per unit transpiration. To analyze WUE, leaf relative water content can be measured in control and transgenic plants. Fresh weight (FW) is immediately recorded; then leaves are soaked for 8 hours in distilled water at room temperature in the dark, and the turgid weight (TW) is recorded. Total dry weight (DW) is recorded after drying the leaves at 60° C. to a constant weight. Relative water content (RWC) is calculated according to the following Formula 1:

RWC=[(FW−DW)/(TW−DW)]×100 Formula 1

[0596] Fertilizer use efficiency—To analyze whether the transgenic plants are more responsive to fertilizers, plants are grown in agar plates or pots with a limited amount of fertilizer, as described, for example, in Examples 34-36, hereinbelow and in Yanagisawa et al (Proc Natl Acad Sci USA. 2004; 101:7833-8). The plants are analyzed for their overall size, time to flowering, yield, protein content of shoot and/or grain. The parameters checked are the overall size of the mature plant, its wet and dry weight, the weight of the seeds yielded, the average seed size and the number of seeds produced per plant. Other parameters that may be tested are: the chlorophyll content of leaves (as nitrogen plant status and the degree of leaf verdure is highly correlated), amino acid and the total protein content of the seeds or other plant parts such as leaves or shoots, oil content, etc. Similarly, instead of providing nitrogen at limiting amounts, phosphate or potassium can be added at increasing concentrations. Again, the same parameters measured are the same as listed above. In this way, nitrogen use efficiency (NUE), phosphate use efficiency (PUE) and potassium use efficiency (KUE) are assessed, checking the ability of the transgenic plants to thrive under nutrient restraining conditions.

[0597] Nitrogen use efficiency—To analyze whether the transgenic plants (e.g., Arabidopsis plants) are more responsive to nitrogen, plant are grown in 0.75-3 mM (nitrogen deficient conditions) or 6-10 mM (optimal nitrogen concentration). Plants are allowed to grow for additional 25 days or until seed production. The plants are then analyzed for their overall size, time to flowering, yield, protein content of shoot and/or grain/ seed production. The parameters checked can be the overall size of the plant, wet and dry weight, the weight of the seeds yielded, the average seed size and the number of seeds produced per plant. Other parameters that may be tested are: the chlorophyll content of leaves (as nitrogen plant status and the degree of leaf greenness is highly correlated), amino acid and the total protein content of the seeds or other plant parts such as leaves or shoots and oil content. Transformed plants not exhibiting substantial physiological and/or morphological effects, or exhibiting higher measured parameters levels than wild-type plants, are identified as nitrogen use efficient plants.

[0598] Nitrogen Use efficiency assay using plantlets—The assay is done according to Yanagisawa-S. et al. with minor modifications (“Metabolic engineering with Dof1 transcription factor in plants: Improved nitrogen assimilation and growth under low-nitrogen conditions” Proc. Natl. Acad. Sci. USA 101, 7833-7838). Briefly, transgenic plants which are grown for 7-10 days in 0.5× MS [Murashige-Skoog] supplemented with a selection agent are transferred to two nitrogen-limiting conditions: MS media in which the combined nitrogen concentration (NH₄NO₃ and KNO₃) was 0.75 mM (nitrogen deficient conditions) or 6-15 mM (optimal nitrogen concentration). Plants are allowed to grow for additional 30-40 days and then photographed, individually removed from the Agar (the shoot without the roots) and immediately weighed (fresh weight) for later statistical analysis. Constructs for which only T1 seeds are available are sown on selective media and at least 20 seedlings (each one representing an independent transformation event) are carefully transferred to the nitrogen-limiting media. For constructs for which T2 seeds are available, different transformation events are analyzed. Usually, 20 randomly selected plants from each event are transferred to the nitrogen-limiting media allowed to grow for 3-4 additional weeks and individually weighed at the end of that period. Transgenic plants are compared to control plants grown in parallel under the same conditions. Mock-transgenic plants expressing the uidA reporter gene (GUS) under the same promoter or transgenic plants carrying the same promoter but lacking a reporter gene are used as control.

[0599] Nitrogen determination—The procedure for N (nitrogen) concentration determination in the structural parts of the plants involves the potassium persulfate digestion method to convert organic N to NO₃⁻ (Purcell and King 1996 Argon. J. 88:111-113, the modified Cd⁻ mediated reduction of NO₃⁻ to NO₂⁻ (Vodovotz 1996 Biotechniques 20:390-394) and the measurement of nitrite by the Griess assay (Vodovotz 1996, supra). The absorbance values are measured at 550 nm against a standard curve of NaNO₂. The procedure is described in details in Samonte et al. 2006 Agron. J. 98:168-176.

[0600] Germination tests—Germination tests compare the percentage of seeds from transgenic plants that could complete the germination process to the percentage of seeds from control plants that are treated in the same manner. Normal conditions are considered for example, incubations at 22° C. under 22-hour light 2-hour dark daily cycles. Evaluation of germination and seedling vigor is conducted between 4 and 14 days after planting. The basal media is 50% MS medium (Murashige and Skoog, 1962 Plant Physiology 15, 473-497).

[0601] Germination is checked also at unfavorable conditions such as cold (incubating at temperatures lower than 10° C. instead of 22° C.) or using seed inhibition solutions that contain high concentrations of an osmolyte such as sorbitol (at concentrations of 50 mM, 100 mM, 200 mM, 300 mM, 500 mM, and up to 1000 mM) or applying increasing concentrations of salt (of 50 mM, 100 mM, 200 mM, 300 mM, 500 mM NaCl).

[0602] The effect of the transgene on plant's vigor, growth rate, biomass, yield and/or oil content can be determined using known methods.

[0603] Plant vigor—The plant vigor can be calculated by the increase in growth parameters such as leaf area, fiber length, rosette diameter, plant fresh weight and the like per time.

[0604] Growth rate—The growth rate can be measured using digital analysis of growing plants. For example, images of plants growing in greenhouse on plot basis can be captured every 3 days and the rosette area can be calculated by digital analysis. Rosette area growth is calculated using the difference of rosette area between days of sampling divided by the difference in days between samples.

[0605] It should be noted that an increase in rosette parameters such as rosette area, rosette diameter and/or rosette growth rate in a plant model such as Arabidopsis predicts an increase in canopy coverage and/or plot coverage in a target plant such as Brassica sp., soy, corn, wheat, Barley, oat, cotton, rice, tomato, sugar beet, and vegetables such as lettuce.

[0606] Evaluation of growth rate can be done by measuring plant biomass produced, rosette area, leaf size or root length per time (can be measured in cm² per day of leaf area).

[0607] Relative growth area can be calculated using Formula 2.

[0608] Formula 2:

[0609] Relative growth rate area=Regression coefficient of area along time course

[0610] Thus, the relative growth area rate is in units of area units (e.g., mm²/day or cm²/day) and the relative length growth rate is in units of length units (e.g., cm/day or mm/day).

[0611] For example, RGR can be determined for plant height (Formula 3), SPAD (Formula 4), Number of tillers (Formula 5), root length (Formula 6), vegetative growth (Formula 7), leaf number (Formula 8), rosette area (Formula 9), rosette diameter (Formula 10), plot coverage (Formula 11), leaf blade area (Formula 12), and leaf area (Formula 13).

[0612] Formula 3: Relative growth rate of Plant height=Regression coefficient of Plant height along time course (measured in cm/day).

[0613] Formula 4: Relative growth rate of SPAD=Regression coefficient of SPAD measurements along time course.

[0614] Formula 5: Relative growth rate of Number of tillers=Regression coefficient of Number of tillers along time course (measured in units of “number of tillers/day”).

[0615] Formula 6: Relative growth rate of root length=Regression coefficient of root length along time course (measured in cm per day).

[0616] Vegetative growth rate analysis—was calculated according to Formula 7 below.

[0617] Formula 7: Relative growth rate of vegetative growth=Regression coefficient of vegetative dry weight along time course (measured in grams per day).

[0618] Formula 8: Relative growth rate of leaf number=Regression coefficient of leaf number along time course (measured in number per day).

[0619] Formula 9: Relative growth rate of rosette area=Regression coefficient of rosette area along time course (measured in cm² per day).

[0620] Formula 10: Relative growth rate of rosette diameter=Regression coefficient of rosette diameter along time course (measured in cm per day).

[0621] Formula 11: Relative growth rate of plot coverage=Regression coefficient of plot (measured in cm² per day).

[0622] Formula 12: Relative growth rate of leaf blade area=Regression coefficient of leaf area along time course (measured in cm² per day).

[0623] Formula 13: Relative growth rate of leaf area=Regression coefficient of leaf area along time course (measured in cm² per day).

[0624] Formula 14: 1000 Seed Weight=number of seed in sample/sample weight×1000

[0625] The Harvest Index can be calculated using Formulas 15, 16, 17, 18, 65 and 66 below.

[0626] Formula 15: Harvest Index (seed)=Average seed yield per plant/Average dry weight.

[0627] Formula 16: Harvest Index (Sorghum)=Average grain dry weight per Head/(Average vegetative dry weight per Head+Average Head dry weight)

[0628] Formula 17: Harvest Index (Maize)=Average grain weight per plant/(Average vegetative dry weight per plant plus Average grain weight per plant)

[0629] Harvest Index (for barley)—The harvest index is calculated using Formula 18.

[0630] Formula 18: Harvest Index (for barley and wheat)=Average spike dry weight per plant/(Average vegetative dry weight per plant+Average spike dry weight per plant)

[0631] Following is a non-limited list of additional parameters which can be detected in order to show the effect of the transgene on the desired plant's traits:

[0632] Formula 19: Grain circularity=4×3.14 (grain area/perimeter²)

[0633] Formula 20: Internode volume=3.14×(d/2)²×1

[0634] Formula 21: Total dry matter (kg)=Normalized head weight per plant+vegetative dry weight.

[0635] Formula 22: Root/Shoot Ratio=total weight of the root at harvest/total weight of the vegetative portion above ground at harvest. (=RBiH/BiH)

[0636] Formula 23: Ratio of the number of pods per node on main stem at pod set=Total number of pods on main stem/Total number of nodes on main stem.

[0637] Formula 24: Ratio of total number of seeds in main stem to number of seeds on lateral branches=Total number of seeds on main stem at pod set/Total number of seeds on lateral branches at pod set.

[0638] Formula 25: Petiole Relative Area=(Petiole area)/Rosette area (measured in %).

[0639] Formula 26: percentage of reproductive tiller=Number of Reproductive tillers/number of tillers×100.

[0640] Formula 27: Spikes Index=Average Spikes weight per plant/(Average vegetative dry weight per plant plus Average Spikes weight per plant).

[0641] Formula 28: Relative growth rate of root coverage=Regression coefficient of root coverage along time course.

[0642] Formula 29:

[0643] Seed Oil yield=Seed yield per plant (gr.)*Oil % in seed.

[0644] Formula 30: shoot/root Ratio=total weight of the vegetative portion above ground at harvest/total weight of the root at harvest.

[0645] Formula 31: Spikelets Index=Average Spikelets weight per plant/(Average vegetative dry weight per plant plus Average Spikelets weight per plant).

[0646] Formula 32: % Canopy coverage=(1-(PAR_DOWN/PAR_UP))×100 measured using AccuPAR Ceptometer Model LP-80.

[0647] Formula 33: leaf mass fraction=Leaf area/shoot FW.

[0648] Formula 34: Relative growth rate based on dry weight=Regression coefficient of dry weight along time course.

[0649] Formula 35: Dry matter partitioning (ratio)—At the end of the growing period 6 plants heads as well as the rest of the plot heads were collected, threshed and grains were weighted to obtain grains yield per plot. Dry matter partitioning was calculated by dividing grains yield per plot to vegetative dry weight per plot.

[0650] Formula 36: 1000 grain weight filling rate (gr/day)—The rate of grain filling was calculated by dividing 1000 grain weight by grain fill duration.

[0651] Formula 37: Specific leaf area (cm²/gr)—Leaves were scanned to obtain leaf area per plant, and then were dried in an oven to obtain the leaves dry weight. Specific leaf area was calculated by dividing the leaf area by leaf dry weight.

[0652] Formula 38: Vegetative dry weight per plant at flowering/water until flowering (gr/lit)—Calculated by dividing vegetative dry weight (excluding roots and reproductive organs) per plant at flowering by the water used for irrigation up to flowering

[0653] Formula 39: Yield filling rate (gr/day)—The rate of grain filling was calculated by dividing grains Yield by grain fill duration.

[0654] Formula 40: Yield per dunam/water until tan (kg/lit)—Calculated by dividing Grains yield per dunam by water used for irrigation until tan.

[0655] Formula 41: Yield per plant/water until tan (gr/lit)—Calculated by dividing Grains yield per plant by water used for irrigation until tan

[0656] Formula 42: Yield per dunam/water until maturity (gr/lit)—Calculated by dividing grains yield per dunam by the water used for irrigation up to maturity. “Lit”=Liter.

[0657] Formula 43: Vegetative dry weight per plant/water until maturity (gr/lit): Calculated by dividing vegetative dry weight per plant (excluding roots and reproductive organs) at harvest by the water used for irrigation up to maturity.

[0658] Formula 44: Total dry matter per plant/water until maturity (gr/lit): Calculated by dividing total dry matter at harvest (vegetative and reproductive, excluding roots) per plant by the water used for irrigation up to maturity.

[0659] Formula 45: Total dry matter per plant/water until flowering (gr/lit): Calculated by dividing total dry matter at flowering (vegetative and reproductive, excluding roots) per plant by the water used for irrigation up to flowering.

[0660] Formula 46: Heads index (ratio): Average heads weight/(Average vegetative dry weight per plant plus Average heads weight per plant).

[0661] Formula 47: Yield/SPAD (kg/SPAD units)—Calculated by dividing grains yield by average SPAD measurements per plot.

[0662] Formula 48: Stem water content (percentage)—stems were collected and fresh weight (FW) was weighted. Then the stems were oven dry and dry weight (DW) was recorded. Stems dry weight was divided by stems fresh weight, subtracted from 1 and multiplied by 100.

[0663] Formula 49: Leaf water content (percentage)—Leaves were collected and fresh weight (FW) was weighted. Then the leaves were oven dry and dry weight (DW) was recorded. Leaves dry weight was divided by leaves fresh weight, subtracted from 1 and multiplied by 100.

[0664] Formula 50: stem volume (cm³)—The average stem volume was calculated by multiplying the average stem length by (3.14*((mean lower and upper stem width)/2)\hat{ }2).

[0665] Formula 51: NUE—is the ratio between total grain yield per total nitrogen (applied+content) in soil.

[0666] Formula 52: NUpE—Is the ratio between total plant N content per total N (applied+content) in soil.

[0667] Formula 53: Total NUtE—Is the ratio between total dry matter per N content of total dry matter.

[0668] Formula 54: Stem density—is the ratio between internode dry weight and internode volume.

[0669] Formula 55: Grain NUtE—Is the ratio between grain yield per N content of total dry matter

[0670] Formula 56: N harvest index (Ratio)—Is the ratio between nitrogen content in grain per plant and the nitrogen of whole plant at harvest.

[0671] Formula 57: Biomass production efficiency—is the ratio between plant biomass and total shoot N.

[0672] Formula 58: Harvest index (plot) (ratio)—Average seed yield per plot/Average dry weight per plot.

[0673] Formula 59: Relative growth rate of petiole relative area—Regression coefficient of petiole relative area along time course (measured in cm2 per day).

[0674] Formula 60: Yield per spike filling rate (gr/day)—spike filling rate was calculated by dividing grains yield per spike to grain fill duration.

[0675] Formula 61: Yield per micro plots filling rate (gr/day)—micro plots filling rate was calculated by dividing grains yield per micro plots to grain fill duration.

[0676] Formula 62: Grains yield per hectare [ton/ha]—all spikes per plot were harvested threshed and grains were weighted after sun dry. The resulting value was divided by the number of square meters and multiplied by 10,000 (10,000 square meters=1 hectare).

[0677] Formula 63: Total dry matter (for Maize)=Normalized ear weight per plant+vegetative dry weight.

$$Agronomical NUE = \frac{\begin{matrix}Yield per plant {( Kg . )}^{X Nitrogen Fertilization} - \\ Yield per plant {( Kg . )}^{0 \% Nitrogen Fertilization}\end{matrix}}{{Fertilzer}^{X}} \qquad Formula 64$$

[0678] Formula 65: Harvest Index (Brachypodium)=Average grain weight/average dry (vegetative+spikelet) weight per plant.

[0679] Formula 66: Harvest Index for Sorghum* (* when the plants were not dried)=FW (fresh weight) Heads/(FW Heads+FW Plants)

[0680] Formula 67: Relative growth rate of nodes number=Regression coefficient of nodes number along time course (measured in number per day).

[0681] Formula 68: Average internode length [cm]—average length of the stem internode. Calculated by dividing plant height by node number per plant (Plant height/node number)

[0682] Formula 69: % Yellow leaves number (VT) [SP) [%]—All leaves were classified as Yellow or Green. The value was calculated as the percent of yellow leaves from the total leaves.

[0683] Formula 70: Grain filling duration [num of days]—Calculation of the number of days to reach maturity stage subtracted by the number of days to reach silking stage.

[0684] Grain protein concentration—Grain protein content (g grain protein m⁻²) is estimated as the product of the mass of grain N (g grain N m⁻²) multiplied by the N/protein conversion ratio of k-5.13 (Mosse 1990, supra). The grain protein concentration is estimated as the ratio of grain protein content per unit mass of the grain (g grain protein kg⁻¹ grain).

[0685] Fiber length—Fiber length can be measured using fibrograph. The fibrograph system was used to compute length in terms of “Upper Half Mean” length. The upper half mean (UHM) is the average length of longer half of the fiber distribution. The fibrograph measures length in span lengths at a given percentage point (cottoninc (dot) com/ClassificationofCotton/?Pg=4#Length).

[0686] According to some embodiments of the invention, increased yield of corn may be manifested as one or more of the following: increase in the number of plants per growing area, increase in the number of ears per plant, increase in the number of rows per ear, number of kernels per ear row, kernel weight, thousand kernel weight (1000-weight), ear length/diameter, increase oil content per kernel and increase starch content per kernel.

[0687] As mentioned, the increase of plant yield can be determined by various parameters. For example, increased yield of rice may be manifested by an increase in one or more of the following: number of plants per growing area, number of panicles per plant, number of spikelets per panicle, number of flowers per panicle, increase in the seed filling rate, increase in thousand kernel weight (1000-weight), increase oil content per seed, increase starch content per seed, among others. An increase in yield may also result in modified architecture, or may occur because of modified architecture.

[0688] Similarly, increased yield of soybean may be manifested by an increase in one or more of the following: number of plants per growing area, number of pods per plant, number of seeds per pod, increase in the seed filling rate, increase in thousand seed weight (1000-weight), reduce pod shattering, increase oil content per seed, increase protein content per seed, among others. An increase in yield may also result in modified architecture, or may occur because of modified architecture.

[0689] Increased yield of canola may be manifested by an increase in one or more of the following: number of plants per growing area, number of pods per plant, number of seeds per pod, increase in the seed filling rate, increase in thousand seed weight (1000-weight), reduce pod shattering, increase oil content per seed, among others. An increase in yield may also result in modified architecture, or may occur because of modified architecture.

[0690] Increased yield of cotton may be manifested by an increase in one or more of the following: number of plants per growing area, number of bolls per plant, number of seeds per boll, increase in the seed filling rate, increase in thousand seed weight (1000-weight), increase oil content per seed, improve fiber length, fiber strength, among others. An increase in yield may also result in modified architecture, or may occur because of modified architecture.

[0691] Oil content—The oil content of a plant can be determined by extraction of the oil from the seed or the vegetative portion of the plant. Briefly, lipids (oil) can be removed from the plant (e.g., seed) by grinding the plant tissue in the presence of specific solvents (e.g., hexane or petroleum ether) and extracting the oil in a continuous extractor. Indirect oil content analysis can be carried out using various known methods such as Nuclear Magnetic Resonance (NMR) Spectroscopy, which measures the resonance energy absorbed by hydrogen atoms in the liquid state of the sample [See for example, Conway T F. and Earle F R., 1963, Journal of the American Oil Chemists' Society; Springer Berlin/Heidelberg, ISSN: 0003-021X (Print) 1558-9331 (Online)]; the Near Infrared (NI) Spectroscopy, which utilizes the absorption of near infrared energy (1100-2500 nm) by the sample; and a method described in WO/2001/023884, which is based on extracting oil a solvent, evaporating the solvent in a gas stream which forms oil particles, and directing a light into the gas stream and oil particles which forms a detectable reflected light.

[0692] Thus, the present invention is of high agricultural value for promoting the yield of commercially desired crops (e.g., biomass of vegetative organ such as poplar wood, or reproductive organ such as number of seeds or seed biomass).

[0693] Any of the transgenic plants described hereinabove or parts thereof may be processed to produce a feed, meal, protein or oil preparation, such as for ruminant animals.

[0694] The transgenic plants described hereinabove, which exhibit increased oil content can be used to produce plant oil (by extracting the oil from the plant).

[0695] The plant oil (including the seed oil and/or the vegetative portion oil) produced according to the method of the invention may be combined with a variety of other ingredients. The specific ingredients included in a product are determined according to the intended use. Exemplary products include animal feed, raw material for chemical modification, biodegradable plastic, blended food product, edible oil, biofuel, cooking oil, lubricant, biodiesel, snack food, cosmetics, and fermentation process raw material. Exemplary products to be incorporated to the plant oil include animal feeds, human food products such as extruded snack foods, breads, as a food binding agent, aquaculture feeds, fermentable mixtures, food supplements, sport drinks, nutritional food bars, multi-vitamin supplements, diet drinks, and cereal foods.

[0696] According to some embodiments of the invention, the oil comprises a seed oil.

[0697] According to some embodiments of the invention, the oil comprises a vegetative portion oil (oil of the vegetative portion of the plant).

[0698] According to some embodiments of the invention, the plant cell forms a part of a plant.

[0699] According to another embodiment of the present invention, there is provided a food or feed comprising the plants or a portion thereof of the present invention.

[0700] As used herein the term “about” refers to ±10%.

[0701] The terms “comprises”, “comprising”, “includes”, “including”, “having” and their conjugates mean “including but not limited to”.

[0702] The term “consisting of” means “including and limited to”.

[0703] The term “consisting essentially of” means that the composition, method or structure may include additional ingredients, steps and/or parts, but only if the additional ingredients, steps and/or parts do not materially alter the basic and novel characteristics of the claimed composition, method or structure.

[0704] As used herein, the singular form “a”, “an” and “the” include plural references unless the context clearly dictates otherwise. For example, the term “a compound” or “at least one compound” may include a plurality of compounds, including mixtures thereof.

[0705] Throughout this application, various embodiments of this invention may be presented in a range format. It should be understood that the description in range format is merely for convenience and brevity and should not be construed as an inflexible limitation on the scope of the invention. Accordingly, the description of a range should be considered to have specifically disclosed all the possible subranges as well as individual numerical values within that range. For example, description of a range such as from 1 to 6 should be considered to have specifically disclosed subranges such as from 1 to 3, from 1 to 4, from 1 to 5, from 2 to 4, from 2 to 6, from 3 to 6 etc., as well as individual numbers within that range, for example, 1, 2, 3, 4, 5, and 6. This applies regardless of the breadth of the range.

[0706] Whenever a numerical range is indicated herein, it is meant to include any cited numeral (fractional or integral) within the indicated range. The phrases “ranging/ranges between” a first indicate number and a second indicate number and “ranging/ranges from” a first indicate number “to” a second indicate number are used herein interchangeably and are meant to include the first and second indicated numbers and all the fractional and integral numerals therebetween.

[0707] As used herein the term “method” refers to manners, means, techniques and procedures for accomplishing a given task including, but not limited to, those manners, means, techniques and procedures either known to, or readily developed from known manners, means, techniques and procedures by practitioners of the chemical, pharmacological, biological, biochemical and medical arts.

[0708] As used herein, the term “treating” includes abrogating, substantially inhibiting, slowing or reversing the progression of a condition, substantially ameliorating clinical or aesthetical symptoms of a condition or substantially preventing the appearance of clinical or aesthetical symptoms of a condition.

[0709] When reference is made to particular sequence listings, such reference is to be understood to also encompass sequences that substantially correspond to its complementary sequence as including minor sequence variations, resulting from, e.g., sequencing errors, cloning errors, or other alterations resulting in base substitution, base deletion or base addition, provided that the frequency of such variations is less than 1 in 50 nucleotides, alternatively, less than 1 in 100 nucleotides, alternatively, less than 1 in 200 nucleotides, alternatively, less than 1 in 500 nucleotides, alternatively, less than 1 in 1000 nucleotides, alternatively, less than 1 in 5,000 nucleotides, alternatively, less than 1 in 10,000 nucleotides.

[0710] It is understood that any Sequence Identification Number (SEQ ID NO) disclosed in the instant application can refer to either a DNA sequence or a RNA sequence, depending on the context where that SEQ ID NO is mentioned, even if that SEQ ID NO is expressed only in a DNA sequence format or a RNA sequence format. For example, SEQ ID NO: 50 is expressed in a DNA sequence format (e.g., reciting T for thymine), but it can refer to either a DNA sequence that corresponds to a Phaseolus vulgaris (bean) “LBY466” nucleic acid sequence, or the RNA sequence of an RNA molecule nucleic acid sequence. Similarly, though some sequences are expressed in a RNA sequence format (e.g., reciting U for uracil), depending on the actual type of molecule being described, it can refer to either the sequence of a RNA molecule comprising a dsRNA, or the sequence of a DNA molecule that corresponds to the RNA sequence shown. In any event, both DNA and RNA molecules having the sequences disclosed with any substitutes are envisioned.

[0711] It is appreciated that certain features of the invention, which are, for clarity, described in the context of separate embodiments, may also be provided in combination in a single embodiment. Conversely, various features of the invention, which are, for brevity, described in the context of a single embodiment, may also be provided separately or in any suitable subcombination or as suitable in any other described embodiment of the invention. Certain features described in the context of various embodiments are not to be considered essential features of those embodiments, unless the embodiment is inoperative without those elements.

[0712] Various embodiments and aspects of the present invention as delineated hereinabove and as claimed in the claims section below find experimental support in the following examples.

### EXAMPLES

[0713] Reference is now made to the following examples, which together with the above descriptions illustrate some embodiments of the invention in a non limiting fashion.

[0714] Generally, the nomenclature used herein and the laboratory procedures utilized in the present invention include molecular, biochemical, microbiological and recombinant DNA techniques. Such techniques are thoroughly explained in the literature. See, for example, “Molecular Cloning: A laboratory Manual” Sambrook et al., (1989); “Current Protocols in Molecular Biology” Volumes I-III Ausubel, R. M., ed. (1994); Ausubel et al., “Current Protocols in Molecular Biology”, John Wiley and Sons, Baltimore, Md. (1989); Perbal, “A Practical Guide to Molecular Cloning”, John Wiley & Sons, New York (1988); Watson et al., “Recombinant DNA”, Scientific American Books, New York; Birren et al. (eds) “Genome Analysis: A Laboratory Manual Series”, Vols. 1-4, Cold Spring Harbor Laboratory Press, New York (1998); methodologies as set forth in U.S. Pat. Nos. 4,666,828; 4,683,202; 4,801,531; 5,192,659 and 5,272,057; “Cell Biology: A Laboratory Handbook”, Volumes I-III Cellis, J. E., ed. (1994); “Current Protocols in Immunology” Volumes I-III Coligan J. E., ed. (1994); Stites et al. (eds), “Basic and Clinical Immunology” (8th Edition), Appleton & Lange, Norwalk, Conn. (1994); Mishell and Shiigi (eds), “Selected Methods in Cellular Immunology”, W. H. Freeman and Co., New York (1980); available immunoassays are extensively described in the patent and scientific literature, see, for example, U.S. Pat. Nos. 3,791,932; 3,839,153; 3,850,752; 3,850,578; 3,853,987; 3,867,517; 3,879,262; 3,901,654; 3,935,074; 3,984,533; 3,996,345; 4,034,074; 4,098,876; 4,879,219; 5,011,771 and 5,281,521; “Oligonucleotide Synthesis” Gait, M. J., ed. (1984); “Nucleic Acid Hybridization” Hames, B. D., and Higgins S. J., eds. (1985); “Transcription and Translation” Hames, B. D., and Higgins S. J., Eds. (1984); “Animal Cell Culture” Freshney, R. I., ed. (1986); “Immobilized Cells and Enzymes” IRL Press, (1986); “A Practical Guide to Molecular Cloning” Perbal, B., (1984) and “Methods in Enzymology” Vol. 1-317, Academic Press; “PCR Protocols: A Guide To Methods And Applications”, Academic Press, San Diego, Calif. (1990); Marshak et al., “Strategies for Protein Purification and Characterization—A Laboratory Course Manual” CSHL Press (1996); all of which are incorporated by reference as if fully set forth herein. Other general references are provided throughout this document. The procedures therein are believed to be well known in the art and are provided for the convenience of the reader. All the information contained therein is incorporated herein by reference.

[0715] General Experimental and Bioinformatics Methods

[0716] RNA extraction—Tissues growing at various growth conditions (as described below) were sampled and RNA was extracted using TRIzol Reagent from Invitrogen [invitrogen (dot) com/content (dot)cfm?pageid=469]. Approximately 30-50 mg of tissue was taken from samples. The weighed tissues were ground using pestle and mortar in liquid nitrogen and resuspended in 500 μl of TRIzol Reagent. To the homogenized lysate, 100 μl of chloroform was added followed by precipitation using isopropanol and two washes with 75% ethanol. The RNA was eluted in 30 μl of RNase-free water. RNA samples were cleaned up using Qiagen's RNeasy minikit clean-up protocol as per the manufacturer's protocol (QIAGEN Inc, CA USA). For convenience, each micro-array expression information tissue type has received an expression Set ID.

[0717] Correlation analysis—was performed for selected genes according to some embodiments of the invention, in which the characterized parameters (measured parameters according to the correlation IDs) were used as “x axis” for correlation with the tissue transcriptom which was used as the “Y axis”. For each gene and measured parameter a correlation coefficient “R” was calculated (using Pearson correlation) along with a p-value for the significance of the correlation. When the correlation coefficient (R) between the levels of a gene's expression in a certain tissue and a phenotypic performance across ecotypes/variety/hybrid is high in absolute value (between 0.5-1), there is an association between the gene (specifically the expression level of this gene) the phenotypic characteristic (e.g., improved nitrogen use efficiency, abiotic stress tolerance, yield, growth rate and the like).

### Example 1

### Production of Barley Transcriptome and High Throughput Correlation Analysis Using 60K Barley Oligonucleotide Micro-Array

[0718] In order to produce a high throughput correlation analysis comparing between plant phenotype and gene expression level, the present inventors utilized a Barley oligonucleotide micro-array, produced by Agilent Technologies [chem. (dot) agilent (dot) com/Scripts/PDS (dot) asp?1Page=50879]. The array oligonucleotide represents about 60K Barley genes and transcripts. In order to define correlations between the levels of RNA expression and yield or vigor related parameters, various plant characteristics of 15 different Barley accessions were analyzed. Among them, 10 accessions encompassing the observed variance were selected for RNA expression analysis. The correlation between the RNA levels and the characterized parameters was analyzed using Pearson correlation test [davidmlane (dot) com/hyperstat/A34739 (dot) html].

[0719] Experimental Procedures

[0720] Analyzed Barley tissues—six tissues at different developmental stages [leaf, meristem, root tip, adventitious root, booting spike and stem], representing different plant characteristics, were sampled and RNA was extracted as described above. Each micro-array expression information tissue type has received a Set ID as summarized in Tables 1-3 below.

TABLE 1
Barley transcriptome expression sets under
normal and low nitrogen conditions (set 1)

| Expression Set | Set ID |
|---|---|
| Root at vegetative stage under low nitrogen conditions | 1 |
| Root at vegetative stage under normal conditions | 2 |
| Leaf at vegetative stage under low nitrogen conditions | 3 |
| Leaf at vegetative stage under normal conditions | 4 |
| Root tip at vegetative stage under low nitrogen conditions | 5 |
| Root tip at vegetative stage under normal conditions | 6 |

Table 1. Provided are the barley transcriptome expression sets IDs under normal and low nitrogen conditions (set 1-vegetative stage).

TABLE 2
Barley transcriptome expression sets under
normal and low nitrogen conditions (set 2)

| Expression Set | Set ID |
|---|---|
| Booting spike at reproductive stage under low nitrogen | 1 |
| conditions | |
| Booting spike at reproductive stage under normal conditions | 2 |
| Leaf at reproductive stage under low nitrogen conditions | 3 |
| Leaf at reproductive stage under normal conditions | 4 |
| Stem at reproductive stage under low nitrogen conditions | 5 |
| Stem at reproductive stage under normal conditions | 6 |

Table 2. Provided are the barley transcriptome expression sets under normal and low nitrogen conditions (set 2-reproductive stage).

TABLE 3
Barley transcriptome expression sets under
drought and recovery conditions (set 3)

| Expression Set | Set ID |
|---|---|
| Booting spike at reproductive stage under drought | 1 |
| conditions | |
| Leaf at reproductive stage under drought conditions | 2 |
| Leaf at vegetative stage under drought conditions | 3 |
| Meristem at vegetative stage under drought conditions | 4 |
| Root tip at vegetative stage under drought conditions | 5 |
| Root tip at vegetative stage under recovery from drought | 6 |
| conditions | |

Table 3. Provided are the expression sets IDs at the reproductive and vegetative stages.

[0721] Barley yield components and vigor related parameters assessment—15 Barley accessions in 5 repetitive blocks, each containing 5 plants per pot were grown at net house. Three different treatments were applied: plants were regularly fertilized and watered during plant growth until harvesting as recommended for commercial growth under normal conditions [normal growth conditions included irrigation 2-3 times a week and fertilization given in the first 1.5 months of the growth period]; under low Nitrogen (80% percent less Nitrogen); or under drought stress (cycles of drought and re-irrigating were conducted throughout the whole experiment, overall 40% less water as compared to normal conditions were given in the§ drought treatment). Plants were phenotyped on a daily basis following the standard descriptor of barley (Tables 4 and 5, below). Harvest was conducted while all the spikes were dry. All material was oven dried and the seeds were threshed manually from the spikes prior to measurement of the seed characteristics (weight and size) using scanning and image analysis. The image analysis system included a personal desktop computer (Intel P4 3.0 GHz processor) and a public domain program—ImageJ 1.37 (Java based image processing program), which was developed at the U.S. National Institutes of Health and freely available on the internet [rsbweb (dot) nih (dot) gov/]. Next, analyzed data was saved to text files and processed using the JMP statistical analysis software (SAS institute).

[0722] Grains number—The total number of grains from all spikes that were manually threshed was counted. Number of grains per plot was counted.

[0723] Grain yield (gr.)—At the end of the experiment all spikes of the pots were collected. The total grains from all spikes that were manually threshed were weighted. The grain yield was calculated by per plot or per plant.

[0724] Spike length and width analysis—At the end of the experiment the length and width of five chosen spikes per plant were measured using measuring tape excluding the awns.

[0725] Spike number analysis—The spikes per plant were counted.

[0726] Plant height—Each of the plants was measured for its height using a measuring tape. Height was measured from ground level to top of the longest spike excluding awns at two time points at the Vegetative growth (30 days after sowing) and at harvest.

[0727] Spike weight—The biomass and spikes weight of each plot were separated, measured and divided by the number of plants.

[0728] Dry weight=total weight of the vegetative portion above ground (excluding roots) after drying at 70° C. in oven for 48 hours at two time points at the Vegetative growth (30 days after sowing) and at harvest.

[0729] Root dry weight=total weight of the root portion underground after drying at 70° C. in oven for 48 hours at harvest.

[0730] Root/Shoot Ratio—The Root/Shoot Ratio calculated using Formula 22 (above).

[0731] Total No. of tillers—all tillers were counted per plot at two time points at the vegetative growth (30 days after sowing) and at harvest.

[0732] Percent of reproductive tillers—was calculated based on Formula 26 (above).

[0733] SPAD [SPAD unit]—Chlorophyll content was determined using a Minolta SPAD 502 chlorophyll meter and measurement was performed at time of flowering. SPAD meter readings were done on young fully developed leaf. Three measurements per leaf were taken per plot.

[0734] Root FW (gr.), root length (cm) and No. of lateral roots—3 plants per plot were selected for measurement of root weight, root length and for counting the number of lateral roots formed.

[0735] Shoot FW—weight of 3 plants per plot were recorded at different time-points.

[0736] Heading date—the day in which booting stage was observed was recorded and number of days from sowing to heading was calculated.

[0737] Relative water content (RWC)—was calculated based on Formula 1 described above.

[0738] Harvest Index (for barley)—The harvest index was performed using Formula 18 above.

[0739] Relative growth rate: the relative growth rate (RGR) of Plant Height, SPAD and number of tillers were calculated based on Formulas 3, 4 and 5 respectively.

[0740] Average Grain Area (cm²)—At the end of the growing period the grains were separated from the spike. A sample of ˜200 grains was weighted, photographed and images were processed using the below described image processing system. The grain area was measured from those images and was divided by the number of grains.

[0741] Average Grain Length and width (cm)—At the end of the growing period the grains were separated from the spike. A sample of ˜200 grains was weighted, photographed and images were processed using the below described image processing system. The sum of grain lengths or width (longest axis) was measured from those images and was divided by the number of grains.

[0742] Average Grain perimeter (cm)—At the end of the growing period the grains were separated from the spike. A sample of ˜200 grains was weighted, photographed and images were processed using the below described image processing system. The sum of grain perimeter was measured from those images and was divided by the number of grains.

[0743] Ratio Drought/Normal: Represent ratio for the results of the specified parameters measured under Drought condition divided by results of the specified parameters measured under Normal conditions (maintenance of phenotype under drought in comparison to normal conditions).

TABLE 4
Barley correlated parameters (vectors) under
low nitrogen and normal conditions (set 1)

| | Correlation |
|---|---|
| Correlated parameter with | ID |
| SPAD at TP2, under low Nitrogen conditions | 1 |
| Root FW (gr.) at TP2, under low Nitrogen conditions | 2 |
| shoot FW (gr.) at TP2, under low Nitrogen conditions | 3 |
| Seed Yield (gr.), under low Nitrogen conditions | 4 |
| Spike Width (cm), under low Nitrogen conditions | 5 |
| Root length (cm) at TP2, under low Nitrogen conditions | 6 |
| Plant Height (cm) at TP1, under low Nitrogen conditions | 7 |
| Spike Length (cm), under low Nitrogen conditions | 8 |
| Plant Height (cm) at TP2, under low Nitrogen conditions | 9 |
| Leaf Number at TP4, under low Nitrogen conditions | 10 |
| No. of lateral roots at TP2, under low Nitrogen conditions | 11 |
| Max Width (mm) at TP4, under low Nitrogen conditions | 12 |
| Max Length (mm) at TP4, under low Nitrogen conditions | 13 |
| Seed Number (per plot), under low Nitrogen conditions | 14 |
| Total No of Spikes per plot, under low Nitrogen conditions | 15 |
| Total Leaf Area (mm²) at TP4, under low Nitrogen | 16 |
| conditions | |
| Total No of tillers per plot, under low Nitrogen conditions | 17 |
| Spike total weight (per plot), under low Nitrogen | 18 |
| conditions | |
| Seed Yield (gr.), under normal conditions | 19 |
| Num Seeds, under normal conditions | 20 |
| Plant Height (cm) at TP2, under normal conditions | 21 |
| Num Spikes per plot, under normal conditions | 22 |
| Spike Length (cm), under normal conditions | 23 |
| Spike Width (cm), under normal conditions | 24 |
| Spike weight per plot (gr.), under normal conditions | 25 |
| Total Tillers per plot (number), under normal conditions | 26 |
| Root Length (cm), under normal conditions | 27 |
| Lateral Roots (number), under normal conditions | 28 |
| Root FW (gr.), under normal conditions | 29 |
| Num Tillers per plant, under normal growth conditions | 30 |
| SPAD, under normal conditions | 31 |
| Shoot FW (gr.), under normal conditions | 32 |
| Plant Height (cm) at TP1, under normal conditions | 33 |
| Num Leaves, under normal conditions | 34 |
| Leaf Area (mm²), under normal conditions | 35 |
| Max Width (mm), under normal conditions | 36 |
| Max Length (mm), under normal conditions | 37 |

Table 4. Provided are the barley correlated parameters. TP = time point; DW = dry weight; FW = fresh weight; Low N = Low Nitrogen.

TABLE 5
Barley correlated parameters (vectors) under
low nitrogen and normal conditions (set 2)

| Correlated parameter with | Correlation ID |
|---|---|
| Row number (number) | 1 |
| shoot/root ratio (ratio) | 2 |
| Spikes FW (Harvest) (gr.) | 3 |
| Spikes num (number) | 4 |
| Tillering (Harvest) (number) | 5 |
| Vegetative DW (Harvest) (gr.) | 6 |
| Grain area (cm²) | 7 |
| Grain length (mm) | 8 |
| Grain Perimeter (mm) | 9 |
| Grain width (mm) | 10 |
| Grains DW/Shoots DW (ratio) | 11 |
| Grains per plot (number) | 12 |
| Grains weight per plant (gr.) | 13 |
| Grains weight per plot (gr.) | 14 |
| percent of reproductive tillers (%) | 15 |
| Plant Height (cm) | 16 |
| Roots DW (gr.) | 17 |

Table 5. Provided are the barley correlated parameters. “DW” = dry weight; “ratio”-maintenance of phenotypic performance under drought in comparison to under normal conditions.

TABLE 6
Barley correlated parameters (vectors) under drought conditions

| Correlated parameter with | Correlation ID |
|---|---|
| Harvest index | 1 |
| Dry weight vegetative growth (gr.) | 2 |
| Relative water content | 3 |
| Heading date | 4 |
| RBiH/BiH (root/shoot ratio, Formula | 5 |
| 22 hereinabove) | |
| Height Relative growth rate | 6 |
| SPAD Relative growth rate | 7 |
| Number of tillers Relative growth rate | 8 |
| Grain number | 9 |
| Grain weight (gr.) | 10 |
| Plant height T2 (cm) | 11 |
| Spike number per plant | 12 |
| Spike length (cm) | 13 |
| Spike width (cm) | 14 |
| Spike weight per plant (gr.) | 15 |
| Tillers number T2 (number) | 16 |
| Dry weight harvest (gr.) | 17 |
| Root dry weight (gr.) | 18 |
| Root length (cm) | 19 |
| Lateral root number (number) | 20 |
| Root fresh weight (gr.) | 21 |
| Tillers number T1 (number) | 22 |
| Chlorophyll levels | 23 |
| Plant height T1 (cm) | 24 |
| Fresh weight (gr.) | 25 |

Table 6. Provided are the barley correlated parameters. “TP” = time point; “DW” = dry weight; “FW” = fresh weight; “Low N” = Low Nitrogen; “Normal” = regular growth conditions. “Max” = maximum.

TABLE 7
Barley correlated parameters (vectors) for maintenance
of performance under drought conditions

| Correlated parameter with | Correlation ID |
|---|---|
| Grain number (ratio) | 1 |
| Grain weight (ratio) | 2 |
| Plant height (ratio) | 3 |
| Spike number (ratio) | 4 |
| Spike length (ratio) | 5 |
| Spike width (ratio) | 6 |
| Spike weight per plant (ratio) | 7 |
| Tillers number (ratio) | 8 |
| Dry weight at harvest (ratio) | 9 |
| Root dry weight (ratio) | 10 |
| Root length (ratio) | 11 |
| lateral root number (ratio) | 12 |
| Root fresh weight (ratio) | 13 |
| Chlorophyll levels (ratio) | 14 |
| Fresh weight (ratio) | 15 |
| Dry weight vegetative growth (ratio) | 16 |
| Relative water content (ratio) | 17 |
| Harvest index (ratio) | 18 |
| Heading date (ratio) | 19 |
| Root/shoot (ratio) | 20 |

Table 7. Provided are the barley correlated parameters. “DW” = dry weight; “ratio”-maintenance of phenotypic performance under drought in comparison to normal conditions.

[0744] Experimental Results

[0745] 15 different Barley accessions were grown and characterized for different parameters as described above. The average for each of the measured parameter was calculated using the JMP software and values are summarized in Tables 8-17 below. Subsequent correlation analysis between the various transcriptome expression sets and the average parameters was conducted (Tables 18-21). Follow, results were integrated to the database.

TABLE 8
Measured parameters of correlation IDs in Barley accessions (set 1)
under low N and normal conditions (as described in Table 4)

| Line/Corr. ID | Line-1 | Line-2 | Line-3 | Line-4 | Line-5 |
|---|---|---|---|---|---|
| 1 | 24.00 | 23.30 | 26.50 | 23.90 | 26.60 |
| 2 | 0.38 | 0.23 | 0.12 | 0.40 | 0.88 |
| 3 | 0.43 | 0.43 | 0.33 | 0.58 | 0.78 |
| 4 | 9.76 | 7.31 | 3.30 | 5.06 | 6.02 |
| 5 | 7.95 | 8.13 | 9.43 | 4.94 | 9.60 |
| 6 | 24.70 | 21.70 | 22.00 | 21.70 | 22.20 |
| 7 | 41.00 | 82.00 | 61.40 | 59.40 | 65.80 |
| 8 | 15.20 | 19.60 | 16.30 | 19.30 | 90.20 |
| 9 | 16.30 | 18.80 | 17.30 | 26.00 | 22.50 |
| 10 | 8.00 | 8.00 | 7.50 | 8.50 | 10.00 |
| 11 | 5.00 | 6.00 | 4.33 | 6.00 | 6.33 |
| 12 | 5.25 | 5.17 | 5.12 | 5.30 | 5.20 |
| 13 | 102.90 | 107.80 | 111.60 | 142.40 | 152.40 |
| 14 | 230.20 | 164.60 | 88.20 | 133.60 | 106.00 |
| 15 | 12.20 | 9.00 | 11.60 | 25.00 | 7.80 |
| 16 | 39.40 | 46.30 | 51.50 | 57.10 | 67.80 |
| 17 | 16.20 | 14.60 | 16.00 | 20.80 | 12.50 |
| 18 | 13.70 | 13.40 | 9.20 | 11.60 | 11.30 |
| 19 | 46.40 | 19.80 | 10.80 | 22.60 | 30.30 |
| 20 | 1090.00 | 510.00 | 242.00 | 582.00 | 621.00 |
| 21 | 64.70 | 84.00 | 67.40 | 82.00 | 72.00 |
| 22 | 41.50 | 32.00 | 36.00 | 71.40 | 34.20 |
| 23 | 16.50 | 19.20 | 18.30 | 20.40 | 17.20 |
| 24 | 9.54 | 9.05 | 8.25 | 6.55 | 10.50 |
| 25 | 69.40 | 39.40 | 34.90 | 50.30 | 60.80 |
| 26 | 46.70 | 41.60 | 40.00 | 48.80 | 34.60 |
| 27 | 21.30 | 15.00 | 21.80 | 20.30 | 27.20 |
| 28 | 7.00 | 8.67 | 8.33 | 9.67 | 10.70 |
| 29 | 0.27 | 0.27 | 0.25 | 0.35 | 0.62 |
| 30 | 2.00 | 2.00 | 1.00 | 2.33 | 2.33 |
| 31 | 39.10 | 41.40 | 35.20 | 33.70 | 34.20 |
| 32 | 2.17 | 1.90 | 1.25 | 3.00 | 15.60 |
| 33 | 39.20 | 37.00 | 36.80 | 49.80 | 46.80 |
| 34 | 24.20 | 18.20 | 22.70 | 25.50 | 23.20 |
| 35 | 294.0 | 199.0 | 273.0 | 276.0 | 313.0 |
| 36 | 5.77 | 5.45 | 5.80 | 6.03 | 4.63 |
| 37 | 502.0 | 348.0 | 499.0 | 594.0 | 535.0 |

Table 8. Provided are the values of each of the parameters (as described above) measured in Barley accessions (line) under low nitrogen and normal growth conditions. Growth conditions are specified in the experimental procedure section. “Corr ID” = correlation vector identification.

TABLE 9
Additional measured parameters of correlation
IDs in Barley accessions (set 1) under low N and
normal conditions (as described in Table 4)

| Line/Corr. ID | Line-6 | Line-7 | Line-8 | Line-9 | Line-10 |
|---|---|---|---|---|---|
| 1 | 23.20 | 25.40 | 24.20 | 25.00 | 26.10 |
| 2 | 0.50 | 0.43 | 0.32 | 0.30 | 0.55 |
| 3 | 0.53 | 0.45 | 0.43 | 0.50 | 0.62 |
| 4 | 9.74 | 7.35 | 5.80 | 7.83 | 6.29 |
| 5 | 7.16 | 7.06 | 8.51 | 10.01 | 9.40 |
| 6 | 23.00 | 30.50 | 22.80 | 23.80 | 24.50 |
| 7 | 47.80 | 53.80 | 56.40 | 81.80 | 44.60 |
| 8 | 16.40 | 20.40 | 18.80 | 18.80 | 16.60 |
| 9 | 18.20 | 19.70 | 19.80 | 19.20 | 19.20 |
| 10 | 11.50 | 8.60 | 6.33 | 7.50 | 10.00 |
| 11 | 6.00 | 6.67 | 4.67 | 5.67 | 7.33 |
| 12 | 5.33 | 5.32 | 5.10 | 5.15 | 5.10 |
| 13 | 149.30 | 124.10 | 95.00 | 124.10 | 135.20 |
| 14 | 222.60 | 219.20 | 143.40 | 201.80 | 125.00 |
| 15 | 14.50 | 15.00 | 7.00 | 5.40 | 8.40 |
| 16 | 64.20 | 52.40 | 46.20 | 68.00 | 57.90 |
| 17 | 18.80 | 21.20 | 11.00 | 6.80 | 14.00 |
| 18 | 15.10 | 12.20 | 10.90 | 12.20 | 10.60 |
| 19 | 54.10 | 37.00 | 42.00 | 35.40 | 38.30 |
| 20 | 1070.00 | 903.00 | 950.00 | 984.00 | 768.00 |
| 21 | 56.60 | 65.80 | 62.80 | 91.60 | 66.20 |
| 22 | 45.60 | 49.80 | 28.00 | 19.30 | 38.00 |
| 23 | 19.10 | 20.30 | 21.70 | 16.50 | 16.10 |
| 24 | 8.83 | 7.38 | 10.40 | 10.20 | 10.30 |
| 25 | 79.10 | 62.70 | 60.00 | 55.90 | 59.70 |
| 26 | 48.60 | 49.20 | 29.00 | 27.50 | 38.80 |
| 27 | 16.00 | 24.00 | 13.50 | 21.50 | 15.20 |
| 28 | 9.67 | 9.67 | 8.67 | 10.00 | 9.67 |
| 29 | 0.27 | 0.35 | 0.32 | 0.23 | 0.27 |
| 30 | 3.33 | 2.33 | 1.33 | 1.33 | 1.67 |
| 31 | 42.80 | 37.00 | 36.90 | 35.00 | 36.80 |
| 32 | 3.02 | 2.58 | 1.75 | 2.18 | 1.82 |
| 33 | 34.80 | 43.20 | 35.70 | 46.20 | 40.20 |
| 34 | 28.30 | 22.20 | 19.00 | 17.30 | 22.00 |
| 35 | 309.0 | 259.0 | 291.0 | 299.0 | 296.0 |
| 36 | 5.33 | 5.83 | 5.43 | 5.75 | 6.03 |
| 37 | 551.0 | 479.0 | 399.0 | 384.0 | 470.0 |

Table 9. Provided are the values of each of the parameters (as described above) measured in Barley accessions (line) under normal growth conditions. Growth conditions are specified in the experimental procedure section. “Corr ID” = correlation vector identification.

TABLE 10
Measured parameters of correlation IDs in Barley
accessions under normal conditions (set 2)

| Corr. | Line | | | | | | | |
|---|---|---|---|---|---|---|---|---|
| ID | Line-1 | Line-2 | Line-3 | Line-4 | Line-5 | Line-6 | Line-7 | Line-8 |
| 1 | 6.00 | 6.00 | 6.00 | 6.00 | 6.00 | 2.80 | 6.00 | 2.00 |
| 2 | 1.48 | 0.64 | 0.84 | 0.82 | 1.15 | 0.69 | 1.26 | 0.72 |
| 3 | 69.80 | 39.90 | 69.40 | 59.70 | 60.80 | 79.10 | 63.50 | 62.70 |
| 4 | 38.60 | 32.00 | 41.50 | 38.00 | 34.20 | 45.60 | 30.00 | 49.80 |
| 5 | 44.20 | 41.60 | 46.70 | 38.80 | 34.60 | 48.60 | 32.40 | 55.20 |
| 6 | 89.20 | 99.70 | 45.80 | 49.40 | 74.30 | 55.10 | 47.30 | 60.30 |
| 7 | 0.25 | 0.24 | 0.24 | 0.23 | 0.24 | 0.25 | 0.24 | 0.22 |
| 8 | 0.89 | 0.87 | 0.86 | 0.80 | 0.83 | 0.78 | 0.90 | 0.72 |
| 9 | 2.24 | 2.24 | 2.18 | 2.05 | 2.08 | 2.03 | 2.25 | 1.88 |
| 10 | 0.352 | 0.350 | 0.350 | 0.369 | 0.365 | 0.406 | 0.346 | 0.387 |
| 11 | 0.40 | 0.16 | 1.01 | 0.79 | 0.41 | 0.99 | 0.67 | 0.61 |
| 12 | 683.40 | 510.50 | 1093.50 | 767.60 | 621.00 | 1069.00 | 987.80 | 903.20 |
| 13 | 6.65 | 3.96 | 9.27 | 7.65 | 6.06 | 10.83 | 7.94 | 7.40 |
| 14 | 33.20 | 19.80 | 46.40 | 38.30 | 30.30 | 54.10 | 39.70 | 37.00 |
| 15 | 82.30 | 77.70 | 86.70 | 94.20 | 89.70 | 93.70 | 89.50 | 90.30 |
| 16 | 76.40 | 84.00 | 64.70 | 66.20 | 72.00 | 56.60 | 68.00 | 65.80 |
| 17 | 118.30 | 150.70 | 86.30 | 85.20 | 120.30 | 90.70 | 40.60 | 90.50 |

Table 10. Provided are the values of each of the parameters (as described above) measured in Barley accessions (line) under normal growth conditions. Growth conditions are specified in the experimental procedure section. “Corr ID” = correlation vector identification.

TABLE 11
Additional measured parameters of correlation IDs in
Barley accessions under normal conditions (set 2)

| Corr. | Line | | | | | | |
|---|---|---|---|---|---|---|---|
| ID | Line-9 | Line-10 | Line-11 | Line-12 | Line-13 | Line-14 | Line-15 |
| 1 | 2 | 5.2 | 6 | 6 | 6 | 4.67 | 4 |
| 2 | 1.169 | 0.707 | 0.38 | 0.511 | 2.161 | 0.666 | 0.395 |
| 3 | 50.3 | 60 | 34.9 | 60.1 | 55.9 | 16.9 | 21.7 |
| 4 | 71.4 | 28 | 36 | 27.6 | 23.6 | 54.7 | 48 |
| 5 | 50.6 | 29 | 40 | 28.5 | 27.5 | 26 | — |
| 6 | 88 | 38.9 | 97.7 | 48.3 | 62.5 | 58 | 72.8 |
| 7 | 0.232 | 0.223 | 0.235 | 0.213 | 0.177 | 0.191 | 0.174 |
| 8 | 0.823 | 0.794 | 0.797 | 0.799 | 0.65 | 0.824 | 0.773 |
| 9 | 2.09 | 2.03 | 2.02 | 1.98 | 1.69 | 1.98 | 1.89 |
| 10 | 0.359 | 0.356 | 0.374 | 0.337 | 0.346 | 0.294 | 0.287 |
| 11 | 0.282 | 1.037 | 0.116 | 0.859 | 0.576 | 0.05 | 0.079 |
| 12 | 581.8 | 904.4 | 242.4 | 928.4 | 984.2 | 157.7 | 263.2 |
| 13 | 4.52 | 8.41 | 2 | 8.05 | 7.07 | 0.75 | 1.14 |
| 14 | 22.6 | 39.7 | 10.8 | 40.3 | 35.4 | 3.7 | 5.7 |
| 15 | 91.2 | 92.5 | 91.7 | 85.3 | — | — | — |
| 16 | 82 | 62.8 | 67.4 | 76.2 | 91.6 | 44 | 52.8 |
| 17 | 92.6 | 64 | 286.6 | 95.8 | 34 | 121.3 | 206.8 |

Table 11. Provided are the values of each of the parameters (as described above) measured in Barley accessions (line) under normal growth conditions. Growth conditions are specified in the experimental procedure section. “Corr ID” = correlation vector identification.

TABLE 12
Measured parameters of correlation IDs in Barley
accessions) under low nitrogen conditions (set 2)

| Corr. | Line | | | | | | | |
|---|---|---|---|---|---|---|---|---|
| ID | Line-1 | Line-2 | Line-3 | Line-4 | Line-5 | Line-6 | Line-7 | Line-8 |
| 1 | 6.00 | 6.00 | 6.00 | 6.00 | 6.00 | 2.00 | 6.00 | 2.00 |
| 2 | 0.69 | 1.08 | 0.77 | 0.38 | 0.83 | 0.42 | 0.29 | 0.57 |
| 3 | 11.40 | 13.40 | 13.70 | 10.60 | 11.30 | 15.10 | 11.60 | 12.20 |
| 4 | 10.80 | 9.00 | 12.20 | 8.40 | 7.80 | 14.50 | 8.40 | 15.00 |
| 5 | 16.00 | 14.60 | 16.20 | 14.00 | 12.50 | 18.80 | 11.60 | 21.20 |
| 6 | 17.40 | 17.80 | 8.20 | 7.30 | 13.20 | 11.30 | 8.90 | 14.20 |
| 7 | 0.250 | 0.251 | 0.255 | 0.235 | 0.249 | 0.227 | 0.227 | 0.205 |
| 8 | 0.90 | 0.92 | 0.93 | 0.82 | 0.86 | 0.76 | 0.83 | 0.74 |
| 9 | 2.28 | 2.33 | 2.28 | 2.08 | 2.13 | 1.96 | 2.09 | 1.88 |
| 10 | 0.351 | 0.346 | 0.349 | 0.364 | 0.366 | 0.381 | 0.347 | 0.355 |
| 11 | 0.39 | 0.42 | 1.25 | 0.69 | 0.43 | 0.87 | 0.77 | 0.53 |
| 12 | 153.20 | 164.60 | 230.20 | 125.00 | 100.00 | 222.60 | 159.40 | 219.20 |
| 13 | 1.34 | 1.46 | 1.95 | 1.26 | 1.13 | 1.95 | 1.28 | 1.47 |
| 14 | 6.68 | 7.31 | 9.76 | 6.29 | 5.67 | 9.74 | 6.40 | 7.35 |
| 15 | 68.70 | 61.80 | 76.90 | 59.60 | 65.60 | 79.80 | 73.80 | 71.00 |
| 16 | 75.20 | 82.00 | 41.00 | 44.60 | 65.80 | 47.80 | 60.60 | 53.80 |
| 17 | 39.90 | 26.20 | 17.30 | 32.90 | 33.90 | 83.80 | 29.60 | 37.20 |

Table 12. Provided are the values of each of the parameters (as described above) measured in Barley accessions (line) under low N growth conditions. Growth conditions are specified in the experimental procedure section. “Corr ID” = correlation vector identification.

TABLE 13
Additional measured parameters of correlation IDs in Barley
accessions) under low nitrogen conditions (set 2)

| Corr. | Line | | | | | | |
|---|---|---|---|---|---|---|---|
| ID | Line-9 | Line-10 | Line-11 | Line-12 | Line-13 | Line-14 | Line-15 |
| 1 | 2.00 | 5.20 | 6.00 | 6.00 | 6.00 | 2.00 | 2.00 |
| 2 | 0.60 | 0.55 | 2.88 | 1.36 | 0.89 | 2.49 | 0.40 |
| 3 | 11.60 | 8.80 | 9.20 | 12.40 | 12.20 | 5.70 | 5.00 |
| 4 | 25.00 | 7.00 | 11.60 | 7.60 | 5.40 | 16.40 | 12.00 |
| 5 | 23.50 | 11.00 | 16.00 | 10.80 | 6.80 | 35.00 | — |
| 6 | 15.70 | 6.40 | 55.90 | 11.50 | 10.90 | 58.90 | 17.10 |
| 7 | 0.24 | 0.20 | 0.22 | 0.23 | 0.19 | 0.19 | 0.17 |
| 8 | 0.86 | 0.73 | 0.81 | 0.85 | 0.68 | 0.81 | 0.79 |
| 9 | 2.19 | 1.88 | 2.03 | 2.11 | 1.77 | 2.00 | 1.90 |
| 10 | 0.345 | 0.349 | 0.348 | 0.348 | 0.360 | 0.295 | 0.275 |
| 11 | 0.34 | 0.87 | 0.15 | 0.58 | 0.76 | 0.05 | 0.07 |
| 12 | 133.60 | 134.40 | 88.20 | 174.20 | 201.80 | 86.70 | 61.60 |
| 13 | 0.98 | 1.16 | 0.92 | 1.33 | 1.57 | 0.29 | 0.22 |
| 14 | 5.06 | 5.43 | 4.62 | 6.67 | 7.83 | 1.44 | 1.12 |
| 15 | 95.80 | 64.90 | 68.80 | 74.20 | 81.40 | 37.10 | — |
| 16 | 59.40 | 56.40 | 61.40 | 65.60 | 81.80 | 69.00 | 57.40 |
| 17 | 44.40 | 14.50 | 41.50 | 23.70 | 20.90 | 49.70 | 54.00 |

Table 13. Provided are the values of each of the parameters (as described above) measured in Barley accessions (line) under low N growth conditions. Growth conditions are specified in the experimental procedure section. “Corr ID” = correlation vector identification.

TABLE 14
Measured parameters of correlation IDs in Barley accessions
(1-8) under drought and recovery conditions

| Corr. | Line | | | | | | | |
|---|---|---|---|---|---|---|---|---|
| ID | Line-1 | Line-2 | Line-3 | Line-4 | Line-5 | Line-6 | Line-7 | Line-8 |
| 1 | 0.47 | 0.66 | 0.53 | 0.69 | 0.53 | 0.69 | 0.69 | 0.75 |
| 2 | 0.22 | 0.21 | — | — | — | 0.17 | — | — |
| 3 | 80.60 | 53.40 | 55.90 | — | 43.20 | 69.80 | 45.50 | 76.50 |
| 4 | 75.00 | 71.00 | 65.00 | — | 66.80 | 90.00 | 90.00 | — |
| 5 | 0.013 | 0.012 | 0.008 | 0.006 | 0.025 | 0.020 | 0.008 | 0.008 |
| 6 | 0.27 | 0.86 | 0.73 | 0.88 | 0.40 | 0.94 | 0.70 | 0.71 |
| 7 | 0.087 | −0.123 | 0.001 | 0.010 | 0.037 | −0.072 | 0.013 | 0.003 |
| 8 | 0.07 | 0.10 | 0.06 | 0.07 | 0.16 | 0.06 | 0.10 | 0.05 |
| 9 | 170.00 | 267.50 | 111.00 | 205.30 | 153.60 | 252.50 | 288.40 | 274.50 |
| 10 | 5.55 | 9.80 | 3.55 | 7.20 | 5.28 | 7.75 | 9.92 | 10.25 |
| 11 | 46.00 | 52.80 | 35.00 | 38.00 | 45.20 | 48.00 | 37.70 | 41.20 |
| 12 | 4.20 | 4.36 | 7.60 | 8.44 | 4.92 | 3.43 | 6.90 | 5.80 |
| 13 | 16.70 | 16.80 | 13.30 | 13.50 | 14.20 | 15.60 | 15.70 | 17.50 |
| 14 | 8.64 | 9.07 | 7.82 | 7.32 | 8.74 | 7.62 | 6.98 | 8.05 |
| 15 | 17.70 | 24.20 | 18.20 | 18.00 | 19.50 | 15.00 | 23.40 | 28.20 |
| 16 | 11.70 | 9.00 | 10.90 | 10.20 | 10.30 | 8.80 | 13.00 | 7.40 |
| 17 | 6.15 | 5.05 | 3.20 | 3.28 | 4.76 | 3.55 | 4.52 | 3.38 |
| 18 | 77.50 | 60.20 | 27.10 | 18.60 | 117.40 | 70.70 | 37.30 | 25.60 |
| 19 | 21.70 | 20.30 | 22.00 | 24.00 | 20.70 | 18.30 | 21.00 | 20.30 |
| 20 | 8.33 | 8.67 | 7.33 | 7.67 | 6.67 | 6.67 | 7.67 | 6.67 |
| 21 | 2.07 | 1.48 | 1.12 | 1.87 | 1.67 | 1.68 | 1.62 | 0.85 |
| 22 | 2.00 | 2.00 | 1.67 | 1.67 | 2.00 | 1.67 | 2.33 | 1.00 |
| 23 | 41.30 | 33.60 | 36.60 | 40.50 | 45.10 | 39.70 | 38.30 | 36.20 |
| 24 | 33.30 | 27.00 | 31.30 | 34.20 | 31.30 | 30.30 | 28.70 | 38.70 |
| 25 | 1.90 | 1.52 | 1.17 | 1.95 | 1.90 | 1.22 | 1.75 | 1.58 |

Table 14. Provided are the values of each of the parameters (as described above) measured in Barley accessions (line) under drought and recovery growth conditions. Growth conditions are specified in the experimental procedure section. “Corr ID” = correlation vector identification.

TABLE 15
Measured parameters of correlation IDs in Barley accessions
under drought and recovery conditions additional lines (9-15)

| Corr. | Line | | | | | | |
|---|---|---|---|---|---|---|---|
| ID | Line-9 | Line-10 | Line-11 | Line-12 | Line-13 | Line-14 | Line-15 |
| 1 | 0.60 | 0.81 | 0.87 | 0.29 | 0.44 | 0.78 | 0.41 |
| 2 | 0.25 | — | — | 0.13 | 0.19 | 0.22 | — |
| 3 | 87.40 | — | — | 58.30 | 80.60 | 73.10 | — |
| 4 | 90.00 | — | — | 90.00 | 81.60 | 90.00 | — |
| 5 | 0.012 | 0.007 | 0.016 | 0.023 | 0.012 | 0.012 | 0.026 |
| 6 | 0.77 | 0.80 | 0.92 | 0.39 | 0.88 | −0.13 | 0.20 |
| 7 | −0.063 | 0.035 | 0.050 | −0.004 | −0.072 | 0.025 | −0.063 |
| 8 | 0.10 | 0.06 | 0.06 | 0.18 | 0.15 | 0.02 | 0.44 |
| 9 | 348.50 | 358.00 | 521.40 | 71.50 | 160.10 | 376.70 | 105.00 |
| 10 | 8.50 | 14.03 | 17.52 | 2.05 | 5.38 | 11.00 | 2.56 |
| 11 | 40.80 | 49.90 | 43.00 | 47.40 | 64.80 | 52.60 | 32.00 |
| 12 | 8.55 | 9.67 | 5.42 | 3.05 | 4.07 | 3.72 | 3.21 |
| 13 | 16.00 | 18.30 | 17.40 | 14.20 | 14.80 | 16.50 | 12.70 |
| 14 | 6.06 | 6.72 | 9.55 | 7.84 | 7.81 | 8.35 | 5.47 |
| 15 | 22.00 | 33.00 | 34.80 | 11.70 | 18.80 | 21.00 | 9.90 |
| 16 | 13.90 | 11.00 | 6.80 | 8.40 | 9.20 | 5.10 | 16.10 |
| 17 | 5.67 | 3.31 | 2.65 | 5.12 | 6.86 | 3.11 | 3.74 |
| 18 | 66.20 | 22.10 | 41.10 | 117.00 | 84.10 | 37.50 | 98.90 |
| 19 | 21.70 | 19.70 | 16.70 | 17.00 | 15.20 | 27.00 | 15.00 |
| 20 | 6.00 | 8.67 | 7.67 | 6.33 | 7.00 | 7.00 | 6.67 |
| 21 | 1.45 | 1.38 | 0.82 | 0.58 | 0.63 | 1.07 | 0.70 |
| 22 | 2.33 | 3.00 | 1.00 | 1.00 | 1.00 | 1.00 | 1.00 |
| 23 | 42.10 | 31.80 | 33.50 | 42.40 | 42.30 | 36.80 | 40.60 |
| 24 | 33.70 | 28.40 | 27.50 | 25.00 | 27.00 | 31.00 | 22.30 |
| 25 | 1.88 | 1.73 | 1.00 | 0.90 | 0.90 | 1.43 | 0.83 |

Table 15. Provided are the values of each of the parameters (as described above) measured in Barley accessions (line) under drought and recovery growth conditions. Growth conditions are specified in the experimental procedure section. “Corr ID” = correlation vector identification.

TABLE 16
Measured parameters of correlation IDs in Barley accessions
for maintenance of performance under drought conditions

| Corr. | Line | | | | | | | |
|---|---|---|---|---|---|---|---|---|
| ID | Line-1 | Line-2 | Line-3 | Line-4 | Line-5 | Line-6 | Line-7 | Line-8 |
| 1 | 0.12 | 0.22 | 0.11 | 0.19 | 0.17 | 0.21 | 0.22 | 0.24 |
| 2 | 0.08 | 0.17 | 0.06 | 0.14 | 0.15 | 0.14 | 0.15 | 0.20 |
| 3 | 0.51 | 0.61 | 0.67 | 0.72 | 0.61 | 0.59 | 0.70 | 0.63 |
| 3 | 0.51 | 0.61 | 0.67 | 0.72 | 0.61 | 0.59 | 0.70 | 0.63 |
| 4 | 0.73 | 0.96 | 1.11 | 1.30 | 0.83 | 0.62 | 0.87 | 1.12 |
| 5 | 0.83 | 0.82 | 0.86 | 0.77 | 0.78 | 0.94 | 0.83 | 0.89 |
| 6 | 0.75 | 0.77 | 0.68 | 0.67 | 0.87 | 0.66 | 0.75 | 0.74 |
| 7 | 0.16 | 0.23 | 0.19 | 0.23 | 0.25 | 0.18 | 0.23 | 0.34 |
| 8 | 1.87 | 1.57 | 1.72 | 1.80 | 1.60 | 1.61 | 1.63 | 1.59 |
| 8 | 1.87 | 1.57 | 1.72 | 1.80 | 1.60 | 1.61 | 1.63 | 1.59 |
| 9 | 0.61 | 0.45 | 0.59 | 0.67 | 0.41 | 0.54 | 0.75 | 0.65 |
| 10 | 0.94 | 0.44 | 0.66 | 0.37 | 0.71 | 1.06 | 0.50 | 0.62 |
| 11 | 0.66 | 0.74 | 1.16 | 0.78 | 0.76 | 0.76 | 0.68 | 0.77 |
| 12 | 1.09 | 0.74 | 0.79 | 0.88 | 0.71 | 0.65 | 0.85 | 0.77 |
| 13 | 1.10 | 1.00 | 1.02 | 1.67 | 0.80 | 0.81 | 1.13 | 0.34 |
| 14 | 0.98 | 0.72 | 1.30 | 1.06 | 1.03 | 0.95 | 0.82 | 0.93 |
| 15 | 0.60 | 0.50 | 0.47 | 0.68 | 0.46 | 0.47 | 0.58 | 0.62 |
| 16 | 0.93 | 0.71 | 0.00 | 0.00 | 0.00 | 0.65 | 0.00 | 0.92 |
| 17 | 0.78 | 0.58 | 0.90 | 0.00 | 0.65 | 0.56 | 0.78 | 0.83 |
| 18 | 0.54 | 0.79 | 0.58 | 0.75 | 0.70 | 0.77 | 0.75 | 0.83 |
| 19 | 0.00 | 1.12 | 1.30 | 0.00 | 1.00 | 1.06 | 1.37 | 1.22 |
| 20 | 1.55 | 0.97 | 1.12 | 0.56 | 1.72 | 1.97 | 0.67 | 0.96 |

Table 16. Provided are the values of each of the parameters (as described above) measured in Barley accessions (line) for maintenance of performance under drought (calculated as % of change under drought vs. normal growth conditions). Growth conditions are specified in the experimental procedure section. “Corr ID” = correlation vector identification.

TABLE 17
Additional measured parameters of correlation IDs in Barley accessions
for maintenance of performance under drought conditions

| Corr. | Line | | | | | | |
|---|---|---|---|---|---|---|---|
| ID | Line-9 | Line-10 | Line-11 | Line-12 | Line-13 | Line-14 | Line-15 |
| 1 | 0.25 | 0.58 | 0.43 | 0.10 | 0.10 | 0.28 | 0.43 |
| 2 | 0.14 | 0.47 | 0.32 | 0.07 | 0.07 | 0.20 | 0.32 |
| 3 | 0.66 | 0.87 | 0.86 | 0.64 | 0.79 | 0.56 | 0.51 |
| 3 | 0.66 | 0.87 | 0.86 | 0.64 | 0.79 | 0.56 | 0.51 |
| 4 | 1.09 | 1.09 | 0.92 | 0.49 | 0.65 | 0.99 | 0.52 |
| 5 | 0.78 | 0.94 | 0.88 | 0.77 | 0.86 | 0.97 | 0.78 |
| 6 | 0.74 | 0.86 | 0.85 | 0.79 | 0.72 | 0.72 | 0.88 |
| 7 | 0.22 | 0.68 | 0.55 | 0.18 | 0.18 | 0.27 | 0.25 |
| 8 | 1.75 | 1.33 | 1.62 | 1.33 | 1.40 | 1.22 | 1.96 |
| 8 | 1.75 | 1.33 | 1.62 | 1.33 | 1.40 | 1.22 | 1.96 |
| 9 | 0.77 | 0.80 | 0.68 | 0.42 | 0.65 | 0.52 | 0.46 |
| 10 | 0.88 | 0.87 | 0.94 | 0.77 | 0.85 | 1.06 | 0.68 |
| 11 | 1.12 | 0.56 | 0.42 | 0.82 | 0.43 | 0.71 | 0.80 |
| 12 | 0.58 | 0.96 | 0.88 | 0.95 | 0.78 | 0.66 | 0.87 |
| 13 | 0.85 | 0.58 | 0.07 | 1.06 | 0.30 | 0.44 | 0.93 |
| 14 | 0.93 | 0.80 | 0.94 | 0.96 | 1.01 | 0.93 | 1.03 |
| 15 | 0.74 | — | 0.81 | 0.72 | 0.37 | 0.40 | — |
| 16 | 1.01 | 0.00 | 0.00 | 0.94 | 0.00 | 0.70 | 0.00 |
| 17 | 0.50 | — | 0.00 | 0.00 | 0.78 | 0.55 | — |
| 18 | 0.67 | 0.92 | 0.93 | 0.41 | 0.50 | 0.87 | 0.82 |
| 19 | 0.00 | — | — | 1.20 | 1.00 | — | — |
| 20 | 1.14 | 1.08 | 1.38 | 1.84 | 1.31 | 2.06 | 1.46 |

Table 17. Provided are the values of each of the parameters (as described above) measured in Barley accessions (line) for maintenance of performance under drought (calculated as % of change under drought vs. normal growth conditions). Growth conditions are specified in the experimental procedure section. “Corr ID” = correlation vector identification.

TABLE 18
Correlation between the expression level of selected genes of some embodiments
of the invention in various tissues and the phenotypic performance under
low nitrogen and normal conditions across Barley accessions (set 1)

| Gene | | | Exp. | Corr. | Gene | | | Exp. | Corr. |
|---|---|---|---|---|---|---|---|---|---|
| Name | R | P value | set | ID | Name | R | P value | set | ID |
| LBY465 | 0.79 | 1.88E−02 | 6 | 22 | LBY465 | 0.75 | 3.34E−02 | 6 | 28 |
| LBY465 | 0.91 | 1.55E−03 | 6 | 32 | LBY465 | 0.86 | 6.63E−03 | 6 | 33 |
| LBY465 | 0.93 | 9.93E−04 | 6 | 30 | LBY465 | 0.87 | 2.23E−03 | 1 | 6 |
| LBY465 | 0.82 | 1.19E−02 | 4 | 22 | LBY465 | 0.76 | 1.08E−02 | 5 | 17 |
| LBY465 | 0.91 | 2.96E−04 | 5 | 15 | LBY465 | 0.71 | 3.05E−02 | 2 | 32 |
| LBY465 | 0.83 | 5.88E−03 | 3 | 3 | LBY465 | 0.74 | 2.28E−02 | 3 | 16 |
| LBY465 | 0.90 | 8.26E−04 | 3 | 9 | LBY465 | 0.71 | 3.24E−02 | 3 | 2 |
| LBY465 | 0.85 | 3.80E−03 | 3 | 13 | LBY508 | 0.88 | 1.79E−03 | 2 | 32 |
| LBY508 | 0.76 | 1.79E−02 | 2 | 29 | | | | | |

Table 18. Provided are the correlations (R) between the expression levels of the genes of some embodiments of the invention and their homologs in various tissues [Expression (Exp) set 1, Table 1] and the phenotypic performance (yield, biomass, growth rate and/or vigor components) according to the Correlation (corr.) vectors specified in Table 4 under normal and low nitrogen conditions across barley varieties. P = p value.

TABLE 19
Correlation between the expression level of selected genes of some embodiments
of the invention in various tissues and the phenotypic performance under low
nitrogen and normal growth conditions across Barley accessions (set 2)

| Gene | | | Exp. | Corr. | Gene | | | Exp. | Corr. |
|---|---|---|---|---|---|---|---|---|---|
| Name | R | P value | set | ID | Name | R | P value | set | ID |
| LBY465 | 0.72 | 1.82E−02 | 3 | 5 | LBY465 | 0.72 | 1.90E−02 | 3 | 4 |
| LBY508 | 0.71 | 2.23E−02 | 2 | 2 | LBY508 | 0.80 | 5.45E−03 | 3 | 10 |
| LBY508 | 0.75 | 1.17E−02 | 5 | 16 | | | | | |

Table 19. Correlations (R) between the expression levels of the genes of some embodiments of the invention and their homologs in various tissues (expression set 2, Table 2) and the phenotypic performance (yield, biomass, growth rate and/or vigor components) according to the Correlation (corr.) vectors specified in Table 5 under normal and low nitrogen conditions across barley varieties. “Exp. Set”—Expression set. “R” = Pearson correlation coefficient; “P” = p value.

TABLE 20
Correlation between the expression level of selected genes of some
embodiments of the invention in various tissues and the phenotypic
performance under drought stress conditions across Barley accessions

| Gene | | | Exp. | Corr. | Gene | | | Exp. | Corr. |
|---|---|---|---|---|---|---|---|---|---|
| Name | R | P value | set | ID | Name | R | P value | set | ID |
| LBY465 | 0.78 | 6.97E−02 | 1 | 19 | LBY465 | 0.87 | 2.56E−02 | 1 | 24 |
| LBY465 | 0.83 | 2.04E−02 | 3 | 4 | LBY465 | 0.71 | 7.62E−02 | 3 | 3 |
| LBY465 | 0.91 | 1.82E−03 | 3 | 5 | LBY465 | 0.86 | 6.01E−03 | 3 | 23 |
| LBY465 | 0.86 | 6.55E−03 | 3 | 18 | LBY465 | 0.83 | 2.00E−02 | 2 | 24 |
| LBY508 | 0.71 | 1.17E−01 | 1 | 20 | LBY508 | 0.91 | 1.11E−02 | 1 | 11 |
| LBY508 | 0.86 | 2.83E−02 | 1 | 15 | LBY508 | 0.81 | 4.84E−02 | 1 | 13 |
| LBY508 | 0.73 | 1.03E−01 | 1 | 10 | LBY508 | 0.71 | 1.16E−01 | 1 | 1 |
| LBY508 | 0.85 | 7.48E−03 | 3 | 15 | LBY508 | 0.75 | 3.28E−02 | 3 | 10 |
| LBY508 | 0.77 | 2.65E−02 | 5 | 14 | | | | | |

Table 20. Provided are the correlations (R) between the expression levels of the genes of some embodiments of the invention and their homologs in various tissues [Expression (Exp) set 3, Table 3] and the phenotypic performance (yield, biomass, growth rate and/or vigor components) according to the Correlation (Corr.) vectors specified in Table 6 under drought conditions across barley varieties. P = p value.

TABLE 21
Correlation between the expression level of selected genes of some embodiments
of the invention in various tissues and the phenotypic performance of maintenance
of performance under drought conditions across Barley accessions

| Gene | | | Exp. | Corr. | Gene | | | Exp. | Corr. |
|---|---|---|---|---|---|---|---|---|---|
| Name | R | P value | set | ID | Name | R | P value | set | ID |
| LBY465 | 0.95 | 4.22E−03 | 1 | 4 | LBY465 | 0.71 | 1.14E−01 | 1 | 8 |
| LBY465 | 0.86 | 2.95E−02 | 1 | 14 | LBY465 | 0.71 | 5.00E−02 | 3 | 20 |
| LBY465 | 0.73 | 4.06E−02 | 3 | 16 | LBY465 | 0.78 | 3.69E−02 | 2 | 4 |
| LBY465 | 0.73 | 3.81E−02 | 5 | 4 | LBY465 | 0.71 | 4.90E−02 | 5 | 14 |
| LBY465 | 0.90 | 9.89E−04 | 4 | 14 | LBY508 | 0.93 | 6.25E−03 | 1 | 7 |
| LBY508 | 0.92 | 1.05E−02 | 1 | 2 | LBY508 | 0.89 | 1.68E−02 | 1 | 1 |
| LBY508 | 0.76 | 8.27E−02 | 1 | 6 | LBY508 | 0.91 | 1.30E−02 | 1 | 3 |
| LBY508 | 0.71 | 1.15E−01 | 1 | 5 | LBY508 | 0.76 | 7.71E−02 | 1 | 18 |
| LBY508 | 0.79 | 2.03E−02 | 3 | 7 | LBY508 | 0.77 | 2.48E−02 | 3 | 2 |
| LBY508 | 0.71 | 4.97E−02 | 3 | 1 | LBY508 | 0.80 | 1.68E−02 | 3 | 6 |
| LBY508 | 0.78 | 2.13E−02 | 3 | 3 | LBY508 | 0.80 | 5.81E−02 | 5 | 19 |
| LBY508 | 0.79 | 1.94E−02 | 5 | 14 | | | | | |

Table 21. Correlations (R) between the expression levels of the genes of some embodiments of the invention and their homologs in various tissues (expression set 3, Table 3) and the phenotypic performance (yield, biomass, growth rate and/or vigor components) according to the Correlation (Corr.) vectors specified in Table 7. “Exp. Set”—Expression set. “R” = Pearson correlation coefficient; “P” = p value.

### Example 2

### Production of Barley Transcriptome and High Throughput Correlation Analysis Using 60K Barley Oligonucleotide Micro-Array

[0746] In order to produce a high throughput correlation analysis, the present inventors utilized a Barley oligonucleotide micro-array, produced by Agilent Technologies [chem. (dot) agilent (dot) com/Scripts/PDS (dot) asp?1Page=50879]. The array oligonucleotide represents about 33,777 Barley genes and transcripts. In order to define correlations between the levels of RNA expression and yield or vigor related parameters, various plant characteristics of 55 different Barley accessions were analyzed. Same accessions were subjected to RNA expression analysis. The correlation between the RNA levels and the characterized parameters was analyzed using Pearson correlation test [davidmlane (dot) com/hyperstat/A34739 (dot) html].

[0747] Experimental Procedures

[0748] Four tissues at different developmental stages [leaf, flag leaf, spike and peduncle], representing different plant characteristics, were sampled and RNA was extracted as described hereinabove under “GENERAL EXPERIMENTAL AND BIOINFORMATICS METHODS”.

[0749] For convenience, each micro-array expression information tissue type has received a Set ID as summarized in Table 22 below.

TABLE 22
Barley transcriptome expression sets

| Expression Set | Set ID |
|---|---|
| Flag leaf at booting stage under normal conditions | 1 |
| Spike at grain filling stage under normal conditions | 2 |
| Spike at booting stage under normal conditions | 3 |
| Stem at booting stage under normal conditions | 4 |

Table 22: Provided are the identification (ID) letters of each of the Barley expression sets.

[0750] Barley yield components and vigor related parameters assessment—55 Barley accessions in 5 repetitive blocks (named A, B, C, D and E), each containing 48 plants per plot were grown in field. Plants were phenotyped on a daily basis. Harvest was conducted while 50% of the spikes were dry to avoid spontaneous release of the seeds. All material was oven dried and the seeds were threshed manually from the spikes prior to measurement of the seed characteristics (weight and size) using scanning and image analysis. The image analysis system included a personal desktop computer (Intel P4 3.0 GHz processor) and a public domain program—ImageJ 1.37 (Java based image processing program, which was developed at the U.S. National Institutes of Health and freely available on the internet [rsbweb (dot) nih (dot) gov/]). Next, analyzed data was saved to text files and processed using the JMP statistical analysis software (SAS institute).

[0751] At the end of the experiment (50% of the spikes were dry) all spikes from plots within blocks A-E were collected, and the following measurements were performed:

[0752] % reproductive tiller percentage—The percentage of reproductive tillers at flowering calculated using Formula 26 above.

[0753] 1000 grain weight (gr.)—At the end of the experiment all grains from all plots were collected and weighted and the weight of 1000 were calculated.

[0754] Avr. (average) seedling dry weight (gr.)—Weight of seedling after drying/ number of plants.

[0755] Avr. (average) shoot dry weight (gr.)—Weight of Shoot at flowering stage after drying/number of plants.

[0756] Avr. (average) spike weight (gr.)—Calculate spikes dry weight after drying at 70° C. in oven for 48 hours, at harvest/num of spikes.

[0757] Spike weight—The biomass and spikes weight of each plot was separated, measured and divided by the number of plants.

[0758] Dry weight—total weight of the vegetative portion above ground (excluding roots) after drying at 70° C. in oven for 48 hours at two time points at the Vegetative growth (30 days after sowing) and at harvest.

[0759] Vegetative dry weight (gr.)—Total weight of the vegetative portion above ground (excluding roots) after drying at 70° C. in oven for 48 hours. The biomass weight of each plot was measured and divided by the number of plants.

[0760] Field spike length (cm)—Measure spike length without the Awns at harvest.

[0761] Grain Area (cm²)—A sample of ˜200 grains was weighted, photographed and images were processed using the below described image processing system. The grain area was measured from those images and was divided by the number of grains.

[0762] Grain Length and Grain width (cm)—A sample of ˜200 grains was weighted, photographed and images were processed using the below described image processing system. The sum of grain lengths and width (longest axis) was measured from those images and was divided by the number of grains.

[0763] Grain Perimeter (cm)—A sample of ˜200 grains was weighted, photographed and images were processed using the below described image processing system. The sum of grain perimeter was measured from those images and was divided by the number of grains.

[0764] Grains per spike—The total number of grains from 5 spikes that were manually threshed was counted. The average grain per spike was calculated by dividing the total grain number by the number of spikes.

[0765] Grain yield per plant (gr.)—The total grains from 5 spikes that were manually threshed was weighted. The grain yield was calculated by dividing the total weight by the plants number.

[0766] Grain yield per spike (gr.)—The total grains from 5 spikes that were manually threshed was weighted. The grain yield was calculated by dividing the total weight by the spike number.

[0767] Growth habit scoring—At growth stage 10 (booting), each of the plants was scored for its growth habit nature. The scale that was used was “1” for prostate nature till “9” for erect.

[0768] Harvest Index (for barley)—The harvest index was calculated using Formula 18 above.

[0769] Number of days to anthesis—Calculated as the number of days from sowing till 50% of the plot reach anthesis.

[0770] Number of days to maturity—Calculated as the number of days from sowing till 50% of the plot reach maturity.

[0771] Plant height—At harvest stage (50% of spikes were dry), each of the plants was measured for its height using measuring tape. Height was measured from ground level to top of the longest spike excluding awns.

[0772] Reproductive period—Calculated number of days from booting to maturity.

[0773] Reproductive tillers number—Number of Reproductive tillers with flag leaf at flowering.

[0774] Relative Growth Rate (RGR) of vegetative dry weight was performed using Formula 7 above.

[0775] Spike area (cm²)—At the end of the growing period 5 ‘spikes’ were, photographed and images were processed using the below described image processing system. The ‘spike’ area was measured from those images and was divided by the number of ‘spikes’.

[0776] Spike length and width analysis—At the end of the experiment the length and width of five chosen spikes per plant were measured using measuring tape excluding the awns.

[0777] Spike max width—Measured by imaging the max width of 10-15 spikes randomly distributed within a pre-defined 0.5 m² of a plot. Measurements were carried out at the middle of the spike.

[0778] Spikes Index—The Spikes index was calculated using Formula 27 above.

[0779] Spike number analysis—The spikes per plant were counted at harvest.

[0780] No. of tillering—tillers were counted per plant at heading stage (mean per plot).

[0781] Total dry mater per plant—Calculated as Vegetative portion above ground plus all the spikes dry weight per plant.

TABLE 23
Barley correlated parameters (vectors)

| Correlated parameter with | Correlation ID |
|---|---|
| % reproductive tiller percentage (%) | 1 |
| 1000 grain weight (gr.) | 2 |
| Avr. seedling dry weight (gr.) | 3 |
| Avr. shoot dry weight (F) (gr.) | 4 |
| Avr. spike weight (H) (gr.) | 5 |
| Avr. spike dry weight per plant (H) (gr.) | 6 |
| Avr. vegetative dry weight per plant (H) (gr.) | 7 |
| Field spike length (cm) | 8 |
| Grain Area (cm²) | 9 |
| Grain Length (cm) | 10 |
| Grain Perimeter (cm) | 11 |
| Grain width (cm) | 12 |
| Grains per spike (number) | 13 |
| Grain yield per plant (gr.) | 14 |
| Grain yield per spike (gr.) | 15 |
| Growth habit (scores 1-9) | 16 |
| Harvest Index (value) | 17 |
| Number days to anthesis (days) | 18 |
| Number days to maturity (days) | 19 |
| Plant height (cm) | 20 |
| Reproductive period (days) | 21 |
| Reproductive tillers number (F) (number) | 22 |
| RGR | 23 |
| Spike area (cm²) | 24 |
| Spike length (cm) | 25 |
| Spike max width (cm) | 26 |
| Spike width (cm) | 27 |
| Spike index (cm) | 28 |
| Spikes per plant (numbers) | 29 |
| Tillering (Heading) (number) | 30 |
| Total dry matter per plant (kg) | 31 |

Table 23. Provided are the Barley correlated parameters (vectors).

[0782] Experimental Results

[0783] 55 different Barley accessions were grown and characterized for 31 parameters as described above. Among the 55 lines and ecotypes, 27 are Hordeum spontaneum and 19 are Hordeum vulgare. The average for each of the measured parameters was calculated using the JMP software and values are summarized in Tables 24-38 below. Subsequent correlation analysis between the various transcriptome expression sets (Table 22) and the average parameters was conducted. Correlations were calculated across all 55 lines and ecotypes. The phenotypic data of all 55 lines and ecotypes (including those of Hordeum spontaneum and Hordeum vulgare) are summarized in Tables 24-31. The correlation data of Hordeum spontaneum lines and ecotypes (lines Nos. 21-22, 24-28, 30-34, 36-38, 41-49, and 51-53) are summarized in Table 32. The correlation data of Hordeum vulgare lines and ecotypes (lines Nos. 1-2, 4-6, 8-19, and 54-55) are summarized in Table 33.

TABLE 24
Measured parameters of correlation IDs in Barley accessions (1-7)

| Corr. | Line | | | | | | |
|---|---|---|---|---|---|---|---|
| ID | Line-1 | Line-2 | Line-3 | Line-4 | Line-5 | Line-6 | Line-7 |
| 1 | 4.30 | 18.30 | 9.20 | 40.20 | 33.20 | NA | 7.90 |
| 2 | 50.10 | 50.00 | 31.80 | 52.40 | 47.20 | 49.30 | 53.00 |
| 3 | 0.05 | 0.06 | 0.04 | 0.05 | 0.05 | 0.05 | 0.07 |
| 4 | 11.30 | 52.60 | 48.30 | 126.90 | 60.60 | NA | 31.40 |
| 5 | 3.33 | 1.56 | 2.37 | 3.11 | 3.18 | 2.85 | 3.37 |
| 6 | 80.90 | 60.50 | 36.40 | 69.40 | 61.00 | 63.20 | 88.30 |
| 7 | 46.30 | 85.00 | 82.70 | 127.40 | 79.50 | 83.00 | 68.90 |
| 8 | 9.57 | NA | 7.66 | 7.93 | 8.13 | NA | 7.21 |
| 9 | 0.30 | 0.28 | 0.24 | 0.30 | 0.29 | 0.29 | 0.30 |
| 10 | 1.09 | 0.97 | 0.92 | 1.07 | 1.09 | 1.07 | 1.05 |
| 11 | 2.62 | 2.41 | 2.31 | 2.67 | 2.62 | 2.59 | 2.59 |
| 12 | 0.40 | 0.41 | 0.35 | 0.41 | 0.39 | 0.39 | 0.41 |
| 13 | 56.50 | 21.10 | 45.20 | 44.40 | 47.10 | 43.50 | 55.90 |
| 14 | 65.00 | 37.50 | NA | 51.70 | 49.10 | 46.40 | NA |
| 15 | 2.91 | 1.02 | 1.37 | 2.33 | 2.23 | 2.14 | 2.85 |
| 16 | 4.20 | 1.00 | 1.40 | 2.60 | 2.60 | 1.00 | 2.60 |
| 17 | 0.51 | 0.25 | NA | 0.26 | 0.35 | 0.32 | NA |
| 18 | 90.80 | 124.40 | 122.00 | NA | 122.00 | NA | 102.60 |
| 19 | 148.00 | 170.00 | 157.00 | 170.00 | 167.40 | 170.00 | 158.80 |
| 20 | 84.00 | 79.90 | 99.00 | 122.50 | 108.00 | 87.00 | 97.00 |
| 21 | 57.20 | 45.60 | 35.00 | NA | 48.00 | NA | 56.20 |
| 22 | 1.00 | 9.20 | 5.00 | 19.20 | 14.62 | NA | 2.80 |
| 23 | 2.45 | 3.96 | 3.91 | 4.75 | 4.12 | NA | 3.24 |
| 24 | 9.90 | 7.82 | 9.68 | 11.07 | 10.17 | 9.98 | 9.94 |
| 25 | 9.49 | 10.26 | 7.88 | 7.97 | 8.42 | 8.12 | 7.61 |
| 26 | 1.41 | 1.05 | 1.59 | 1.79 | 1.60 | 1.61 | 1.70 |
| 27 | 1.23 | 0.87 | 1.44 | 1.68 | 1.47 | 1.51 | 1.57 |
| 28 | 0.64 | 0.42 | 0.30 | 0.35 | 0.44 | 0.43 | 0.56 |
| 29 | 45.30 | 56.30 | 31.50 | 32.40 | 35.40 | 36.70 | 36.90 |
| 30 | 24.00 | 48.70 | 52.00 | 47.60 | 45.00 | NA | 35.20 |
| 31 | 127.20 | 145.50 | 119.20 | 196.80 | 140.50 | 146.20 | 157.20 |

Table 24. Provided are the values of each of the parameters measured in Barley accessions (1-7) according to the correlation identifications (see Table 23). “NA” = not available.

TABLE 25
Barley accessions (8-14), additional measured parameters

| Corr. | Line | | | | | | |
|---|---|---|---|---|---|---|---|
| ID | Line-8 | Line-9 | Line-10 | Line-11 | Line-12 | Line-13 | Line-14 |
| 1 | 16.70 | 5.60 | 5.30 | 18.30 | 4.00 | 8.80 | 4.80 |
| 2 | 61.30 | 50.00 | 51.70 | 56.50 | 54.00 | 50.40 | 56.80 |
| 3 | 0.05 | 0.06 | 0.05 | 0.06 | 0.06 | 0.06 | 0.05 |
| 4 | 44.60 | 9.70 | 38.20 | 46.70 | 42.30 | 11.60 | 9.30 |
| 5 | 4.13 | 3.47 | 3.15 | 1.88 | 3.35 | 3.60 | 3.24 |
| 6 | 91.90 | 99.10 | 67.00 | 60.20 | 87.60 | 71.80 | 76.70 |
| 7 | 82.90 | 56.80 | 64.10 | 54.20 | 73.20 | 49.50 | 47.60 |
| 8 | 5.65 | 7.94 | 8.55 | 10.59 | 7.44 | 7.36 | 9.60 |
| 9 | 0.33 | 0.29 | 0.30 | 0.28 | 0.30 | 0.28 | 0.32 |
| 10 | 1.15 | 1.09 | 1.08 | 0.88 | 1.03 | 0.96 | 1.12 |
| 11 | 2.78 | 2.66 | 2.63 | 2.28 | 2.54 | 2.37 | 2.71 |
| 12 | 0.42 | 0.40 | 0.39 | 0.45 | 0.42 | 0.41 | 0.41 |
| 13 | 58.30 | 56.00 | 59.10 | 27.30 | 55.90 | 61.50 | 50.80 |
| 14 | 78.20 | 79.90 | 54.30 | 46.40 | 71.90 | 56.20 | 61.60 |
| 15 | 3.47 | 2.60 | 2.84 | 1.51 | 2.84 | 2.98 | 2.85 |
| 16 | 1.00 | 5.00 | 3.00 | 1.00 | 1.00 | 2.20 | 3.00 |
| 17 | 0.45 | 0.51 | 0.41 | 0.40 | 0.45 | 0.48 | 0.50 |
| 18 | 111.60 | 86.80 | 106.20 | 117.80 | 111.60 | 85.40 | 90.00 |
| 19 | 156.20 | 159.60 | 157.00 | 162.20 | 159.60 | 157.00 | 150.50 |
| 20 | 104.00 | 70.80 | 98.10 | 57.90 | 94.50 | 73.20 | 78.70 |
| 21 | 44.60 | 72.80 | 50.80 | 44.40 | 46.00 | 71.60 | 61.50 |
| 22 | 6.30 | 1.20 | 2.10 | 10.00 | 2.60 | 1.62 | 1.00 |
| 23 | 3.82 | 2.30 | 3.60 | 3.83 | 3.63 | 2.43 | 2.26 |
| 24 | 9.89 | 9.58 | 11.19 | 8.76 | 10.49 | 10.83 | 11.23 |
| 25 | 6.39 | 7.73 | 8.45 | 10.55 | 7.60 | 7.87 | 9.42 |
| 26 | 1.93 | 1.59 | 1.71 | 1.17 | 1.75 | 1.72 | 1.58 |
| 27 | 1.83 | 1.50 | 1.57 | 0.96 | 1.63 | 1.63 | 1.43 |
| 28 | 0.52 | 0.64 | 0.51 | 0.53 | 0.55 | 0.61 | 0.62 |
| 29 | 32.10 | 48.50 | 29.80 | 50.80 | 32.40 | 26.80 | 42.40 |
| 30 | 38.50 | 21.50 | 36.10 | 57.20 | 42.20 | 19.10 | 21.60 |
| 31 | 178.60 | 155.90 | 131.10 | 114.50 | 160.80 | 121.30 | 124.30 |

Table 25. Provided are the values of each of the parameters measured in Barley accessions (8-14) according to the correlation identifications (see Table 23).

TABLE 26
Barley accessions (15-21), additional measured parameters

| Corr. | Line | | | | | | |
|---|---|---|---|---|---|---|---|
| ID | Line-15 | Line-16 | Line-17 | Line-18 | Line-19 | Line-20 | Line-21 |
| 1 | 29.50 | 5.00 | 3.70 | 11.40 | 5.10 | 4.10 | 6.60 |
| 2 | 58.00 | 51.40 | 58.10 | 53.40 | 48.70 | 39.50 | 42.00 |
| 3 | 0.05 | 0.04 | 0.05 | 0.04 | 0.06 | 0.05 | 0.05 |
| 4 | 47.60 | 30.90 | NA | 35.50 | 38.40 | NA | 41.60 |
| 5 | 3.12 | 1.69 | 1.66 | 3.50 | 1.16 | 2.95 | 1.36 |
| 6 | 81.10 | 77.90 | 68.20 | 70.70 | 54.10 | 48.70 | 64.50 |
| 7 | 66.50 | 77.50 | 81.60 | 67.90 | 81.10 | 66.70 | 91.80 |
| 8 | 6.23 | NA | NA | 8.57 | NA | 6.26 | NA |
| 9 | 0.34 | 0.27 | 0.30 | 0.30 | 0.26 | 0.24 | 0.24 |
| 10 | 1.22 | 0.89 | 0.96 | 1.08 | 0.83 | 0.85 | 0.94 |
| 11 | 2.90 | 2.28 | 2.42 | 2.65 | 2.16 | 2.16 | 2.45 |
| 12 | 0.41 | 0.42 | 0.44 | 0.40 | 0.42 | 0.39 | 0.36 |
| 13 | 45.50 | 24.80 | 21.10 | 59.70 | 17.50 | 63.20 | 19.90 |
| 14 | 64.80 | 56.40 | 49.70 | 55.00 | 40.30 | NA | NA |
| 15 | 2.39 | 1.21 | 1.18 | 2.93 | 0.83 | 2.38 | 0.78 |
| 16 | 1.00 | 1.00 | 3.80 | 3.80 | 1.00 | 3.40 | 1.00 |
| 17 | 0.44 | 0.36 | 0.33 | 0.40 | 0.29 | NA | NA |
| 18 | 113.20 | 113.40 | 98.50 | 109.60 | 119.40 | 98.80 | 119.40 |
| 19 | 158.00 | 170.00 | 170.00 | 155.20 | 170.00 | 156.20 | 170.00 |
| 20 | 90.70 | 64.30 | 82.70 | 94.10 | 63.50 | 102.10 | 94.80 |
| 21 | 44.80 | 56.60 | 71.50 | 45.60 | 50.60 | 57.40 | 50.60 |
| 22 | 17.00 | 3.00 | 1.00 | 3.80 | 4.20 | 1.00 | 4.62 |
| 23 | 3.89 | 3.46 | NA | 3.60 | 3.64 | NA | 3.74 |
| 24 | 7.89 | 9.15 | 8.57 | 11.30 | 7.04 | 8.37 | 7.28 |
| 25 | 6.68 | 12.05 | 10.74 | 8.60 | 8.94 | 6.03 | 10.99 |
| 26 | 1.52 | 1.03 | 1.10 | 1.72 | 1.08 | 1.75 | 0.90 |
| 27 | 1.45 | 0.88 | 0.92 | 1.56 | 0.92 | 1.67 | 0.76 |
| 28 | 0.55 | 0.50 | 0.45 | 0.51 | 0.39 | 0.42 | 0.41 |
| 29 | 39.70 | 71.30 | 65.40 | 33.30 | 82.50 | 32.90 | 73.10 |
| 30 | 59.80 | 62.50 | 31.20 | 34.00 | 78.90 | 26.50 | 69.90 |
| 31 | 147.70 | 155.40 | 149.80 | 138.60 | 135.20 | 115.50 | 156.30 |

Table 26. Provided are the values of each of the parameters measured in Barley accessions (15-21) according to the correlation identifications (see Table 23).

TABLE 27
Barley accessions (22-28), additional measured parameters

| Corr. | Line | | | | | | |
|---|---|---|---|---|---|---|---|
| ID | Line-22 | Line-23 | Line-24 | Line-25 | Line-26 | Line-27 | Line-28 |
| 1 | 3.50 | 7.30 | 31.10 | NA | NA | 11.10 | 21.70 |
| 2 | 18.60 | 42.60 | 39.70 | 24.40 | 28.40 | 28.40 | 23.50 |
| 3 | 0.03 | 0.06 | 0.05 | 0.05 | 0.04 | 0.05 | 0.05 |
| 4 | 174.80 | 8.40 | 51.80 | NA | NA | 38.50 | 38.80 |
| 5 | 0.90 | 3.09 | 1.22 | 0.91 | 0.92 | 1.08 | 0.95 |
| 6 | 33.60 | 33.20 | 52.10 | 33.30 | 47.70 | 52.80 | 52.50 |
| 7 | 50.20 | 45.20 | 67.20 | 43.40 | 79.50 | 61.10 | 59.70 |
| 8 | 9.74 | 9.06 | 8.69 | 8.90 | 10.13 | 10.61 | 9.60 |
| 9 | 0.25 | 0.25 | 0.25 | 0.27 | 0.25 | 0.25 | 0.24 |
| 10 | 1.11 | 0.88 | 0.96 | 1.20 | 1.07 | 1.08 | 1.11 |
| 11 | 2.65 | 2.19 | 2.44 | 2.90 | 2.62 | 2.66 | 2.68 |
| 12 | 0.31 | 0.39 | 0.37 | 0.32 | 0.32 | 0.33 | 0.31 |
| 13 | 16.30 | 60.50 | 17.50 | 12.00 | 20.00 | 20.00 | 17.00 |
| 14 | NA | NA | NA | NA | NA | NA | NA |
| 15 | 0.31 | 2.43 | 0.67 | 0.31 | 0.56 | 0.56 | 0.38 |
| 16 | 1.00 | 3.00 | 1.00 | 1.00 | 1.00 | 1.00 | 1.00 |
| 17 | NA | NA | NA | NA | NA | NA | NA |
| 18 | 95.60 | 90.00 | 111.00 | 83.60 | 122.00 | 111.40 | 109.20 |
| 19 | 133.00 | 161.40 | 145.80 | 140.20 | 153.00 | 143.00 | 140.40 |
| 20 | 90.50 | 88.50 | 90.10 | 92.50 | 99.10 | 91.70 | 94.70 |
| 21 | 37.40 | 71.40 | 34.80 | 56.60 | 31.00 | 31.60 | 31.20 |
| 22 | 1.88 | 1.00 | 15.50 | NA | NA | 7.10 | 15.70 |
| 23 | 5.01 | 2.12 | 3.97 | NA | NA | 3.67 | 3.68 |
| 24 | 4.98 | 11.56 | 6.52 | 5.39 | 8.16 | 8.08 | 5.73 |
| 25 | 8.58 | 9.02 | 8.63 | 7.96 | 10.20 | 10.52 | 8.35 |
| 26 | 0.79 | 1.68 | 1.01 | 0.88 | 1.05 | 1.01 | 0.90 |
| 27 | 0.68 | 1.53 | 0.88 | 0.81 | 0.97 | 0.92 | 0.78 |
| 28 | 0.41 | 0.42 | 0.44 | 0.44 | 0.38 | 0.46 | 0.47 |
| 29 | 88.10 | 20.50 | 48.50 | 51.30 | 65.80 | 55.80 | 65.60 |
| 30 | 55.20 | 14.00 | 48.50 | NA | NA | 69.00 | 76.40 |
| 31 | 83.80 | 78.40 | 119.30 | 76.70 | 127.20 | 113.90 | 112.20 |

Table 27. Provided are the values of each of the parameters measured in Barley accessions (22-28) according to the correlation identifications (see Table 23).

TABLE 28
Barley accessions (29-35), additional measured parameters

| Corr. | Line | | | | | | |
|---|---|---|---|---|---|---|---|
| ID | Line-29 | Line-30 | Line-31 | Line-32 | Line-33 | Line-34 | Line-35 |
| 1 | 3.90 | 16.50 | 3.20 | 10.50 | 26.50 | 15.10 | 4.30 |
| 2 | 45.70 | 26.50 | 23.10 | 27.60 | 29.40 | 27.70 | 42.10 |
| 3 | 0.05 | 0.04 | 0.04 | 0.05 | 0.04 | 0.06 | 0.05 |
| 4 | 10.60 | 29.60 | 14.30 | 37.70 | 39.20 | 34.50 | 41.20 |
| 5 | 2.99 | 0.85 | 0.85 | 0.89 | 1.10 | 1.09 | 2.93 |
| 6 | 84.00 | 47.00 | 48.90 | 47.30 | 48.80 | 46.60 | 89.20 |
| 7 | 45.40 | 60.40 | 67.40 | 67.10 | 61.30 | 59.00 | 71.30 |
| 8 | 7.97 | 8.24 | 9.14 | 8.71 | 9.82 | 10.00 | 8.47 |
| 9 | 0.30 | 0.25 | 0.24 | 0.29 | 0.33 | 0.29 | 0.30 |
| 10 | 1.13 | 1.09 | 1.06 | 1.23 | 1.33 | 1.27 | 1.16 |
| 11 | 2.77 | 2.66 | 2.57 | 2.93 | 3.16 | 2.99 | 2.97 |
| 12 | 0.39 | 0.32 | 0.32 | 0.34 | 0.34 | 0.32 | 0.39 |
| 13 | 56.80 | 18.20 | 13.50 | 12.80 | 14.50 | 13.70 | 54.80 |
| 14 | NA | NA | NA | NA | NA | NA | NA |
| 15 | 2.63 | 0.46 | 0.31 | 0.37 | 0.43 | 0.39 | 2.14 |
| 16 | 2.20 | 1.00 | 1.00 | 1.00 | 1.00 | 1.00 | 1.00 |
| 17 | NA | NA | NA | NA | NA | NA | NA |
| 18 | 89.20 | 104.00 | 89.20 | 97.80 | 113.60 | 109.20 | 110.40 |
| 19 | 151.60 | 140.20 | 140.40 | 140.40 | 145.80 | 143.00 | 156.20 |
| 20 | 66.70 | 105.80 | 112.20 | 103.80 | 105.70 | 107.40 | 100.60 |
| 21 | 62.40 | 36.20 | 51.20 | 42.60 | 32.20 | 33.80 | 45.80 |
| 22 | 1.00 | 12.30 | 1.10 | 8.50 | 18.67 | 11.00 | 2.50 |
| 23 | 2.37 | 3.42 | 2.67 | 3.64 | 3.65 | 3.51 | 3.74 |
| 24 | 8.94 | 4.69 | 5.47 | 5.92 | 6.16 | 6.88 | 11.03 |
| 25 | 7.75 | 6.85 | 8.51 | 8.32 | 9.80 | 9.28 | 8.77 |
| 26 | 1.52 | 0.91 | 0.85 | 0.96 | 0.82 | 0.94 | 1.60 |
| 27 | 1.37 | 0.81 | 0.75 | 0.83 | 0.74 | 0.88 | 1.53 |
| 28 | 0.65 | 0.44 | 0.42 | 0.41 | 0.41 | 0.44 | 0.56 |
| 29 | 44.90 | 77.10 | 85.00 | 67.50 | 50.90 | 55.70 | 38.60 |
| 30 | 26.50 | 76.60 | 35.30 | 75.30 | 68.50 | 66.80 | 55.80 |
| 31 | 129.30 | 107.40 | 116.30 | 114.40 | 104.50 | 105.60 | 160.50 |

Table 28. Provided are the values of each of the parameters measured in Barley accessions (29-35) according to the correlation identifications (see Table 23).

TABLE 29
Barley accessions (36-42), additional measured parameters

| Corr. | Line | | | | | | |
|---|---|---|---|---|---|---|---|
| ID | Line-36 | Line-37 | Line-38 | Line-39 | Line-40 | Line-41 | Line-42 |
| 1 | 9.50 | 4.70 | NA | 4.60 | 21.50 | 21.20 | 14.50 |
| 2 | 26.40 | 19.80 | 31.00 | 47.80 | 32.60 | 36.90 | 24.20 |
| 3 | 0.06 | 0.03 | 0.04 | 0.06 | 0.05 | NA | 0.06 |
| 4 | 23.80 | 11.90 | NA | 8.30 | 55.40 | 55.90 | 31.30 |
| 5 | 0.74 | 1.15 | 1.32 | 3.51 | 1.45 | 1.40 | 0.93 |
| 6 | 43.50 | 27.40 | 44.60 | 69.90 | 44.20 | 50.50 | 44.00 |
| 7 | 48.60 | 31.50 | 59.30 | 43.10 | 72.40 | 91.80 | 63.40 |
| 8 | 8.36 | 12.49 | 11.03 | 8.21 | 7.97 | 10.44 | 8.66 |
| 9 | 0.30 | 0.26 | 0.26 | 0.32 | 0.23 | 0.28 | 0.30 |
| 10 | 1.30 | 1.11 | 1.10 | 1.21 | 0.95 | 1.09 | 1.28 |
| 11 | 3.17 | 2.74 | 2.69 | 2.93 | 2.38 | 2.67 | 3.05 |
| 12 | 0.31 | 0.32 | 0.33 | 0.39 | 0.33 | 0.36 | 0.33 |
| 13 | 11.30 | 16.10 | 21.70 | 58.20 | 34.20 | 20.80 | 11.50 |
| 14 | NA | NA | NA | NA | NA | NA | NA |
| 15 | 0.24 | 0.32 | 0.66 | 2.82 | 0.94 | 0.75 | 0.31 |
| 16 | 1.00 | 1.00 | 1.00 | 3.80 | 1.00 | 1.40 | 1.00 |
| 17 | NA | NA | NA | NA | NA | NA | NA |
| 18 | 108.40 | 91.60 | 115.60 | 84.20 | 118.00 | 116.80 | 111.00 |
| 19 | 140.40 | 133.00 | 145.80 | 148.00 | 153.80 | 144.20 | 140.20 |
| 20 | 106.30 | 78.30 | 107.60 | 77.60 | 93.90 | 126.10 | 107.10 |
| 21 | 32.00 | 41.40 | 30.20 | 63.80 | 36.00 | 27.40 | 29.20 |
| 22 | 7.40 | 1.50 | NA | 0.81 | 14.80 | 15.50 | 10.70 |
| 23 | 3.17 | 2.50 | NA | 2.12 | 4.03 | NA | 3.44 |
| 24 | 5.17 | 7.72 | 8.37 | 7.41 | 7.83 | 8.38 | 5.09 |
| 25 | 7.81 | 11.96 | 11.32 | 7.52 | 8.33 | 10.12 | 8.27 |
| 26 | 0.91 | 0.92 | 0.94 | 1.31 | 1.24 | 1.06 | 0.82 |
| 27 | 0.79 | 0.75 | 0.86 | 1.16 | 1.15 | 0.99 | 0.72 |
| 28 | 0.47 | 0.48 | 0.43 | 0.62 | 0.37 | 0.36 | 0.41 |
| 29 | 64.70 | 50.90 | 48.40 | 32.00 | 43.40 | 45.80 | 73.50 |
| 30 | 69.30 | 32.20 | NA | 15.80 | 66.40 | 75.10 | 71.20 |
| 31 | 92.00 | 58.80 | 110.90 | 113.10 | 116.60 | 149.90 | 107.40 |

Table 29. Provided are the values of each of the parameters measured in Barley accessions (36-42) according to the correlation identifications (see Table 23).

TABLE 30
Barley accessions (43-49), additional measured parameters

| Corr. | Line | | | | | | |
|---|---|---|---|---|---|---|---|
| ID | Line-43 | Line-44 | Line-45 | Line-46 | Line-47 | Line-48 | Line-49 |
| 1 | 17.00 | 12.50 | 9.90 | 10.80 | 10.80 | 15.00 | 16.10 |
| 2 | 27.80 | 23.30 | 31.80 | 27.40 | 25.70 | 24.90 | 26.30 |
| 3 | 0.04 | 0.03 | 0.05 | 0.05 | 0.04 | 0.07 | 0.05 |
| 4 | 32.90 | 36.00 | 42.60 | 19.50 | 26.20 | 39.20 | 49.90 |
| 5 | 0.96 | 0.82 | 1.34 | 1.16 | 1.18 | 0.94 | 1.05 |
| 6 | 50.10 | 40.40 | 55.90 | 33.60 | 31.70 | 50.70 | 44.60 |
| 7 | 69.40 | 58.50 | 61.60 | 42.30 | 41.20 | 71.40 | 73.00 |
| 8 | 9.91 | 8.51 | 10.18 | 11.82 | 10.58 | 9.42 | 10.04 |
| 9 | 0.26 | 0.29 | 0.33 | 0.30 | 0.27 | 0.24 | 0.29 |
| 10 | 1.14 | 1.25 | 1.32 | 1.25 | 1.13 | 1.06 | 1.25 |
| 11 | 2.77 | 2.94 | 3.18 | 3.06 | 2.75 | 2.62 | 2.99 |
| 12 | 0.33 | 0.32 | 0.36 | 0.34 | 0.32 | 0.32 | 0.33 |
| 13 | 17.60 | 10.70 | 16.00 | 14.60 | 17.40 | 18.90 | 14.60 |
| 14 | NA | NA | NA | NA | NA | NA | NA |
| 15 | 0.47 | 0.25 | 0.53 | 0.43 | 0.45 | 0.47 | 0.40 |
| 16 | 1.00 | 1.00 | 1.00 | 1.00 | 1.00 | 1.00 | 1.00 |
| 17 | NA | NA | NA | NA | NA | NA | NA |
| 18 | 111.00 | 111.00 | 111.00 | 99.20 | 105.80 | 111.00 | 117.20 |
| 19 | 146.00 | 140.20 | 143.00 | 133.00 | 133.00 | 143.00 | 148.20 |
| 20 | 106.70 | 96.30 | 99.80 | 91.80 | 80.80 | 105.60 | 101.90 |
| 21 | 35.00 | 29.20 | 32.00 | 33.80 | 27.20 | 32.00 | 31.00 |
| 22 | 15.00 | 11.70 | 6.90 | 5.50 | 10.30 | 12.40 | 13.33 |
| 23 | 3.52 | 3.60 | 3.75 | 2.94 | 3.29 | 3.68 | 3.84 |
| 24 | 5.03 | 4.88 | 8.33 | 7.43 | 6.71 | 6.61 | 7.10 |
| 25 | 8.45 | 7.95 | 10.21 | 11.52 | 10.17 | 9.09 | 9.79 |
| 26 | 0.76 | 0.82 | 1.04 | 0.91 | 0.92 | 0.97 | 0.95 |
| 27 | 0.65 | 0.72 | 0.96 | 0.76 | 0.77 | 0.94 | 0.85 |
| 28 | 0.42 | 0.41 | 0.48 | 0.44 | 0.46 | 0.42 | 0.38 |
| 29 | 79.30 | 61.70 | 49.10 | 55.10 | 56.70 | 62.20 | 70.90 |
| 30 | 86.70 | 90.70 | 71.40 | 58.50 | 90.90 | 87.50 | 108.50 |
| 31 | 119.50 | 98.90 | 117.50 | 75.80 | 73.00 | 122.10 | 117.60 |

Table 30. Provided are the values of each of the parameters measured in Barley accessions (43-49) according to the correlation identifications (see Table 23).

TABLE 31
Barley accessions (50-55), additional measured parameters

| Corr. | Line | | | | | |
|---|---|---|---|---|---|---|
| ID | Line-50 | Line-51 | Line-52 | Line-53 | Line-54 | Line-55 |
| 1 | 31.10 | NA | 15.50 | 6.90 | 7.10 | 6.70 |
| 2 | 30.10 | 24.80 | 26.50 | 21.50 | 43.70 | 47.90 |
| 3 | NA | 0.04 | 0.04 | 0.05 | 0.05 | 0.05 |
| 4 | 37.90 | NA | 38.70 | 29.90 | 14.60 | 67.50 |
| 5 | 1.01 | 1.01 | 0.84 | 0.75 | 3.71 | 2.78 |
| 6 | 36.90 | 26.20 | 57.50 | 47.80 | 43.70 | 68.60 |
| 7 | 50.70 | 52.90 | 73.30 | 65.80 | 56.30 | NA |
| 8 | 9.40 | 11.67 | 10.60 | 9.72 | 8.26 | 9.22 |
| 9 | 0.31 | 0.33 | 0.26 | 0.25 | 0.25 | 0.28 |
| 10 | 1.26 | 1.36 | 1.17 | 1.10 | 0.88 | 1.05 |
| 11 | 3.06 | 3.24 | 2.90 | 2.65 | 2.24 | 2.56 |
| 12 | 0.35 | 0.33 | 0.33 | 0.32 | 0.40 | 0.38 |
| 13 | 13.60 | 13.10 | 19.80 | 17.20 | 65.40 | 43.80 |
| 14 | NA | NA | NA | NA | 34.60 | 54.00 |
| 15 | 0.40 | 0.32 | 0.50 | 0.38 | 2.64 | 2.06 |
| 16 | 1.00 | 1.00 | 1.00 | 1.00 | 5.00 | 1.80 |
| 17 | NA | NA | NA | NA | 0.35 | NA |
| 18 | 113.00 | 122.60 | 111.00 | 107.60 | 88.40 | 128.00 |
| 19 | 143.60 | 152.00 | 142.40 | 140.40 | 157.00 | 170.00 |
| 20 | 95.30 | 80.30 | 105.00 | 98.40 | 93.80 | 90.30 |
| 21 | 30.60 | 29.40 | 31.40 | 32.80 | 68.60 | 42.00 |
| 22 | 20.20 | NA | 18.30 | 6.60 | 2.50 | 3.10 |
| 23 | NA | NA | 3.66 | 3.41 | 2.18 | 4.23 |
| 24 | 6.86 | 8.62 | 7.16 | 5.75 | 10.74 | 10.04 |
| 25 | 9.38 | 11.73 | 10.01 | 8.78 | 8.54 | 8.59 |
| 26 | 0.94 | 0.97 | 0.94 | 0.89 | 1.68 | 1.57 |
| 27 | 0.87 | 0.87 | 0.86 | 0.77 | 1.49 | 1.45 |
| 28 | 0.42 | 0.33 | 0.44 | 0.42 | 0.44 | NA |
| 29 | 39.30 | 45.00 | 74.60 | 74.50 | 20.80 | 38.00 |
| 30 | 64.60 | NA | 113.50 | 95.60 | 15.60 | 43.20 |
| 31 | 87.70 | 79.10 | 130.80 | 113.60 | 100.00 | NA |

Table 31. Provided are the values of each of the parameters measured in Barley accessions (50-55) according to the correlation identifications (see Table 23).

TABLE 32
Correlation between the expression level of the selected
polynucleotides of the invention and their homologues in
specific tissues or developmental stages and the phenotypic
performance across 27 Barley Hordeum spontaneum accessions

| Gene | | | Exp. | Corr. | Gene | | | Exp. | Corr. |
|---|---|---|---|---|---|---|---|---|---|
| Name | R | P value | set | ID | Name | R | P value | set | ID |
| LBY465 | 0.72 | 3.87E−05 | 1 | 19 | LBY465 | 0.79 | 8.28E−06 | 2 | 27 |

Table 32. Provided are the correlations (R) and p-values (P) between the expression levels of selected genes of some embodiments of the invention in various tissues or developmental stages (Expression sets) and the phenotypic performance in various yield (seed yield, oil yield, oil content), biomass, growth rate and/or vigor components according to the Corr. ID (correlation vector) specified in Table 23;
Exp. Set = expression set specified in Table 22.

TABLE 33
Correlation between the expression level of the selected
polynucleotides of the invention and their homologues in
specific tissues or developmental stages and the phenotypic
performance across 19 Barley Hordeum vulgare accessions

| Gene Name | R | P value | Exp. set | Corr. ID |
|---|---|---|---|---|
| LBY508 | 0.77 | 1.87E−03 | 3 | 8 |

Table 33. Provided are the correlations (R) and p-values (P) between the expression levels of selected genes of some embodiments of the invention in various tissues or developmental stages (Expression sets) and the phenotypic performance in various yield (seed yield, oil yield, oil content), biomass, growth rate and/or vigor components according to the Corr. ID (correlation vector) specified in Table 23; Exp. Set = expression set specified in Table 22.

### Example 3

### Production of Arabidopsis Transcriptome and High Throughput Correlation Analysis of Yield, Biomass and/or Vigor Related Parameters Using 44K Arabidopsis Full Genome Oligonucleotide Micro-Array

[0784] To produce a high throughput correlation analysis, the present inventors utilized an Arabidopsis thaliana oligonucleotide micro-array, produced by Agilent Technologies [chem. (dot) agilent (dot) com/Scripts/PDS (dot) asp?1Page=50879]. The array oligonucleotide represents about 40,000 A. thaliana genes and transcripts designed based on data from the TIGR ATH1 v.5 database and Arabidopsis MPSS (University of Delaware) databases. To define correlations between the levels of RNA expression and yield, biomass components or vigor related parameters, various plant characteristics of 15 different Arabidopsis ecotypes were analyzed. Among them, nine ecotypes encompassing the observed variance were selected for RNA expression analysis. The correlation between the RNA levels and the characterized parameters was analyzed using Pearson correlation test [davidmlane (dot) com/hyperstat/A34739 (dot) html].

[0785] Experimental Procedures

[0786] The Arabidopsis plants were grown in a greenhouse under normal (standard) and controlled growth conditions which included a temperature of 22° C., and a fertilizer [N:P:K fertilizer (20:20:20; weight ratios) of nitrogen (N), phosphorus (P) and potassium (K)].

[0787] Analyzed Arabidopsis tissues—Five tissues at different developmental stages including root, leaf, flower at anthesis, seed at 5 days after flowering (DAF) and seed at 12 DAF, representing different plant characteristics, were sampled and RNA was extracted as described as described hereinabove under “GENERAL EXPERIMENTAL AND BIOINFORMATICS METHODS”. For convenience, each micro-array expression information tissue type has received a Set ID as summarized in Table 34 below.

TABLE 34
Tissues used for Arabidopsis transcriptome expression sets

| Expression Set | Set ID |
|---|---|
| Leaf | 1 |
| Root | 2 |
| Seed 5 DAF | 3 |
| Flower | 4 |
| Seed 12 DAF | 5 |

Table 34: Provided are the identification (ID) digits of each of the Arabidopsis expression sets (1-5).
DAF = days after flowering.

[0788] Yield components and vigor related parameters assessment—Eight out of the nine Arabidopsis ecotypes were used in each of 5 repetitive blocks (named A, B, C, D and E), each containing 20 plants per plot. The plants were grown in a greenhouse at controlled normal growth conditions in 22° C., and the N:P:K [nitrogen (N), phosphorus (P) and potassium (K)] fertilizer (20:20:20; weight ratios) was added. During this time data was collected, documented and analyzed. Additional data was collected through the seedling stage of plants grown in a tissue culture in vertical grown transparent agar plates. Most of chosen parameters were analyzed by digital imaging.

[0789] Digital imaging in Tissue culture (seedling assay)—A laboratory image acquisition system was used for capturing images of plantlets sawn in square agar plates. The image acquisition system consists of a digital reflex camera (Canon EOS 300D) attached to a 55 mm focal length lens (Canon EF-S series), mounted on a reproduction device (Kaiser RS), which included 4 light units (4×150 Watts light bulb) and located in a darkroom.

[0790] Digital imaging in Greenhouse—The image capturing process was repeated every 3-4 days starting at day 7 till day 30. The same camera attached to a 24 mm focal length lens (Canon EF series), placed in a custom made iron mount, was used for capturing images of larger plants sawn in white tubs in an environmental controlled greenhouse. The white tubs were square shape with measurements of 36×26.2 cm and 7.5 cm deep. During the capture process, the tubs were placed beneath the iron mount, while avoiding direct sun light and casting of shadows. This process was repeated every 3-4 days for up to 30 days.

[0791] An image analysis system was used, which consists of a personal desktop computer (Intel P4 3.0 GHz processor) and a public domain program—ImageJ 1.37, Java based image processing program, which was developed at the U.S. National Institutes of Health and is freely available on the internet at rsbweb (dot) nih (dot) gov/. Images were captured in resolution of 6 Mega Pixels (3072×2048 pixels) and stored in a low compression JPEG (Joint Photographic Experts Group standard) format. Next, analyzed data was saved to text files and processed using the JMP statistical analysis software (SAS institute).

[0792] Leaf analysis—Using the digital analysis leaves data was calculated, including leaf number, area, perimeter, length and width. On day 30, 3-4 representative plants were chosen from each plot of blocks A, B and C. The plants were dissected, each leaf was separated and was introduced between two glass trays, a photo of each plant was taken and the various parameters (such as leaf total area, laminar length etc.) were calculated from the images. The blade circularity was calculated as laminar width divided by laminar length.

[0793] Root analysis—During 17 days, the different ecotypes were grown in transparent agar plates. The plates were photographed every 3 days starting at day 7 in the photography room and the roots development was documented (see examples in FIGS. 3A-F). The growth rate of root coverage was calculated according to Formula 28 above.

[0794] Vegetative growth rate analysis—was calculated according to Formula 7 above. The analysis was ended with the appearance of overlapping plants.

[0795] For comparison between ecotypes the calculated rate was normalized using plant developmental stage as represented by the number of true leaves. In cases where plants with 8 leaves had been sampled twice (for example at day 10 and day 13), only the largest sample was chosen and added to the Anova comparison.

[0796] Seeds in siliques analysis—On day 70, 15-17 siliques were collected from each plot in blocks D and E. The chosen siliques were light brown color but still intact. The siliques were opened in the photography room and the seeds were scatter on a glass tray, a high resolution digital picture was taken for each plot. Using the images the number of seeds per silique was determined.

[0797] Seeds average weight—At the end of the experiment all seeds from plots of blocks A-C were collected. An average weight of 0.02 grams was measured from each sample, the seeds were scattered on a glass tray and a picture was taken. Using the digital analysis, the number of seeds in each sample was calculated.

[0798] Oil percentage in seeds—At the end of the experiment all seeds from plots of blocks A-C were collected. Columbia seeds from 3 plots were mixed grounded and then mounted onto the extraction chamber. 210 ml of n-Hexane (Cat No. 080951 Biolab Ltd.) were used as the solvent.

[0799] The extraction was performed for 30 hours at medium heat 50° C. Once the extraction has ended the n-Hexane was evaporated using the evaporator at 35° C. and vacuum conditions. The process was repeated twice. The information gained from the Soxhlet extractor (Soxhlet, F. Die gewichtsanalytische Bestimmung des Milchfettes, Polytechnisches J. (Dingier's) 1879, 232, 461) was used to create a calibration curve for the Low Resonance NMR. The content of oil of all seed samples was determined using the Low Resonance NMR (MARAN Ultra-Oxford Instrument) and its MultiQuant software package.

[0800] Silique length analysis—On day 50 from sowing, 30 siliques from different plants in each plot were sampled in block A. The chosen siliques were green-yellow in color and were collected from the bottom parts of a grown plant's stem. A digital photograph was taken to determine silique's length.

[0801] Dry weight and seed yield—On day 80 from sowing, the plants from blocks A-C were harvested and left to dry at 30° C. in a drying chamber. The vegetative portion above ground was separated from the seeds. The total weight of the vegetative portion above ground and the seed weight of each plot were measured and divided by the number of plants.

[0802] Dry weight (vegetative biomass)=total weight of the vegetative portion above ground (excluding roots) after drying at 30° C. in a drying chamber; all the above ground biomass that is not seed yield.

[0803] Seed yield per plant=total seed weight per plant (gr.).

[0804] Oil yield—The oil yield was calculated using Formula 29 above.

[0805] Harvest Index (seed)—The harvest index was calculated using Formula 15 (described above).

[0806] Experimental Results

[0807] Nine different Arabidopsis ecotypes were grown and characterized for 18 parameters (named as vectors).

TABLE 35
Arabidopsis correlated parameters (vectors)

| Correlated parameter with | Corr. ID |
|---|---|
| Seeds per Pod [num], under Normal growth conditions | 1 |
| Harvest index, under Normal growth conditions | 2 |
| Seed yield per plant [gr.], under Normal growth conditions | 3 |
| Dry matter per plant [gr.], under Normal growth conditions | 4 |
| Total leaf area per plant [cm²], under Normal growth conditions | 5 |
| Oil % per seed [%], under Normal growth conditions | 6 |
| Oil yield per plant [mg], under Normal growth conditions | 7 |
| Relative root length growth day 13 [cm/day], under Normal | 8 |
| growth conditions | |
| Root length day 7 [cm], under Normal growth conditions | 9 |
| Root length day 13 [cm], under Normal growth conditions | 10 |
| Fresh weight per plant at bolting stage [gr.], under Normal | 11 |
| growth conditions | |
| 1000 Seed weight [gr.], under Normal growth conditions | 12 |
| Vegetative growth rate till 8 true leaves [cm²/day], under | 13 |
| Normal growth conditions | |
| Lamina length [cm], under Normal growth conditions | 14 |
| Lamina width [cm], under Normal growth conditions | 15 |
| Leaf width/length [cm/cm], under Normal growth conditions | 16 |
| Blade circularity [ratio], under Normal growth conditions | 17 |
| Silique length [cm], under Normal growth conditions | 18 |

Table 35. Provided are the Arabidopsis correlated parameters (correlation ID Nos. 1-18)
Abbreviations: Cm = centimeter(s);
gr. = gram(s);
mg = milligram(s).

[0808] The characterized values are summarized in Table 36. Correlation analysis is provided in Table 37 below.

TABLE 36
Measured parameters in Arabidopsis ecotypes

| Line/Corr. | | | | | | | | | |
|---|---|---|---|---|---|---|---|---|---|
| ID | Line-1 | Line-2 | Line-3 | Line-4 | Line-5 | Line-6 | Line-7 | Line-8 | Line-9 |
| 1 | 45.40 | 53.50 | 58.50 | 35.30 | 48.60 | 37.00 | 39.40 | 40.50 | 25.50 |
| 2 | 0.53 | 0.35 | 0.56 | 0.33 | 0.37 | 0.32 | 0.45 | 0.51 | 0.41 |
| 3 | 0.34 | 0.44 | 0.59 | 0.42 | 0.61 | 0.43 | 0.36 | 0.62 | 0.55 |
| 4 | 0.64 | 1.27 | 1.05 | 1.28 | 1.69 | 1.34 | 0.81 | 1.21 | 1.35 |
| 5 | 46.90 | 109.90 | 58.40 | 56.80 | 114.70 | 110.80 | 88.50 | 121.80 | 93.00 |
| 6 | 34.40 | 31.20 | 38.00 | 27.80 | 35.50 | 32.90 | 31.60 | 30.80 | 34.00 |
| 7 | 118.60 | 138.70 | 224.10 | 116.30 | 218.30 | 142.10 | 114.20 | 190.10 | 187.60 |
| 8 | 0.63 | 0.66 | 1.18 | 1.09 | 0.91 | 0.77 | 0.61 | 0.70 | 0.78 |
| 9 | 0.94 | 1.76 | 0.70 | 0.73 | 0.99 | 1.16 | 1.28 | 1.41 | 1.25 |
| 10 | 4.42 | 8.53 | 5.62 | 4.83 | 5.96 | 6.37 | 5.65 | 7.06 | 7.04 |
| 11 | 1.51 | 3.61 | 1.94 | 2.08 | 3.56 | 4.34 | 3.47 | 3.48 | 3.71 |
| 12 | 0.02 | 0.02 | 0.03 | 0.03 | 0.02 | 0.03 | 0.02 | 0.02 | 0.02 |
| 13 | 0.31 | 0.38 | 0.48 | 0.47 | 0.43 | 0.65 | 0.43 | 0.38 | 0.47 |
| 14 | 2.77 | 3.54 | 3.27 | 3.78 | 3.69 | 4.60 | 3.88 | 3.72 | 4.15 |
| 15 | 1.38 | 1.70 | 1.46 | 1.37 | 1.83 | 1.65 | 1.51 | 1.82 | 1.67 |
| 16 | 0.35 | 0.29 | 0.32 | 0.26 | 0.36 | 0.27 | 0.31 | 0.34 | 0.31 |
| 17 | 0.51 | 0.48 | 0.45 | 0.37 | 0.50 | 0.38 | 0.39 | 0.49 | 0.41 |
| 18 | 1.06 | 1.26 | 1.31 | 1.47 | 1.24 | 1.09 | 1.18 | 1.18 | 1.00 |

Table 36. Provided are the values of each of the parameters measured in Arabidopsis ecotypes.

TABLE 37
Correlation between the expression level of selected genes of
some embodiments of the invention in various tissues and the phenotypic
performance under normal conditions across Arabidopsis accessions

| Gene | | | Exp. | Corr. | Gene | | | Exp. | Corr. |
|---|---|---|---|---|---|---|---|---|---|
| Name | R | P value | set | ID | Name | R | P value | set | ID |
| LBY507 | 0.74 | 3.62E−02 | 5 | 12 | LBY507 | 0.86 | 6.02E−03 | 1 | 4 |
| LBY507 | 0.78 | 2.14E−02 | 1 | 5 | LBY507 | 0.92 | 1.10E−03 | 1 | 15 |
| LYD1000 | 0.82 | 1.36E−02 | 5 | 9 | LYD1000 | 0.84 | 8.63E−03 | 5 | 10 |
| LYD1001 | 0.76 | 2.91E−02 | 1 | 3 | | | | | |

Table 37. Provided are the correlations (R) between the expression levels of yield improving genes and their homologues in tissues [leaf, flower, seed and root; Expression sets (Exp)] and the phenotypic performance in various yield, biomass, growth rate and/or vigor components [Correlation (corr.) vector ID] under normal conditions across Arabidopsis accessions.
“Corr. ID”—correlation ID according to the correlated parameters specified in Table 35.
“Exp. Set”—Expression set specified in Table 34.
“R” = Pearson correlation coefficient;
“P” = p value.

### Example 4

### Production of Arabidopsis Transcriptome and High Throughput Correlation Analysis of Normal and Nitrogen Limiting Conditions Using 44K Arabidopsis Oligonucleotide Micro-Array

[0809] In order to produce a high throughput correlation analysis, the present inventors utilized an Arabidopsis oligonucleotide micro-array, produced by Agilent Technologies [chem (dot) agilent (dot) com/Scripts/PDS (dot) asp?1Page=50879]. The array oligonucleotide represents about 44,000 Arabidopsis genes and transcripts. To define correlations between the levels of RNA expression with NUE, ABST, yield components or vigor related parameters various plant characteristics of 14 different Arabidopsis ecotypes were analyzed. Among them, ten ecotypes encompassing the observed variance were selected for RNA expression analysis. The correlation between the RNA levels and the characterized parameters was analyzed using Pearson correlation test [davidmlane (dot) com/hyperstat/A34739 (dot) html].

[0810] Experimental Procedures

[0811] Two tissues of plants [leaves and stems] growing at two different nitrogen fertilization levels (1.5 mM Nitrogen or 6 mM Nitrogen) were sampled and RNA was extracted as described hereinabove under “GENERAL EXPERIMENTAL AND BIOINFORMATICS METHODS”. For convenience, each micro-array expression information tissue type has received a Set ID as summarized in Table 38 below.

TABLE 38
Tissues used for Arabidopsis transcriptome expression sets

| Expression Set | Set ID |
|---|---|
| Leaves at 6 mM Nitrogen fertilization | 1 |
| Leaves at 1.5 mM Nitrogen fertilization | 2 |
| Stems at 1.5 mM Nitrogen fertilization | 3 |
| Stems at 6 mM Nitrogen fertilization | 4 |

Table 38: Provided are the identification (ID) digits of each of the Arabidopsis expression sets.

[0812] Assessment of Arabidopsis yield components and vigor related parameters under different nitrogen fertilization levels—10 Arabidopsis accessions in 2 repetitive plots each containing 8 plants per plot were grown at greenhouse. The growing protocol used was as follows: surface sterilized seeds were sown in Eppendorf tubes containing 0.5× Murashige-Skoog basal salt medium and grown at 23° C. under 12-hour light and 12-hour dark daily cycles for 10 days. Then, seedlings of similar size were carefully transferred to pots filled with a mix of perlite and peat in a 1:1 ratio. Constant nitrogen limiting conditions were achieved by irrigating the plants with a solution containing 1.5 mM inorganic nitrogen in the form of KNO3, supplemented with 2 mM CaCl₂, 1.25 mM KH₂PO₄, 1.50 mM MgSO₄, 5 mM KCl, 0.01 mM H₃BO₃ and microelements, while normal irrigation conditions (Normal Nitrogen conditions) was achieved by applying a solution of 6 mM inorganic nitrogen also in the form of KNO₃, supplemented with 2 mM CaCl₂, 1.25 mM KH₂PO₄, 1.50 mM MgSO₄, 0.01 mM H₃BO₃ and microelements. To follow plant growth, trays were photographed the day nitrogen limiting conditions were initiated and subsequently every 3 days for about 15 additional days. Rosette plant area was then determined from the digital pictures. ImageJ software was used for quantifying the plant size from the digital pictures [rsb (dot) info (dot) nih (dot) gov/ij/] utilizing proprietary scripts designed to analyze the size of rosette area from individual plants as a function of time. The image analysis system included a personal desktop computer (Intel P4 3.0 GHz processor) and a public domain program—ImageJ 1.37 (Java based image processing program, which was developed at the U.S. National Institutes of Health and freely available on the internet [rsbweb (dot) nih (dot) gov/]. Next, analyzed data was saved to text files and processed using the JMP statistical analysis software (SAS institute).

[0813] Data parameters collected are summarized in Table 39, hereinbelow.

TABLE 39
Arabidopsis correlated parameters (vectors)

| | Correlation |
|---|---|
| Correlated parameter with | ID |
| N 6 mM; Seed Yield [gr./plant] | 1 |
| N 6 mM; Harvest Index (ratio) | 2 |
| N 6 mM; 1000 Seeds weight [gr.] | 3 |
| N 6 mM; seed yield/rosette area day at day 10 [gr./cm²] | 4 |
| N 6 mM; seed yield/leaf blade [gr./cm²] | 5 |
| N 1.5 mM; Rosette Area at day 8 [cm²] | 6 |
| N 1.5 mM; Rosette Area at day 10 [cm²] | 7 |
| N 1.5 mM; Leaf Number at day 10 (number) | 8 |
| N 1.5 mM; Leaf Blade Area at day 10 [cm²] | 9 |
| N 1.5 mM; RGR of Rosette Area at day 3 [cm²/day] | 10 |
| N 1.5 mM; t50 Flowering [day] | 11 |
| N 1.5 mM; Dry Weight [gr./plant] | 12 |
| N 1.5 mM; Seed Yield [gr./plant] | 13 |
| N 1.5 mM; Harvest Index (ratio) | 14 |
| N 1.5 mM; 1000 Seeds weight [gr.] | 15 |
| N 1.5 mM; seed yield/rosette area at day 10 [gr./cm²] | 16 |
| N 1.5 mM; seed yield/leaf blade [gr./cm²] | 17 |
| N 1.5 mM; % Seed yield reduction compared to N 6 mM | 18 |
| N 1.5 mM; % Biomass reduction compared to N 6 mM | 19 |
| N 6 mM; Rosette Area at day 8 [cm²] | 20 |
| N 6 mM; Rosette Area at day 10 [cm²] | 21 |
| N 6 mM; Leaf Number at day 10 (number) | 22 |
| N 6 mM; Leaf Blade Area at day 10 (cm²) | 23 |
| N 6 mM; RGR of Rosette Area at day 3 [cm²/gr.] | 24 |
| N 6 mM; t50 Flowering [day] | 25 |
| N 6 mM; Dry Weight [gr./plant] | 26 |
| N 6 mM; N level/FW | 27 |
| N 6 mM; DW/N level [gr./SPAD unit] | 28 |
| N 6 mM; N level/DW (SPAD unit/gr. plant) | 29 |
| N 6 mM; Seed yield/N unit [gr./SPAD unit] | 30 |
| N 1.5 mM; N level/FW [SPAD unit/gr.] | 31 |
| N 1.5 mM; N level/DW [SPAD unit/gr.] | 32 |
| N 1.5 mM; DW/N level [gr/SPAD unit] | 33 |
| N 1.5 mM; seed yield/N level [gr/SPAD unit] | 34 |

Table 39. Provided are the Arabidopsis correlated parameters (vectors).
“N” = Nitrogen at the noted concentrations;
“gr.” = grams;
“SPAD” = chlorophyll levels;
“t50” = time where 50% of plants flowered;
“gr./SPAD unit” = plant biomass expressed in grams per unit of nitrogen in plant measured by SPAD.
“DW” = Plant Dry Weight;
″FW″ = Plant Fresh weight;
“N level/DW” = plant Nitrogen level measured in SPAD unit per plant biomass [gr.];
“DW/N level” = plant biomass per plant [gr.]/SPAD unit;
Rosette Area (measured using digital analysis);
Plot Coverage at the indicated day [%] (calculated by the dividing the total plant area with the total plot area);
Leaf Blade Area at the indicated day [cm²] (measured using digital analysis);
RGR (relative growth rate) of Rosette Area at the indicated day [cm²/day];
t50 Flowering [day] (the day in which 50% of plant flower);
seed yield/rosette area at day 10 [gr./cm²] (calculated);
seed yield/leaf blade [gr./cm²] (calculated);
seed yield/N level [gr./SPAD unit] (calculated).

[0814] Assessment of NUE, yield components and vigor-related parameters—Ten Arabidopsis ecotypes were grown in trays, each containing 8 plants per plot, in a greenhouse with controlled temperature conditions for about 12 weeks. Plants were irrigated with different nitrogen concentration as described above depending on the treatment applied. During this time, data was collected documented and analyzed. Most of chosen parameters were analyzed by digital imaging.

[0815] Digital Imaging—Greenhouse Assay

[0816] An image acquisition system, which consists of a digital reflex camera (Canon EOS 400D) attached with a 55 mm focal length lens (Canon EF-S series) placed in a custom made Aluminum mount, was used for capturing images of plants planted in containers within an environmental controlled greenhouse. The image capturing process was repeated every 2-3 days starting at day 9-12 till day 16-19 (respectively) from transplanting.

[0817] An image analysis system was used, which consists of a personal desktop computer (Intel P4 3.0 GHz processor) and a public domain program—ImageJ 1.37, Java based image processing program, which was developed at the U.S National Institutes of Health and is freely available at rsbweb (dot) nih (dot) gov/. Images were captured in resolution of 6 Mega Pixels (3072×2048 pixels) and stored in a low compression JPEG (Joint Photographic Experts Group standard) format. Next, analyzed data was saved to text files and processed using the JMP statistical analysis software (SAS institute).

[0818] Leaf analysis—Using the digital analysis leaves data was calculated, including leaf number, leaf blade area, plot coverage, Rosette diameter and Rosette area.

[0819] Relative growth rate area: The relative growth rate area of the rosette and the leaves was calculated according to Formulas 9 and 13, respectively, above.

[0820] Seed yield and 1000 seeds weight—At the end of the experiment all seeds from all plots were collected and weighed in order to measure seed yield per plant in terms of total seed weight per plant (gr.). For the calculation of 1000 seed weight, an average weight of 0.02 grams was measured from each sample, the seeds were scattered on a glass tray and a picture was taken. Using the digital analysis, the number of seeds in each sample was calculated.

[0821] Dry weight and seed yield—At the end of the experiment, plant were harvested and left to dry at 30° C. in a drying chamber. The vegetative portion above ground was separated from the seeds. The total weight of the vegetative portion above ground and the seed weight of each plot were measured and divided by the number of plants.

[0822] Dry weight (vegetative biomass)=total weight of the vegetative portion above ground (excluding roots) after drying at 30° C. in a drying chamber; all the above ground biomass that is not seed yield.

[0823] Seed yield per plant=total seed weight per plant (gr.).

[0824] Harvest Index (seed)—The harvest index was calculated using Formula 15 as described above.

[0825] T₅₀ days to flowering—Each of the repeats was monitored for flowering date. Days of flowering was calculated from sowing date till 50% of the plots flowered.

[0826] Plant nitrogen level—The chlorophyll content of leaves is a good indicator of the nitrogen plant status since the degree of leaf greenness is highly correlated to this parameter. Chlorophyll content was determined using a Minolta SPAD 502 chlorophyll meter and measurement was performed at time of flowering. SPAD meter readings were done on young fully developed leaf. Three measurements per leaf were taken per plot. Based on this measurement, parameters such as the ratio between seed yield per nitrogen unit [seed yield/N level=seed yield per plant [gr.]/SPAD unit], plant DW per nitrogen unit [DW/N level=plant biomass per plant [gr.]/SPAD unit], and nitrogen level per gram of biomass [N level/DW=SPAD unit/plant biomass per plant (gr.)] were calculated.

[0827] Percent of seed yield reduction—measures the amount of seeds obtained in plants when grown under nitrogen-limiting conditions compared to seed yield produced at normal nitrogen levels expressed in percentages (%).

[0828] Experimental Results

[0829] 10 different Arabidopsis accessions (ecotypes) were grown and characterized for 34 parameters as described above. The average for each of the measured parameters was calculated using the JMP software (Table 40 below). Subsequent correlation analysis between the various transcriptome sets (Table 38) and the average parameters were conducted (Table 41 below).

TABLE 40
Measured parameters in Arabidopsis accessions

| Line/ | | | | | | | | | | |
|---|---|---|---|---|---|---|---|---|---|---|
| Corr. | | | | | | | | | | Line- |
| ID | Line-1 | Line-2 | Line-3 | Line-4 | Line-5 | Line-6 | Line-7 | Line-8 | Line-9 | 10 |
| 1 | 0.116 | 0.165 | 0.108 | 0.082 | 0.119 | 0.139 | 0.107 | 0.138 | 0.095 | 0.068 |
| 2 | 0.28 | 0.309 | 0.284 | 0.158 | 0.206 | 0.276 | 0.171 | 0.212 | 0.166 | 0.136 |
| 3 | 0.0147 | 0.0169 | 0.0178 | 0.0121 | 0.0155 | 0.0154 | 0.014 | 0.0166 | 0.0161 | 0.016 |
| 4 | 0.0824 | 0.1058 | 0.0405 | 0.0339 | 0.0556 | 0.057 | 0.0554 | 0.0507 | 0.0582 | 0.0307 |
| 5 | 0.339 | 0.526 | 0.207 | 0.183 | 0.277 | 0.281 | 0.252 | 0.271 | 0.235 | 0.158 |
| 6 | 0.76 | 0.709 | 1.061 | 1.157 | 1.00 | 0.91 | 0.942 | 1.118 | 0.638 | 0.996 |
| 7 | 1.43 | 1.33 | 1.77 | 1.97 | 1.83 | 1.82 | 1.64 | 2.00 | 1.15 | 1.75 |
| 8 | 6.88 | 7.31 | 7.31 | 7.88 | 7.75 | 7.62 | 7.19 | 8.62 | 5.93 | 7.94 |
| 9 | 0.335 | 0.266 | 0.374 | 0.387 | 0.37 | 0.386 | 0.35 | 0.379 | 0.307 | 0.373 |
| 10 | 0.631 | 0.793 | 0.502 | 0.491 | 0.72 | 0.825 | 0.646 | 0.668 | 0.636 | 0.605 |
| 11 | 16.00 | 21.00 | 14.80 | 24.70 | 23.70 | 18.10 | 19.50 | 23.60 | 21.90 | 23.60 |
| 12 | 0.164 | 0.124 | 0.082 | 0.113 | 0.124 | 0.134 | 0.106 | 0.148 | 0.171 | 0.184 |
| 13 | 0.0318 | 0.0253 | 0.023 | 0.0098 | 0.0088 | 0.0323 | 0.0193 | 0.012 | 0.0135 | 0.0055 |
| 14 | 0.192 | 0.203 | 0.295 | 0.085 | 0.071 | 0.241 | 0.179 | 0.081 | 0.079 | 0.031 |
| 15 | 0.0165 | 0.0158 | 0.0175 | 0.0143 | 0.0224 | 0.0148 | 0.0136 | 0.0217 | 0.0186 | 0.0183 |
| 16 | 0.0221 | 0.019 | 0.0136 | 0.0052 | 0.005 | 0.0178 | 0.0127 | 0.0068 | 0.0118 | 0.0032 |
| 17 | 0.0948 | 0.0946 | 0.0634 | 0.0264 | 0.0242 | 0.0836 | 0.0589 | 0.0343 | 0.044 | 0.0149 |
| 18 | 72.60 | 84.70 | 78.80 | 88.00 | 92.60 | 76.70 | 81.90 | 91.30 | 85.80 | 91.80 |
| 19 | 60.7 | 76.7 | 78.6 | 78.1 | 78.6 | 73.2 | 83.1 | 77.2 | 70.1 | 63 |
| 20 | 0.76 | 0.86 | 1.48 | 1.28 | 1.10 | 1.24 | 1.09 | 1.41 | 0.89 | 1.22 |
| 21 | 1.41 | 1.57 | 2.67 | 2.42 | 2.14 | 2.47 | 1.97 | 2.72 | 1.64 | 2.21 |
| 22 | 6.25 | 7.31 | 8.06 | 8.75 | 8.75 | 8.38 | 7.12 | 9.44 | 6.31 | 8.06 |
| 23 | 0.342 | 0.315 | 0.523 | 0.449 | 0.43 | 0.497 | 0.428 | 0.509 | 0.405 | 0.43 |
| 24 | 0.689 | 1.024 | 0.614 | 0.601 | 0.651 | 0.676 | 0.584 | 0.613 | 0.515 | 0.477 |
| 25 | 16.40 | 20.50 | 14.60 | 24.00 | 23.60 | 15.00 | 19.70 | 22.90 | 18.80 | 23.40 |
| 26 | 0.419 | 0.531 | 0.382 | 0.517 | 0.579 | 0.501 | 0.627 | 0.649 | 0.573 | 0.496 |
| 27 | 22.50 | — | — | 28.30 | — | 33.30 | — | — | 39.00 | 17.60 |
| 28 | 0.0186 | — | — | 0.0183 | — | 0.015 | — | — | 0.0147 | 0.0281 |
| 29 | 53.70 | — | — | 54.60 | — | 66.50 | — | — | 68.10 | 35.50 |
| 30 | 0.0042 | — | — | 0.003 | — | 0.0053 | — | — | 0.0033 | 0.0023 |
| 31 | 45.60 | — | — | 42.10 | — | 53.10 | — | — | 67.00 | 28.10 |
| 32 | 167.30 | — | — | 241.10 | — | 195.00 | — | — | 169.30 | 157.80 |
| 33 | 0.006 | — | — | 0.0041 | — | 0.0051 | — | — | 0.0059 | 0.0063 |
| 34 | 0.0012 | — | — | 0.0004 | — | 0.0012 | — | — | 0.0005 | 0.0002 |

Table 40. Provided are the measured parameters under various treatments in various ecotypes (Arabidopsis accessions).

TABLE 41
Correlation between the expression level of selected genes
of some embodiments of the invention in various tissues and the
phenotypic performance under normal or abiotic stress conditions
across Arabidopsis accessions

| Gene | | | Exp. | Corr. | Gene | | | Exp. | Corr. |
|---|---|---|---|---|---|---|---|---|---|
| Name | R | P value | set | Set ID | Name | R | P value | set | Set ID |
| LBY507 | 0.78 | 1.33E−02 | 4 | 6 | LBY507 | 0.72 | 2.74E−02 | 4 | 7 |
| LYD1000 | 0.77 | 1.44E−02 | 4 | 2 | LYD1001 | 0.78 | 7.78E−03 | 2 | 11 |

Table 41. Provided are the correlations (R) between the expression levels of yield improving genes and their homologues in tissues [Leaves or stems; Expression sets (Exp)] and the phenotypic performance in various yield, biomass, growth rate and/or vigor components [Correlation vector (corr.)] under nitrogen limiting conditions or normal conditions across Arabidopsis accessions.
“Corr. ID” —correlation set ID according to the correlated parameters specified in Table 39.
“Exp. Set”—Expression set specified in Table 38.
“R” = Pearson correlation coefficient;
“P” = p value.

### Example 5

### Production of Sorghum Transcriptome and High Throughput Correlation Analysis with ABST Related Parameters Using 44K Sorghum Oligonucleotide Micro-Arrays

[0830] In order to produce a high throughput correlation analysis between plant phenotype and gene expression level, the present inventors utilized a Sorghum oligonucleotide micro-array, produced by Agilent Technologies [chem. (dot) agilent (dot) com/Scripts/PDS (dot) asp?1Page=50879]. The array oligonucleotide represents about 44,000 Sorghum genes and transcripts. In order to define correlations between the levels of RNA expression with ABST, yield and NUE components or vigor related parameters, various plant characteristics of 17 different Sorghum hybrids were analyzed. Among them, 10 hybrids encompassing the observed variance were selected for RNA expression analysis. The correlation between the RNA levels and the characterized parameters was analyzed using Pearson correlation test [davidmlane (dot) com/hyperstat/A34739 (dot) html].

[0831] I. Correlation of Sorghum Varieties Across Ecotypes Grown Under Regular Growth Conditions, Severe Drought Conditions and Low Nitrogen Conditions

[0832] Experimental Procedures

[0833] 17 Sorghum varieties were grown in 3 repetitive plots, in field. Briefly, the growing protocol was as follows:

[0834] 1. Regular (normal) growth conditions: Sorghum plants were grown in the field using commercial fertilization and irrigation protocols (370,000 liter per dunam (1000 square meters), fertilization of 14 units of nitrogen per dunam entire growth period).

[0835] 2. Drought conditions: Sorghum seeds were sown in soil and grown under normal condition until about 35 days from sowing, about stage V8 (eight green leaves are fully expanded, booting not started yet). At this point, irrigation was stopped, and severe drought stress was developed.

[0836] 3. Low Nitrogen fertilization conditions: Sorghum plants were fertilized with 50% less amount of nitrogen in the field than the amount of nitrogen applied in the regular growth treatment. All the fertilizer was applied before flowering.

[0837] Analyzed Sorghum tissues—All 10 selected Sorghum hybrids were sampled per each treatment. Tissues [Flag leaf, Flower meristem and Flower] from plants growing under normal conditions, severe drought stress and low nitrogen conditions were sampled and RNA was extracted as described above. Each micro-array expression information tissue type has received a Set ID as summarized in Table 42 below.

TABLE 42
Sorghum transcriptome expression sets

| Expression Set | Set ID |
|---|---|
| Flag leaf at flowering stage under drought growth conditions | 1 |
| Flag leaf at flowering stage under low nitrogen growth conditions | 2 |
| Flag leaf at flowering stage under normal growth conditions | 3 |
| Flower meristem at flowering stage under drought growth | 4 |
| conditions | |
| Flower meristem at flowering stage under low nitrogen growth | 5 |
| conditions | |
| Flower meristem at flowering stage under normal growth | 6 |
| conditions | |
| Flower at flowering stage under drought growth conditions | 7 |
| Flower at flowering stage under low nitrogen growth conditions | 8 |
| Flower at flowering stage under normal growth conditions | 9 |

Table 42: Provided are the sorghum transcriptome expression sets 1-9.
Flag leaf = the leaf below the flower;
Flower meristem = Apical meristem following particle initiation;
Flower = the flower at the anthesis day.
Expression sets 3, 6, and 9 are from plants grown under normal conditions;
Expression sets 2, 5 and 8 are from plants grown under Nitrogen-limiting conditions;
Expression sets 1, 4 and 7 are from plants grown under drought conditions.

[0838] The following parameters were collected using digital imaging system:

[0839] At the end of the growing period the grains were separated from the Plant ‘Head’ and the following parameters were measured and collected:

[0840] Average Grain Area (cm²)—A sample of ˜200 grains was weighted, photographed and images were processed using the below described image processing system. The grain area was measured from those images and was divided by the number of grains.

[0841] Upper and Lower Ratio Average of Grain Area, width, length, diameter and perimeter—Grain projection of area, width, diameter and perimeter were extracted from the digital images using open source package imagej (nih). Seed data was analyzed in plot average levels as follows:

[0842] Average of all seeds;

[0843] Average of upper 20% fraction (contained upper 20% fraction of seeds);

[0844] Average of lower 20% fraction (contained lower 20% fraction of seeds);

[0845] Further on, ratio between each fraction and the plot average was calculated for each of the data parameters.

[0846] At the end of the growing period 5 ‘Heads’ were photographed and images were processed using the below described image processing system.

[0847] (i) Head Average Area (cm²)—At the end of the growing period 5 ‘Heads’ were photographed and images were processed using the below described image processing system. The ‘Head’ area was measured from those images and was divided by the number of ‘Heads’.

[0848] (ii) Head Average Length (cm)—At the end of the growing period 5 ‘Heads’ were photographed and images were processed using the below described image processing system. The ‘Head’ length (longest axis) was measured from those images and was divided by the number of ‘Heads’.

[0849] (iii) Head Average width (cm)—At the end of the growing period 5 ‘Heads’ were photographed and images were processed using the below described image processing system. The ‘Head’ width was measured from those images and was divided by the number of ‘Heads’.

[0850] (iv) Head Average perimeter (cm)—At the end of the growing period 5 ‘Heads’ were photographed and images were processed using the below described image processing system. The ‘Head’ perimeter was measured from those images and was divided by the number of ‘Heads’.

[0851] The image processing system was used, which consists of a personal desktop computer (Intel P4 3.0 GHz processor) and a public domain program—ImageJ 1.37, Java based image processing software, which was developed at the U.S. National Institutes of Health and is freely available on the internet at rsbweb (dot) nih (dot) gov/. Images were captured in resolution of 10 Mega Pixels (3888×2592 pixels) and stored in a low compression JPEG (Joint Photographic Experts Group standard) format. Next, image processing output data for seed area and seed length was saved to text files and analyzed using the JMP statistical analysis software (SAS institute).

[0852] Additional parameters were collected either by sampling 5 plants per plot or by measuring the parameter across all the plants within the plot.

[0853] Total Grain Weight/Head (gr.) (grain yield)—At the end of the experiment (plant ‘Heads’) heads from plots within blocks A-C were collected. 5 heads were separately threshed and grains were weighted, all additional heads were threshed together and weighted as well. The average grain weight per head was calculated by dividing the total grain weight by number of total heads per plot (based on plot). In case of 5 heads, the total grains weight of 5 heads was divided by 5.

[0854] FW Head/Plant gram—At the end of the experiment (when heads were harvested) total and 5 selected heads per plots within blocks A-C were collected separately. The heads (total and 5) were weighted (gr.) separately and the average fresh weight per plant was calculated for total (FW Head/Plant gr. based on plot) and for 5 (FW Head/Plant gr. based on 5 plants) plants.

[0855] Plant height—Plants were characterized for height during growing period at 5 time points. In each measure, plants were measured for their height using a measuring tape. Height was measured from ground level to top of the longest leaf.

[0856] SPAD—Chlorophyll content was determined using a Minolta SPAD 502 chlorophyll meter and measurement was performed 64 days post sowing. SPAD meter readings were done on young fully developed leaf. Three measurements per leaf were taken per plot.

[0857] Vegetative fresh weight and Heads—At the end of the experiment (when Inflorescence were dry) all Inflorescence and vegetative material from plots within blocks A-C were collected. The biomass and Heads weight of each plot was separated, measured and divided by the number of Heads.

[0858] Plant biomass (Fresh weight)—At the end of the experiment (when Inflorescence were dry) the vegetative material from plots within blocks A-C were collected. The plants biomass without the Inflorescence were measured and divided by the number of Plants.

[0859] FW Heads/(FW Heads+FW Plants)—The total fresh weight of heads and their respective plant biomass were measured at the harvest day. The heads weight was divided by the sum of weights of heads and plants.

[0860] Experimental Results

[0861] 17 different Sorghum varieties were grown and characterized for different parameters: The average for each of the measured parameters was calculated using the JMP software (Tables 44-45) and a subsequent correlation analysis between the various transcriptome sets (Table 42) and the average parameters, was conducted (Table 46). Results were then integrated to the database.

TABLE 43
Sorghum correlated parameters (vectors)

| | Correlation |
|---|---|
| Correlated parameter with | ID |
| Total grain weight/Head (gr.) (based on plot), under | 1 |
| Drought growth conditions | |
| Head Average Area (cm²), under Drought growth | 2 |
| conditions | |
| Head Average Perimeter (cm), under Drought growth | 3 |
| conditions | |
| Head Average Length (cm), under Drought growth | 4 |
| conditions | |
| Head Average Width (cm), under Drought growth | 5 |
| conditions | |
| Average Grain Area (cm²), under Drought growth | 6 |
| conditions | |
| Upper Ratio Average Grain Area, (value) under Drought | 7 |
| growth conditions | |
| Final Plant Height (cm), under Drought growth conditions | 8 |
| FW - Head/Plant (gr) (based on plot), under Drought | 9 |
| growth conditions | |
| FW/Plant (gr) (based on plot), under Drought growth | 10 |
| conditions | |
| Leaf SPAD 64 DPS (Days Post Sowing), under Drought | 11 |
| growth conditions | |
| FW Heads/(FW Heads + FW Plants)(all plot), under | 12 |
| Drought growth conditions | |
| [Plant biomass (FW)/SPAD 64 DPS] (gr) under Drought | 13 |
| growth conditions | |
| Total grain weight/Head (gr.) (based on plot), under | 14 |
| Normal growth conditions | |
| Total grain weight/Head (gr.) (based on 5 heads), under | 15 |
| Normal growth conditions | |
| Head Average Area (cm²), under Normal growth | 16 |
| conditions | |
| Head Average Perimeter (cm), under Normal growth | 17 |
| conditions | |
| Head Average Length (cm), under Normal growth | 18 |
| conditions | |
| Head Average Width (cm), under Normal growth | 19 |
| conditions | |
| Average Grain Area (cm²), under Normal growth | 20 |
| conditions | |
| Upper Ratio Average Grain Area (value), under Normal | 21 |
| growth conditions | |
| Lower Ratio Average Grain Area (value), under Normal | 22 |
| growth conditions | |
| Lower Ratio Average Grain Perimeter, (value) under | 23 |
| Normal growth conditions | |
| Lower Ratio Average Grain Length (value), under Normal | 24 |
| growth conditions | |
| Lower Ratio Average Grain Width (value), under Normal | 25 |
| growth conditions | |
| Final Plant Height (cm), under Normal growth conditions | 26 |
| FW - Head/Plant (gr.) (based on plot), under Normal | 27 |
| growth conditions | |
| FW/Plant (gr.) (based on plot), under Normal growth | 28 |
| conditions | |
| Leaf SPAD 64 DPS (Days Post Sowing), under Normal | 29 |
| growth conditions | |
| FW Heads/(FW Heads + FW Plants) (all plot), under | 30 |
| Normal growth conditions | |
| [Plant biomass (FW)/SPAD 64 DPS] (gr.), under Normal | 31 |
| growth conditions | |
| [Grain Yield + plant biomass/SPAD 64 DPS] (gr.), under | 32 |
| Normal growth conditions | |
| [Grain yield/SPAD 64 DPS] (gr.), under Normal growth | 33 |
| conditions | |
| Total grain weight/Head (based on plot) (gr.), under Low | 34 |
| Nitrogen growth conditions | |
| Total grain weight/Head (gr.) (based on 5 heads), under | 35 |
| Low Nitrogen growth conditions | |
| Head Average Area (cm²), under Low Nitrogen growth | 36 |
| conditions | |
| Head Average Perimeter (cm), under Low Nitrogen | 37 |
| growth conditions | |
| Head Average Length (cm), under Low Nitrogen growth | 38 |
| conditions | |
| Head Average Width (cm), under Low Nitrogen growth | 39 |
| conditions | |
| Average Grain Area (cm²), under Low Nitrogen growth | 40 |
| conditions | |
| Upper Ratio Average Grain Area (value), under Low | 41 |
| Nitrogen growth conditions | |
| Lower Ratio Average Grain Area (value), under Low | 42 |
| Nitrogen growth conditions | |
| Lower Ratio Average Grain Perimeter (value), under Low | 43 |
| Nitrogen growth conditions | |
| Lower Ratio Average Grain Length (value), under Low | 44 |
| Nitrogen growth conditions | |
| Lower Ratio Average Grain Width (value), under Low | 45 |
| Nitrogen growth conditions | |
| Final Plant Height (cm), under Low Nitrogen growth | 46 |
| conditions | |
| FW - Head/Plant (gr.) (based on plot), under Low | 47 |
| Nitrogen growth conditions | |
| FW/Plant (gr.) (based on plot), under Low Nitrogen | 48 |
| growth conditions | |
| Leaf SPAD 64 DPS (Days Post Sowing), under Low | 49 |
| Nitrogen growth conditions | |
| FW Heads/(FW Heads + FW Plants) (all plot), under Low | 50 |
| Nitrogen growth conditions | |
| [Plant biomass (FW)/SPAD 64 DPS] (gr.), under Low | 51 |
| Nitrogen growth conditions | |
| [Grain Yield + plant biomass/SPAD 64 DPS] (gr.), under | 52 |
| Low Nitrogen growth conditions | |
| [Grain yield/SPAD 64 DPS] (gr.), under Low Nitrogen | 53 |
| growth conditions | |

Table 43. Provided are the Sorghum correlated parameters (vectors).
“gr.” = grams;
“SPAD” = chlorophyll levels;
″FW″ = Plant Fresh weight;
“normal” = standard growth conditions.

TABLE 44
Measured parameters in Sorghum accessions

| Ecotype/ | | | | | Line- | Line- | Line- | Line- | Line- |
|---|---|---|---|---|---|---|---|---|---|
| Treatment | Line-1 | Line-2 | Line-3 | Line-4 | 5 | 6 | 7 | 8 | 9 |
| 1 | 0.10 | 0.11 | 0.11 | 0.09 | 0.09 | 0.11 | — | — | — |

Table 44 Provided are the values of each of the parameters (as described above) measured in Sorghum accessions (ecotype) under normal, low nitrogen and drought conditions. Growth conditions are specified in the experimental procedure section.

TABLE 45
Additional measured parameters in Sorghum accessions

| Ecotype/ | | | Line- | Line- | Line- | Line- | Line- | Line- |
|---|---|---|---|---|---|---|---|---|
| Treatment | Line-10 | Line-11 | 13 | 12 | 14 | 15 | 16 | 17 |
| 2 | 0.13 | 0.13 | 0.12 | 0.12 | 0.11 | 0.11 | 0.12 | 0.11 |

Table 45: Provided are the values of each of the parameters (as described above) measured in Sorghum accessions (ecotype) under normal, low nitrogen and drought conditions. Growth conditions are specified in the experimental procedure section.

TABLE 46
Correlation between the expression level of selected genes of some
embodiments of the invention in various tissues and the phenotypic
performance under normal or abiotic stress conditions
across Sorghum accessions

| Gene | | | Exp. | Corr. | Gene | | | Exp. | Corr. |
|---|---|---|---|---|---|---|---|---|---|
| Name | R | P value | set | ID | Name | R | P value | set | ID |
| LBY489 | 0.83 | 2.67E−03 | 6 | 26 | LBY489 | 0.87 | 1.06E−03 | 6 | 14 |
| LBY489 | 0.82 | 4.00E−03 | 4 | 13 | LBY489 | 0.82 | 3.32E−03 | 4 | 10 |
| LBY489 | 0.71 | 2.11E−02 | 5 | 34 | LBY489 | 0.74 | 1.46E−02 | 5 | 47 |
| LBY489 | 0.72 | 2.72E−02 | 3 | 31 | LBY492 | 0.77 | 1.43E−02 | 9 | 31 |
| LBY531 | 0.80 | 5.98E−03 | 6 | 26 | LBY531 | 0.72 | 1.82E−02 | 6 | 14 |
| LBY531 | 0.77 | 9.85E−03 | 2 | 35 | LBY531 | 0.75 | 1.20E−02 | 4 | 9 |
| LBY531 | 0.86 | 1.25E−03 | 4 | 13 | LBY531 | 0.88 | 8.88E−04 | 4 | 10 |
| LBY531 | 0.74 | 1.44E−02 | 8 | 41 | LYD1002 | 0.80 | 5.50E−03 | 6 | 14 |
| LYD1002 | 0.79 | 7.10E−03 | 5 | 42 | LYD1002 | 0.73 | 1.60E−02 | 5 | 34 |
| MGP93 | 0.73 | 1.75E−02 | 6 | 20 | MGP93 | 0.74 | 1.48E−02 | 2 | 46 |
| MGP93 | 0.78 | 1.30E−02 | 3 | 33 | MGP93 | 0.81 | 8.01E−03 | 3 | 32 |

Table 46. Provided are the correlations (R) between the expression levels of yield improving genes and their homologues in tissues [Flag leaf, Flower meristem, stem and Flower; Expression sets (Exp.)] and the phenotypic performance in various yield, biomass, growth rate and/or vigor components [Correlation (corr.) vector ID] under stress conditions or normal conditions across Sorghum accessions.
P = p value.

[0862] II. Correlation of Sorghum Varieties Across Ecotype Grown Under Salinity Stress, Cold Stress, Low Nitrogen and Normal Conditions

[0863] Sorghum vigor related parameters under 100 mM NaCl and low temperature (10±2° C.)—Ten Sorghum varieties were grown in 3 repetitive plots, each containing 17 plants, at a net house under semi-hydroponics conditions. Briefly, the growing protocol was as follows: Sorghum seeds were sown in trays filled with a mix of vermiculite and peat in a 1:1 ratio. Following germination, the trays were transferred to the high salinity solution (100 mM NaCl in addition to the Full Hogland solution at 28±2° C.), low temperature (10±2° C. in the presence of Full Hogland solution), low nitrogen (2 mM nitrogen at 28±2° C.) or at Normal growth solution [Full Hogland solution at 28±2° C.].

[0864] Full Hogland solution consists of: KNO₃—0.808 grams/liter, MgSO₄—0.12 grams/liter, KH₂PO₄—0.172 grams/liter and 0.01% (volume/volume) of ‘Super coratin’ micro elements (Iron-EDDHA [ethylenediamine-N,N′-bis(2-hydroxyphenylacetic acid)]—40.5 grams/liter; Mn—20.2 grams/liter; Zn 10.1 grams/liter; Co 1.5 grams/liter; and Mo 1.1 grams/liter), solution's pH should be 6.5-6.8].

[0865] All 10 selected varieties were sampled per each treatment. Two tissues [meristems and roots] growing at 100 mM NaCl, low temperature (10±2° C.), low nitrogen (2 mM nitrogen) or under Normal conditions (full Hogland at a temperature between 28±2° C.) were sampled and RNA was extracted as described hereinabove under “GENERAL EXPERIMENTAL AND BIOINFORMATICS METHODS”.

TABLE 47
Sorghum transcriptome expression sets

| Expression Set | Set ID |
|---|---|
| root at vegetative stage (V4-V5) under cold conditions | 1 |
| root vegetative stage (V4-V5) under normal conditions | 2 |
| root vegetative stage (V4-V5) under low nitrogen conditions | 3 |
| root vegetative stage (V4-V5) under salinity conditions | 4 |
| vegetative meristem at vegetative stage (V4-V5) under cold | 5 |
| conditions | |
| vegetative meristem at vegetative stage (V4-V5) under low | 6 |
| nitrogen conditions | |
| vegetative meristem at vegetative stage (V4-V5) under | 7 |
| salinity conditions | |
| vegetative meristem at vegetative stage (V4-V5) under | 8 |
| normal conditions | |

Table 47: Provided are the Sorghum transcriptome expression sets.
Cold conditions = 10 ± 2° C.;
NaCl = 100 mM NaCl;
low nitrogen = 1.2 mM Nitrogen;
Normal conditions = 16 mM Nitrogen.

[0866] Sorghum Biomass, Vigor, Nitrogen Use Efficiency and Growth-Related Components

[0867] Root DW (dry weight)—At the end of the experiment, the root material was collected, measured and divided by the number of plants.

[0868] Shoot DW—At the end of the experiment, the shoot material (without roots) was collected, measured and divided by the number of plants.

[0869] Total biomass—total biomass including roots and shoots.

[0870] Plant leaf number—Plants were characterized for leaf number at 3 time points during the growing period. In each measure, plants were measured for their leaf number by counting all the leaves of 3 selected plants per plot.

[0871] Shoot/root Ratio—The shoot/root Ratio was calculated using Formula 30 above.

[0872] Percent of reduction of root biomass compared to normal—the difference (reduction in percent) between root biomass under normal and under low nitrogen conditions.

[0873] Percent of reduction of shoot biomass compared to normal—the difference (reduction in percent) between shoot biomass under normal and under low nitrogen conditions.

[0874] Percent of reduction of total biomass compared to normal—the difference (reduction in percent) between total biomass (shoot and root) under normal and under low nitrogen conditions

[0875] Plant height—Plants were characterized for height at 3 time points during the growing period. In each measure, plants were measured for their height using a measuring tape. Height was measured from ground level to top of the longest leaf.

[0876] Relative Growth Rate of leaf number was calculated using Formula 8 above.

[0877] SPAD—Chlorophyll content was determined using a Minolta SPAD 502 chlorophyll meter and measurement was performed 64 days post sowing. SPAD meter readings were done on young fully developed leaf. Three measurements per leaf were taken per plot.

[0878] Root Biomass [DW-gr.]/SPAD—root biomass divided by SPAD results.

[0879] Shoot Biomass [DW-gr.]/SPAD—shoot biomass divided by SPAD results.

[0880] Total Biomass-Root+Shoot [DW-gr.]/SPAD—total biomass divided by SPAD results.

[0881] Plant nitrogen level—calculated as SPAD/leaf biomass—The chlorophyll content of leaves is a good indicator of the nitrogen plant status since the degree of leaf greenness is highly correlated to this parameter.

[0882] Experimental Results

[0883] 10 different Sorghum varieties were grown and characterized for the following parameters: “Leaf number Normal”=leaf number per plant under normal conditions (average of five plants); “Plant Height Normal”=plant height under normal conditions (average of five plants); “Root DW 100 mM NaCl”—root dry weight per plant under salinity conditions (average of five plants); The average for each of the measured parameters was calculated using the JMP software and values are summarized in Table 49 below. Subsequent correlation analysis between the various transcriptome sets and the average parameters were conducted (Table 50). Results were then integrated to the database.

TABLE 48
Sorghum correlated parameters (vectors)

| | Correlation |
|---|---|
| Correlated parameter with | ID |
| Shoot Biomass (DW, gr.)/SPAD under Low Nitrogen | 1 |
| conditions | |
| Root Biomass (DW, gr.)/SPAD under Low Nitrogen | 2 |
| conditions | |
| Total Biomass (Root + Shoot; DW, gr.)/SPAD under Low | 3 |
| Nitrogen conditions | |
| N level/Leaf (SPAD/gr.) under Low Nitrogen conditions | 4 |
| percent of reduction of shoot biomass under Low | 5 |
| Nitrogen compared to normal conditions | |
| percent of reduction of root biomass under Low Nitrogen | 6 |
| compared to normal conditions | |
| percent of reduction of total biomass reduction under Low | 7 |
| N compared to normal conditions | |
| DW Shoot/Plant (gr./number) under Low Nitrogen | 8 |
| conditions | |
| DW Root/Plant (gr./number) under Low Nitrogen | 9 |
| conditions | |
| total biomass DW (gr.) under Low Nitrogen conditions | 10 |
| Shoot/Root (ratio) under Low Nitrogen conditions | 11 |
| Plant Height (at time point 1), (cm) under Low Nitrogen | 12 |
| conditions | |
| Plant Height (at time point 3), (cm) under Low Nitrogen | 13 |
| conditions | |
| Plant Height (at time point 3), (cm) under normal | 14 |
| conditions | |
| Leaf number (at time point 1) under Low Nitrogen | 15 |
| conditions | |
| Leaf number (at time point 2) under Low Nitrogen | 16 |
| conditions | |
| Leaf number (at time point 3) under Low Nitrogen | 17 |
| conditions | |
| shoots DW (gr.) under Low Nitrogen conditions | 18 |
| roots DW (gr.) under Low Nitrogen conditions | 19 |
| SPAD (number) under Low Nitrogen conditions | 20 |
| Shoot Biomass (DW, gr.)/SPAD under Cold conditions | 21 |
| Root Biomass (DW, gr.)/SPAD under Cold conditions | 22 |
| Total Biomass (Root + Shoot; DW, gr.)/SPAD under Cold | 23 |
| conditions | |
| N level/Leaf (SPAD/gr.) under Cold conditions | 24 |
| Plant Height (at time point 1) (cm) under 100 mM NaCl | 25 |
| conditions | |
| Plant Height (at time point 2), (cm) under 100 mM NaCl | 26 |
| conditions | |
| Plant Height (at time point 3), (cm) under 100 mM NaCl | 27 |
| conditions | |
| Leaf number (at time point 1) under 100 mM NaCl | 28 |
| conditions | |
| Leaf number (at time point 2) under 100 mM NaCl | 29 |
| conditions | |
| Leaf number (at time point 3) under salinity conditions | 30 |
| DW Shoot/Plant (gr./number) under salinity conditions | 31 |
| DW Root/Plant (gr./number) under salinity conditions | 32 |
| SPAD (number) under salinity conditions | 33 |
| Plant Height (at time point 1) (cm) at Cold conditions | 34 |
| Plant Height (at time point 3), (cm) at Cold conditions | 35 |
| Leaf number (at time point 1) at Cold conditions | 36 |
| Leaf number (at time point 2) at Cold conditions | 37 |
| Leaf number (at time point 3) at Cold conditions | 38 |
| DW Shoot/Plant (gr./number) at Cold conditions | 39 |
| DW Root/Plant (gr./number) at Cold conditions | 40 |
| SPAD, at Cold conditions | 41 |
| Shoot Biomass (DW, gr.)/SPAD at Normal conditions | 42 |
| Root Biomass [DW, gr.]/SPAD at Normal conditions | 43 |
| Total Biomass (Root + Shoot; DW, gr.)/SPAD at Normal | 44 |
| conditions | |
| N level/Leaf (SPAD/gr.) at Normal conditions | 45 |
| DW Shoot/Plant (gr./number) at Normal conditions | 46 |
| DW Root/Plant (gr./number) at Normal conditions | 47 |
| Total biomass (gr.) at normal conditions | 48 |
| Shoot/Root (ratio) at normal conditions | 49 |
| Plant Height (at time point 1), (cm) at normal conditions | 50 |
| Plant Height (at time point 2), (cm) at normal conditions | 51 |
| Leaf number (at time point 1) at Normal conditions | 52 |
| Leaf number (at time point 2) at Normal conditions | 53 |
| Leaf number (at time point 3) at Normal conditions | 54 |
| Shoots DW (gr.) at normal conditions | 55 |
| Roots DW (gr.) at normal conditions | 56 |
| SPAD (number) at Normal conditions | 57 |
| RGR Leaf Num under Normal conditions | 58 |
| Shoot Biomass (DW, gr.)/SPAD under salinity conditions | 59 |
| Root Biomass (DW- gr.)/SPAD under salinity conditions | 60 |
| Total Biomass (Root + Shoot; DW, gr.)/SPAD under | 61 |
| salinity conditions | |
| N level/Leaf (SPAD/gr.) under salinity conditions | 62 |

Table 48: Provided are the Sorghum correlated parameters.
Cold conditions = 10 ± 2° C.;
salinity conditions = NaCl at a concentration of 100 mM;
low nitrogen = 1.2 mM Nitrogen;
Normal conditions = 16 mM Nitrogen.
“RGR” - relative growth rate;
“Num” = number;

TABLE 49
Sorghum accessions, measured parameters

| Ecotype/ | | Line- | Line- | Line- | Line- | Line- | Line- | Line- | Line- | Line- |
|---|---|---|---|---|---|---|---|---|---|---|
| Treatment | Line-1 | 2 | 3 | 4 | 5 | 6 | 7 | 8 | 9 | 10 |
| 4 | 0.05 | 0.13 | 0.17 | 0.10 | 0.11 | 0.12 | 0.14 | 0.12 | 0.10 | 0.11 |

Table 49: Provided are the measured parameters under 100 mM NaCl and low temperature (8-10° C.) conditions of Sorghum accessions (Seed ID) according to the Correlation ID numbers (described in Table 48 above).

TABLE 50
Correlation between the
expression level of selected genes of some embodiments of the
invention in roots and the phenotypic performance under low nitrogen,
normal, cold or salinity stress conditions across Sorghum accessions

| Gene | | | Exp. | Corr. | Gene | | | Exp. | Corr. |
|---|---|---|---|---|---|---|---|---|---|
| Name | R | P value | set | ID | Name | R | P value | set | ID |
| LBY489 | 0.76 | 1.76E−02 | 5 | 39 | LBY489 | 0.71 | 3.27E−02 | 5 | 21 |
| LBY489 | 0.78 | 1.30E−02 | 5 | 35 | LBY489 | 0.82 | 7.39E−03 | 8 | 49 |
| LBY492 | 0.76 | 4.97E−02 | 3 | 7 | LBY492 | 0.79 | 3.43E−02 | 3 | 5 |
| LBY531 | 0.80 | 9.83E−03 | 5 | 37 | LBY531 | 0.78 | 1.27E−02 | 8 | 58 |
| LBY531 | 0.82 | 6.76E−03 | 6 | 20 | LBY531 | 0.72 | 2.72E−02 | 7 | 28 |
| LBY531 | 0.80 | 9.97E−03 | 7 | 25 | LYD1002 | 0.71 | 3.10E−02 | 6 | 9 |
| LYD1002 | 0.71 | 3.10E−02 | 6 | 19 | | | | | |

Table 50. Provided are the correlations (R) between the genes expression levels in various tissues and the phenotypic performance
Corr.-ID”—correlation vector ID according to the correlated parameters specified in Table 48.
“Exp. Set”—Expression set specified in Table 47.
“R” = Pearson correlation coefficient;
“P” = p value.

### Example 6

### Production of Sorghum Transcriptome and High Throughput Correlation Analysis Using 60K Sorghum Oligonucleotide Micro-Array

[0884] In order to produce a high throughput correlation analysis between plant phenotype and gene expression level, the present inventors utilized a Sorghum oligonucleotide micro-array, produced by Agilent Technologies [chem. (dot) agilent (dot) com/Scripts/PDS (dot) asp?1Page=50879]. The array oligonucleotide represents about 60,000 Sorghum genes and transcripts. In order to define correlations between the levels of RNA expression with vigor related parameters, various plant characteristics of 10 different Sorghum hybrids were analyzed. The correlation between the RNA levels and the characterized parameters was analyzed using Pearson correlation test [davidmlane (dot) com/hyperstat/A34739 (dot) html].

[0885] Experimental Procedures

[0886] Correlation of Sorghum varieties across ecotypes grown in growth chambers under temperature of 30° C. or 14° C. at low light (100 μE) or high light (250 μE) conditions.

[0887] Analyzed Sorghum tissues—All 10 selected Sorghum hybrids were sampled per each condition. Leaf tissue growing under 30° C. and low light (100 μE m⁻² sec⁻¹), 14° C. and low light (100 μE m^{—2} sec^{—1}), 30° C. and high light (250 μE m⁻² sec⁻¹), 14° C. and high light (250 μE m⁻² sec⁻¹) were sampled at vegetative stage of four-five leaves and RNA was extracted as described above. Each micro-array expression information tissue type has received a Set ID as summarized in Table 51 below.

TABLE 51
Sorghum transcriptome expression sets in field experiments

| | Expression |
|---|---|
| Description | set |
| leaf, under 14 Celsius degrees and high light | 1 |
| (light on) | |
| leaf, under 14 Celsius degrees and low light | 2 |
| (light on) | |
| leaf, under 30 Celsius degrees and high light | 3 |
| (light on) | |
| leaf, under 30 Celsius degrees and low light | 4 |
| (light on) | |

Table 51: Provided are the sorghum transcriptome expression sets.

[0888] The following parameters were collected by sampling 8-10 plants per plot or by measuring the parameter across all the plants within the plot (Table 52 below).

[0889] Relative Growth Rate of vegetative dry weight was performed using Formula 7.

[0890] Leaves number—Plants were characterized for leaf number during growing period. In each measure, plants were measured for their leaf number by counting all the leaves of selected plants per plot.

[0891] Shoot FW—shoot fresh weight (FW) per plant, measurement of all vegetative tissue above ground.

[0892] Shoot DW—shoot dry weight (DW) per plant, measurement of all vegetative tissue above ground after drying at 70° C. in oven for 48 hours.

[0893] The average for each of the measured parameters was calculated and values are summarized in Tables 53-56 below. Subsequent correlation analysis was performed (Table 57). Results were then integrated to the database.

TABLE 52
Sorghum correlated parameters (vectors)

| Correlated parameter with | Correlation ID |
|---|---|
| Leaves number | 1 |
| Leaves temperature [° C.] | 2 |
| RGR (relative growth rate) | 3 |
| Shoot DW (dry weight) (gr.) | 4 |
| Shoot FW (fresh weight) (gr.) | 5 |

Table 52. Provided are the Sorghum correlated parameters (vectors).

TABLE 53
Measured parameters in Sorghum accessions
under 14° C. and low light (100 μE m⁻² sec⁻¹)

| Ecotype/ | Line- | | | | | | | | | Line- |
|---|---|---|---|---|---|---|---|---|---|---|
| Treatment | 1 | Line-2 | Line-3 | Line-4 | Line-5 | Line-6 | Line-7 | Line-8 | Line-9 | 10 |
| 1 | 3.00 | 3.00 | 2.75 | 2.75 | 2.63 | 3.00 | 3.50 | 2.75 | 2.43 | 2.00 |

Table 53: Provided are the values of each of the parameters (as described above) measured in Sorghum accessions (Seed ID) under 14° C. and low light (100 μE m⁻² sec⁻¹).

TABLE 54
Measured parameters in Sorghum accessions
under 30° C. and low light (100 μE m⁻² sec⁻¹)

| Ecotype/ | | | | | | | | | | Line- |
|---|---|---|---|---|---|---|---|---|---|---|
| Treatment | Line-1 | Line-2 | Line-3 | Line-4 | Line-5 | Line-6 | Line-7 | Line-8 | Line-9 | 10 |
| 1 | 5.27 | 5.00 | 4.75 | 4.00 | 4.00 | 4.00 | 5.25 | 4.50 | 3.75 | 4.00 |

Table 54: Provided are the values of each of the parameters (as described above) measured in Sorghum accessions (Seed ID) under 30° C. and low light (100 μE m⁻² sec⁻¹).

TABLE 55
Measured parameters in Sorghum accessions
under 30° C. and high light (250 μE m⁻² sec⁻¹)

| Ecotype/ | | | | | | | | | | Line- |
|---|---|---|---|---|---|---|---|---|---|---|
| Treatment | Line-1 | Line-2 | Line-3 | Line-4 | Line-5 | Line-6 | Line-7 | Line-8 | Line-9 | 10 |
| 1 | 4.00 | 3.70 | 3.50 | 3.33 | 4.00 | 4.00 | 3.60 | 3.40 | 3.30 | 3.40 |

Table 55: Provided are the values of each of the parameters (as described above) measured in Sorghum accessions (Seed ID) under 30° C. and high light (250 μE m⁻² sec⁻¹).

TABLE 56
Measured parameters in Sorghum accessions under
14° C. and high light (250 μE m⁻² sec⁻¹)

| Ecotype/ | | | | | | | | | | Line- |
|---|---|---|---|---|---|---|---|---|---|---|
| Treatment | Line-1 | Line-2 | Line-3 | Line-4 | Line-5 | Line-6 | Line-7 | Line-8 | Line-9 | 10 |
| 2 | 0.053 | 0.052 | 0.034 | 0.040 | 0.056 | 0.061 | 0.049 | 0.056 | 0.068 | 0.063 |

Table 56: Provided are the values of each of the parameters (as described above) measured in Sorghum accessions (Seed ID) under 14° C. and high light (250 μE m⁻² sec⁻¹).

TABLE 57
Correlation between the expression level of selected genes of some
embodiments of the invention in various tissues and the phenotypic
performance under combinations of temperature and light conditions
treatments [14° C. or 30° C.; high light (250 μE m⁻² sec⁻¹) or low light
(100 μE m⁻² sec⁻¹)] across Sorghum accessions

| Gene Name | R | P value | Exp. set | Corr. ID |
|---|---|---|---|---|
| LGP52 | 0.75 | 8.85E−02 | 3 | 3 |

Table 57. Provided are the correlations (R) between the genes expression levels in various tissues and the phenotypic performance.
“Corr. ID “ - correlation vector ID according to the correlated parameters specified in Table 52
“Exp. Set” - Expression set specified in Table 51.
“R” = Pearson correlation coefficient;
“P” = p value.

### Example 7

### Production of Sorghum Transcriptome and High Throughput Correlation Analysis with Yield and Drought Related Parameters Measured in Fields Using 65K Sorghum Oligonucleotide Micro-Arrays

[0894] In order to produce a high throughput correlation analysis between plant phenotype and gene expression level, the present inventors utilized a Sorghum oligonucleotide micro-array, produced by Agilent Technologies [chem. (dot) agilent (dot) com/Scripts/PDS (dot) asp?1Page=50879]. The array oligonucleotide represents about 65,000 Sorghum genes and transcripts. In order to define correlations between the levels of RNA expression with ABST, drought tolerance and yield components or vigor related parameters, various plant characteristics of 12 different Sorghum hybrids were analyzed. Among them, 8 hybrids encompassing the observed variance were selected for RNA expression analysis. The correlation between the RNA levels and the characterized parameters was analyzed using Pearson correlation test [davidmlane (dot) com/hyperstat/A34739 (dot) html].

[0895] Experimental Procedures

[0896] 12 Sorghum varieties were grown in 6 repetitive plots, in field. Briefly, the growing protocol was as follows:

[0897] 1. Regular growth conditions: Sorghum plants were grown in the field using commercial fertilization and irrigation protocols, which include 452 m³ water per dunam (1000 square meters) per entire growth period and fertilization of 14 units nitrogen per dunam per entire growth period (normal conditions). The nitrogen can be obtained using URAN® 21% (Nitrogen Fertilizer Solution; PCS Sales, Northbrook, Ill., USA).

[0898] 2. Drought conditions: Sorghum seeds were sown in soil and grown under normal condition until flowering stage (59 days from sowing), drought treatment was imposed by irrigating plants with 50% water relative to the normal treatment from this stage [309 m³ water per dunam (1000 square meters) per the entire growth period)], with normal fertilization (i.e., 14 units nitrogen per dunam).

[0899] Analyzed Sorghum tissues—All 12 selected Sorghum hybrids were sampled per each treatment. Tissues [Basal and distal head, flag leaf and upper stem] representing different plant characteristics, from plants growing under normal conditions and drought stress conditions were sampled and RNA was extracted as described above. Each micro-array expression information tissue type has received a Set ID as summarized in Tables 58-59 below.

TABLE 58
Sorghum transcriptome expression sets in field experiment under
normal conditions

| Expression Set | Set ID |
|---|---|
| Basal head at grain filling stage under normal | 1 |
| conditions | |
| Distal head at grain filling stage under normal | 2 |
| conditions | |
| Flag leaf at flowering stage under normal conditions | 3 |
| Flag leaf at grain filling stage under normal conditions | 4 |
| Up stem at flowering stage under normal conditions | 5 |
| Up stem at grain filling stage under normal conditions | 6 |

Table 58: Provided are the sorghum transcriptome expression sets under normal conditions.
Flag leaf = the leaf below the flower.

TABLE 59
Sorghum transcriptome expression sets in field experiment under
drought conditions

| Expression Set | Set ID |
|---|---|
| Basal head at grain filling stage under drought | 1 |
| conditions | |
| Distal head at grain filling stage under drought | 2 |
| conditions | |
| Flag leaf at flowering stage under drought conditions | 3 |
| Flag leaf at grain filling stage under drought conditions | 4 |
| Up stem at flowering stage under drought conditions | 5 |
| Up stem at grain filling stage under drought conditions | 6 |

Table 59: Provided are the sorghum transcriptome expression sets under drought conditions.
Flag leaf = the leaf below the flower.

[0900] Sorghum Yield Components and Vigor Related Parameters Assessment

[0901] Plants were phenotyped as shown in Tables 60-61 below. Some of the following parameters were collected using digital imaging system:

[0902] Grains yield per plant (gr)—At the end of the growing period heads were collected (harvest stage). Selected heads were separately threshed and grains were weighted. The average grain weight per plant was calculated by dividing the total grain weight by the number of selected plants.

[0903] Heads weight per plant (RP) (kg)—At the end of the growing period heads of selected plants were collected (harvest stage) from the rest of the plants in the plot. Heads were weighted after oven dry (dry weight), and average head weight per plant was calculated.

[0904] Grains num (SP) (number)—was calculated by dividing seed yield from selected plants by a single seed weight.

[0905] 1000 grain (seed) weight (gr.)—was calculated based on Formula 14.

[0906] Grain area (cm²)—At the end of the growing period the grains were separated from the Plant ‘Head’. A sample of ˜200 grains were weighted, photographed and images were processed using the below described image processing system. The grain area was measured from those images and was divided by the number of grains.

[0907] Grain Circularity—The circularity of the grains was calculated based on Formula 19.

[0908] Main Head Area (cm²)—At the end of the growing period selected “Main Heads” were photographed and images were processed using the below described image processing system. The “Main Head” area was measured from those images and was divided by the number of “Main Heads”.

[0909] Main Head length (cm)—At the end of the growing period selected “Main Heads” were photographed and images were processed using the below described image processing system. The “Main Head” length (longest axis) was measured from those images and was divided by the number of “Main Heads”.

[0910] Main Head Width (cm)—At the end of the growing period selected “Main Heads” were photographed and images were processed using the below described image processing system. The “Main Head” width (longest axis) was measured from those images and was divided by the number of “Main Heads”.

[0911] An image processing system was used, which consists of a personal desktop computer (Intel P4 3.0 GHz processor) and a public domain program—ImageJ 1.37, Java based image processing software, which was developed at the U.S. National Institutes of Health and is freely available on the internet at rsbweb (dot) nih (dot) gov/. Images were captured in resolution of 10 Mega Pixels (3888×2592 pixels) and stored in a low compression JPEG (Joint Photographic Experts Group standard) format. Next, image processing output data for seed area and seed length was saved to text files and analyzed using the JMP statistical analysis software (SAS institute).

[0912] Additional parameters were collected either by sampling selected plants in a plot or by measuring the parameter across all the plants within the plot.

[0913] All Heads Area (cm²)—At the end of the growing period (harvest) selected plants main and secondary heads were photographed and images were processed using the above described image processing system. All heads area was measured from those images and was divided by the number of plants.

[0914] All Heads length (cm)—At the end of the growing period (harvest) selected plants main and secondary heads were photographed and images were processed using the above described image processing system. All heads length (longest axis) was measured from those images and was divided by the number of plants.

[0915] All Heads Width (cm)—At the end of the growing period main and secondary heads were photographed and images were processed using the above described image processing system. All heads width (longest axis) was measured from those images and was divided by the number of plants.

[0916] Head weight per plant (RP)/water until maturity (gr./lit)—At the end of the growing period heads were collected (harvest stage) from the rest of the plants in the plot. Heads were weighted after oven dry (dry weight), and average head weight per plant was calculated. Head weight per plant was then divided by the average water volume used for irrigation until maturity.

[0917] Harvest index (SP)—was calculated based on Formula 16 above.

[0918] Heads index (RP)—was calculated based on Formula 46 above.

[0919] Head dry weight (GF) (gr.)—selected heads per plot were collected at the grain filling stage (R2-R3) and weighted after oven dry (dry weight).

[0920] Heads per plant (RP) (number)—At the end of the growing period total number of rest of plot heads were counted and divided by the total number of rest of plot plants.

[0921] Leaves temperature 2° C.—leaf temperature was measured using Fluke IR thermometer 568 device. Measurements were done on opened leaves at grain filling stage.

[0922] Leaves temperature 6° C.—leaf temperature was measured using Fluke IR thermometer 568 device. Measurements were done on opened leaves at late grain filling stage.

[0923] Stomatal conductance (F) (mmol m⁻² s⁻¹)—plants were evaluated for their stomata conductance using SC-1 Leaf Porometer (Decagon devices) at flowering (F) stage. Stomata conductance readings were done on fully developed leaf, for 2 leaves and 2 plants per plot.

[0924] Stomatal conductance (GF) (mmol m⁻² s⁻¹)—plants were evaluated for their stomata conductance using SC-1 Leaf Porometer (Decagon devices) at grain filling (GF) stage. Stomata conductance readings were done on fully developed leaf, for 2 leaves and 2 plants per plot.

[0925] Relative water content 2 (RWC, %)—was calculated based on Formula 1 at grain filling.

[0926] Specific leaf area (SLA) (GF)—was calculated based on Formula 37 above.

[0927] Waxy leaf blade—was defined by view of leaf blades % of Normal and % of grayish (powdered coating/frosted appearance). Plants were scored for their waxiness according to the scale 0=normal, 1=intermediate, 2=grayish.

[0928] SPAD 2 (SPAD unit)—Chlorophyll content was determined using a Minolta SPAD 502 chlorophyll meter and measurement was performed at flowering. SPAD meter readings were done on fully developed leaf. Three measurements per leaf were taken per plant.

[0929] SPAD 3 (SPAD unit)—Chlorophyll content was determined using a Minolta SPAD 502 chlorophyll meter and measurement was performed at grain filling. SPAD meter readings were done on fully developed leaf. Three measurements per leaf were taken per plant. % yellow leaves number (F) (percentage)—At flowering stage, leaves of selected plants were collected. Yellow and green leaves were separately counted. Percent of yellow leaves at flowering was calculated for each plant by dividing yellow leaves number per plant by the overall number of leaves per plant and multiplying by 100.

[0930] % yellow leaves number (H) (percentage)—At harvest stage, leaves of selected plants were collected. Yellow and green leaves were separately counted. Percent of yellow leaves at flowering was calculated for each plant by dividing yellow leaves number per plant by the overall number of leaves per plant and multiplying by 100.

[0931] % Canopy coverage (GF)—was calculated based on Formula 32 above.

[0932] LAI LP-80 (GF)—Leaf area index values were determined using an AccuPAR Centrometer Model LP-80 and measurements were performed at grain filling stage with three measurements per plot.

[0933] Leaves area per plant (GF) (cm²)—total leaf area of selected plants in a plot. This parameter was measured using a Leaf area-meter at the grain filling period (GF).

[0934] Plant height (H) (cm)—Plants were characterized for height at harvest. Plants were measured for their height using a measuring tape. Height was measured from ground level to top of the longest leaf.

[0935] Relative growth rate of Plant height (cm/day)—was calculated based on Formula 3 above.

[0936] Number days to Heading (number)—Calculated as the number of days from sowing till 50% of the plot arrives to heading.

[0937] Number days to Maturity (number)—Calculated as the number of days from sowing till 50% of the plot arrives to seed maturation.

[0938] Vegetative DW per plant (gr.)—At the end of the growing period all vegetative material (excluding roots) from plots were collected and weighted after oven dry (dry weight). The biomass per plant was calculated by dividing total biomass by the number of plants.

[0939] Lower Stem dry density (F) (gr./cm³)—measured at flowering. Lower internodes from selected plants per plot were separated from the plants and weighted (dry weight). To obtain stem density, internode dry weight was divided by the internode volume.

[0940] Lower Stem dry density (H) (gr./cm³)—measured at harvest. Lower internodes from selected plants per plot were separated from the plant and weighted (dry weight). To obtain stem density, internode dry weight was divided by the internode volume.

[0941] Lower Stem fresh density (F) (gr./cm³)—measured at flowering. Lower internodes from selected plants per plot were separated from the plants and weighted (fresh weight). To obtain stem density, internodes fresh weight was divided by the stem volume.

[0942] Lower Stem fresh density (H) (gr./cm³)—measured at harvest. Lower internodes from selected plants per plot were separated from the plants and weighted (fresh weight). To obtain stem density, internodes fresh weight was divided by the stem volume.

[0943] Lower Stem length (F) (cm)—Lower internodes from selected plants per plot were separated from the plants at flowering (F). Internodes were measured for their length using a ruler.

[0944] Lower Stem length (H) (cm)—Lower internodes from selected plants per plot were separated from the plant at harvest (H). Internodes were measured for their length using a ruler.

[0945] Lower Stem width (F) (cm)—Lower internodes from selected plants per plot were separated from the plant at flowering (F). Internodes were measured for their width using a caliber.

[0946] Lower Stem width (GF) (cm)—Lower internodes from selected plants per plot were separated from the plant at grain filling (GF). Internodes were measured for their width using a caliber.

[0947] Lower Stem width (H) (cm)—Lower internodes from selected plants per plot were separated from the plant at harvest (H). Internodes were measured for their width using a caliber.

[0948] Upper Stem dry density (F) (gr./cm³)—measured at flowering (F). Upper internodes from selected plants per plot were separated from the plant and weighted (dry weight). To obtain stem density, stem dry weight was divided by the stem volume.

[0949] Upper Stem dry density (H) (gr./cm³)—measured at harvest (H). Upper stems from selected plants per plot were separated from the plant and weighted (dry weight). To obtain stem density, stem dry weight was divided by the stem volume.

[0950] Upper Stem fresh density (F) (gr./cm³)—measured at flowering (F). Upper stems from selected plants per plot were separated from the plant and weighted (fresh weight). To obtain stem density, stem fresh weight was divided by the stem volume.

[0951] Upper Stem fresh density (H) (gr./cm³)—measured at harvest (H). Upper stems from selected plants per plot were separated from the plant and weighted (fresh weight). To obtain stem density, stem fresh weight was divided by the stem volume.

[0952] Upper Stem length (F) (cm)—Upper stems from selected plants per plot were separated from the plant at flowering (F). Stems were measured for their length using a ruler.

[0953] Upper Stem length (H) (cm)—Upper stems from selected plants per plot were separated from the plant at harvest (H). Stems were measured for their length using a ruler.

[0954] Upper Stem width (F) (cm)—Upper stems from selected plants per plot were separated from the plant at flowering (F). Stems were measured for their width using a caliber.

[0955] Upper Stem width (H) (cm)—Upper stems from selected plants per plot were separated from the plant at harvest (H). Stems were measured for their width using a caliber.

[0956] Upper Stem volume (H)—was calculated based on Formula 50 above.

[0957] Data parameters collected are summarized in Table 60, herein below.

TABLE 60
Sorghum correlated parameters under normal growth conditions (vectors)

| | Correlation |
|---|---|
| Correlated parameter with | ID |
| Grains yield per plant [gr.] | 1 |
| Heads weight per plant (RP) [kg] | 2 |
| Grains num (SP) [number] | 3 |
| 1000 grain weight [gr.] | 4 |
| Grain area [cm²] | 5 |
| Grain Circularity [cm²/cm²] | 6 |
| Main Head Area [cm²] | 7 |
| Main Head length [cm] | 8 |
| Main Head Width [cm] | 9 |
| All Heads Area [cm²] | 10 |
| All Heads length [cm] | 11 |
| All Heads Width [cm] | 12 |
| Head weight per plant (RP)/water until maturity [gr./lit] | 13 |
| Harvest index (SP) | 14 |
| Heads index (RP) | 15 |
| Head DW (GF) [gr.] | 16 |
| Heads per plant (RP) [number] | 17 |
| Leaves temperature 2 [° C.] | 18 |
| Leaves temperature 6 [° C.] | 19 |
| Stomatal conductance (F) [mmol m⁻² s⁻¹] | 20 |
| Stomatal conductance (GF) [mmol m⁻² s⁻¹] | 21 |
| RWC 2 [%] | 22 |
| Specific leaf area (GF) [cm²/gr.] | 23 |
| Waxy leaf blade [scoring 0-2] | 24 |
| SPAD 2 [SPAD unit] | 25 |
| SPAD 3 [SPAD unit] | 26 |
| % yellow leaves number (F) [%] | 27 |
| % yellow leaves number (H) [%] | 28 |
| % Canopy coverage (GF) [%] | 29 |
| LAI LP-80 (GF) | 30 |
| Leaves area per plant (GF) [cm²] | 31 |
| Plant height (H) [cm] | 32 |
| Plant height growth [cm/day] | 33 |
| Num days to Heading [number] | 34 |
| Num days to Maturity [number] | 35 |
| Vegetative DW per plant [gr.] | 36 |
| Lower Stem dry density (F) [gr./cm³] | 37 |
| Lower Stem dry density (H) [gr./cm³] | 38 |
| Lower Stem fresh density (F) [gr./cm³] | 39 |
| Lower Stem fresh density (H) [gr./cm³] | 40 |
| Lower Stem length (F) [cm] | 41 |
| Lower Stem length (H) [cm] | 42 |
| Lower Stem width (F) [cm] | 43 |
| Lower Stem width (GF) [cm] | 44 |
| Lower Stem width (H) [cm] | 45 |
| Upper Stem dry density (F) [gr./cm³] | 46 |
| Upper Stem dry density (H) [gr./cm³] | 47 |
| Upper Stem fresh density (F) [gr./cm³] | 48 |
| Upper Stem fresh density (H) [gr./cm³] | 49 |
| Upper Stem length (F) [cm] | 50 |
| Upper Stem length (H) [cm] | 51 |
| Upper Stem width (F) [cm] | 52 |
| Upper Stem width (H) [cm] | 53 |
| Upper Stem volume (H) [cm³] | 54 |

Table 60. Provided are the Sorghum correlated parameters (vectors).
“gr.” = grams;
“kg” = kilograms;
“RP” = Rest of plot;
“SP” = Selected plants;
“num” = Number;
“lit” = Liter;
“SPAD” = chlorophyll levels;
″FW″ = Plant Fresh weight;
“DW” = Plant Dry weight;
“GF” = Grain filling growth stage;
“F” = Flowering stage;
“H” = Harvest stage;
“cm” = Centimeter;
“mmol” = millimole.

TABLE 61
Sorghum correlated parameters under drought growth conditions (vectors)

| | Correlation |
|---|---|
| Correlated parameter with | ID |
| Heads weight per plant (RP) [kg] | 1 |
| Grains num (SP) [number] | 2 |
| 1000 grain weight [gr.] | 3 |
| Grains yield per plant [gr.] | 4 |
| Grain area [cm²] | 5 |
| Grain Circularity [cm²/cm²] | 6 |
| Main Head Area [cm²] | 7 |
| Main Head length [cm] | 8 |
| Main Head Width [cm] | 9 |
| All Heads Area [cm²] | 10 |
| All Heads length [cm] | 11 |
| All Heads Width [cm] | 12 |
| Head weight per plant (RP)/water until maturity [gr./lit] | 13 |
| Harvest index (SP) | 14 |
| Heads index (RP) | 15 |
| Head DW (GF) [gr.] | 16 |
| Heads per plant (RP) [number] | 17 |
| Leaves temperature 2 [° C.] | 18 |
| Leaves temperature 6 [° C.] | 19 |
| Stomatal conductance (F) [mmol m⁻² s⁻¹] | 20 |
| Stomatal conductance (GF) [mmol m⁻² s⁻¹] | 21 |
| RWC 2 [%] | 22 |
| Specific leaf area (GF) [cm²/gr.] | 23 |
| Waxy leaf blade [scoring 0-2] | 24 |
| SPAD 2 [SPAD unit] | 25 |
| SPAD 3 [SPAD unit] | 26 |
| % yellow leaves number (F) [%] | 27 |
| % yellow leaves number (H) [%] | 28 |
| % Canopy coverage (GF) [%] | 29 |
| LAI LP-80 (GF) | 30 |
| Leaves area per plant (GF) [cm²] | 31 |
| Plant height (H) [cm] | 32 |
| Plant height growth [cm/day] | 33 |
| Num days to Heading [number] | 34 |
| Num days to Maturity [number] | 35 |
| Vegetative DW per plant [gr.] | 36 |
| Lower Stem dry density (F) [gr./cm³] | 37 |
| Lower Stem dry density (H) [gr./cm³] | 38 |
| Lower Stem fresh density (F) [gr./cm³] | 39 |
| Lower Stem fresh density (H) [gr./cm³] | 40 |
| Lower Stem length (F) [cm] | 41 |
| Lower Stem length (H) [cm] | 42 |
| Lower Stem width (H) [cm] | 43 |
| Upper Stem dry density (F) [gr./cm³] | 44 |
| Upper Stem dry density (H) [gr./cm³] | 45 |
| Upper Stem fresh density (F) [gr./cm³] | 46 |
| Upper Stem fresh density (H) [gr./cm³] | 47 |
| Upper Stem length (F) [cm] | 48 |
| Upper Stem length (H) [cm] | 49 |
| Upper Stem width (F) [cm] | 50 |
| Upper Stem width (H) [cm] | 51 |
| Upper Stem volume (H) [cm³] | 52 |
| Lower Stem width (F) [cm] | 53 |
| Lower Stem width (GF) [cm] | 54 |

Table 61. Provided are the Sorghum correlated parameters (vectors).
“gr.” = grams;
“kg” = kilograms;
“RP” = Rest of plot;
“SP” = Selected plants;
“num” = Number;
“lit” = Liter;
“SPAD” = chlorophyll levels;
″FW″ = Plant Fresh weight;
“DW” = Plant Dry weight;
“GF” = Grain filling growth stage;
“F” = Flowering stage;
“H” = Harvest stage;
“cm” = Centimeter;
“mmol” = millimole.

[0958] Experimental Results

[0959] Twelve different Sorghum hybrids were grown and characterized for different parameters (Tables 60-61). The average for each of the measured parameter was calculated using the JMP software (Tables 62-63) and a subsequent correlation analysis was performed (Tables 66-67). Results were then integrated to the database.

TABLE 62
Measured parameters in Sorghum accessions under normal conditions

| Line/Corr. ID | Line-1 | Line-2 | Line-3 | Line-4 | Line-5 | Line-6 |
|---|---|---|---|---|---|---|
| 1 | 43.90 | 18.00 | 8.50 | 33.20 | 44.30 | 60.20 |
| 2 | 0.057 | 0.037 | 0.031 | 0.045 | 0.041 | 0.066 |
| 3 | 12730 | 6281.9 | 4599.5 | 15183 | 12628 | 17505 |
| 4 | 27.60 | 22.80 | 14.90 | 18.50 | 28.50 | 27.10 |
| 5 | 0.154 | 0.119 | 0.098 | 0.122 | 0.154 | 0.149 |
| 6 | 0.87 | 0.87 | 0.87 | 0.88 | 0.87 | 0.89 |
| 7 | 114.50 | 80.80 | 77.90 | 79.70 | 219.00 | 112.10 |
| 8 | 27.70 | 21.60 | 17.80 | 23.70 | 32.20 | 20.70 |
| 9 | 5.54 | 4.99 | 6.20 | 4.56 | 9.99 | 7.19 |
| 10 | 114.50 | 79.70 | 77.90 | 79.70 | 219.00 | 100.10 |
| 11 | 27.70 | 21.40 | 17.80 | 23.70 | 32.20 | 19.40 |
| 12 | 5.54 | 4.93 | 6.2 | 4.56 | 9.99 | 6.55 |
| 13 | 0.248 | 0.163 | 0.136 | 0.197 | 0.178 | 0.285 |
| 14 | 0.218 | 0.185 | 0.054 | 0.253 | 0.261 | 0.375 |
| 15 | 0.343 | 0.402 | 0.241 | 0.338 | 0.361 | 0.532 |
| 16 | 29.30 | 12.90 | 27.90 | 41.30 | 38.90 | 15.20 |
| 17 | NA | 1.42 | 1.74 | 1.30 | 0.97 | 1.73 |
| 18 | 32.40 | 32.10 | 33.20 | 32.30 | 32.40 | 31.10 |
| 19 | 33.30 | 33.90 | 33.20 | 33.30 | 33.60 | 33.80 |
| 20 | 670.4 | 1017.6 | 584.4 | 640.6 | 350 | 553.5 |
| 21 | 382.9 | 809.4 | 468.7 | 486.9 | 421.5 | 633.1 |
| 22 | 72.10 | 91.70 | 79.50 | 86.70 | 74.00 | 90.60 |
| 23 | 80.20 | 170.30 | 54.30 | 76.90 | 51.40 | 163.10 |
| 24 | NA | 2.00 | NA | NA | NA | 1.06 |
| 25 | 47.80 | 49.30 | 44.70 | 49.10 | 41.70 | 47.20 |
| 26 | 47.70 | 35.40 | 45.80 | 42.10 | 41.40 | 33.40 |
| 27 | 0.611 | 0.853 | 0.548 | 0.314 | 0.713 | 0.573 |
| 28 | 0.406 | 0.111 | 0.37 | 0.126 | 0.485 | 0.149 |
| 29 | 95.00 | 69.20 | 97.50 | 83.60 | 92.80 | 84.30 |
| 30 | 6.27 | NA | 6.11 | 5.42 | 5.43 | NA |
| 31 | 2825.8 | 1911.2 | 2030 | 2866.8 | 1554.7 | 2342.6 |
| 32 | 182.10 | 104.60 | 143.80 | 99.00 | 173.60 | 170.10 |
| 33 | 2.87 | 1.85 | 2.55 | 1.65 | 3.12 | 2.73 |
| 34 | 89.40 | 65.70 | 88.20 | 74.00 | 84.00 | 71.50 |
| 35 | 126 | 107 | 115 | 107 | 107 | 92 |
| 36 | 0.125 | 0.05 | 0.122 | 0.076 | 0.097 | 0.062 |
| 37 | 1.57 | 1.37 | 2.81 | 2.17 | 2.35 | 1.4 |
| 38 | 1.83 | 2.03 | 3.48 | 2.53 | 3.05 | 1.80 |
| 39 | 10.47 | 10.64 | 8.55 | 10.85 | 11.32 | 10.04 |
| 40 | 9.79 | 10.38 | 10.52 | 10.49 | 11.28 | 7.29 |
| 41 | 7.79 | 3.50 | 14.90 | 3.41 | 11.12 | 8.16 |
| 42 | 7.99 | 4.83 | 12.87 | 3.12 | 10.76 | 8.30 |
| 43 | 19.50 | 16.70 | 14.70 | 17.90 | 14.80 | 16.00 |
| 44 | 20.00 | 20.90 | 14.70 | 18.80 | 15.30 | 15.90 |
| 45 | 19.10 | 15.50 | 14.40 | 20.30 | 15.20 | 15.10 |
| 46 | NA | 1.24 | NA | NA | 2.11 | 1.23 |
| 47 | 2.05 | 1.77 | 2.36 | 1.83 | 1.73 | 1.86 |
| 48 | NA | 9.79 | NA | NA | 10.44 | 9.38 |
| 49 | 6.61 | 8.92 | 6.43 | 8.25 | 7.24 | 4.64 |
| 50 | NA | 42.60 | NA | NA | NA | 9.20 |
| 51 | 38.80 | 45.00 | 24.50 | 52.50 | 38.40 | 34.00 |
| 52 | 2352.5 | 2169.1 | 968.8 | 2452.6 | 1997.7 | 2767.5 |
| 53 | 8.23 | 8.98 | 7.11 | 7.13 | 6.81 | 10.42 |
| 54 | 8.74 | 7.46 | 6.99 | 7.68 | 7.83 | 10.07 |

Table 62: Provided are the values of each of the parameters (as described above) measured in Sorghum accessions (Line) under normal conditions. Growth conditions are specified in the experimental procedure section.
“NA” = not available.

TABLE 63
Measured parameters in additional Sorghum accessions under normal growth conditions

| | Line | | | | | |
|---|---|---|---|---|---|---|
| Corr. ID | Line-7 | Line-8 | Line-9 | Line-10 | Line-11 | Line-12 |
| 1 | 32.10 | 49.60 | 39.00 | 54.80 | 55.30 | 64.70 |
| 2 | 0.057 | 0.062 | 0.065 | 0.072 | 0.049 | 0.075 |
| 3 | 13888 | 21510 | 13139 | 16910 | 18205 | 24801 |
| 4 | 18.50 | 18.50 | 23.50 | 25.90 | 24.30 | 20.40 |
| 5 | 0.117 | 0.121 | 0.122 | 0.129 | 0.123 | 0.125 |
| 6 | 0.89 | 0.88 | 0.89 | 0.90 | 0.89 | 0.90 |
| 7 | 85.40 | 139.00 | 98.90 | 114.70 | 154.70 | 147.90 |
| 8 | 21.30 | 30.90 | 22.50 | 24.70 | 28.30 | 30.50 |
| 9 | 5.45 | 6.37 | 5.90 | 6.27 | 7.50 | 6.40 |
| 10 | 85.40 | 139.00 | 70.00 | 78.60 | 152.00 | 145.20 |
| 11 | 21.30 | 30.90 | 19.20 | 21.00 | 27.80 | 30.00 |
| 12 | 5.45 | 6.37 | 4.48 | 4.57 | 7.41 | 6.32 |
| 13 | 0.249 | 0.271 | 0.284 | 0.315 | 0.216 | 0.325 |
| 14 | 0.309 | 0.409 | 0.343 | 0.36 | 0.314 | 0.318 |
| 15 | 0.477 | 0.554 | 0.538 | 0.502 | 0.471 | 0.478 |
| 16 | 10.20 | 27.60 | 31.60 | 25.80 | 21.30 | 74.50 |
| 17 | 1.37 | 1.08 | 2.20 | 1.52 | 1.17 | 1.01 |
| 18 | 32.90 | 33.00 | 31.60 | 32.40 | 32.70 | 32.70 |
| 19 | 33.60 | 33.90 | 32.30 | 32.90 | 32.40 | 33.30 |
| 20 | 473.8 | 796.9 | 879 | 810.3 | 889 | 607.2 |
| 21 | 485.7 | 886 | 730.6 | 886.6 | 785 | 384.5 |
| 22 | 88.80 | 90.20 | 90.80 | 88.50 | 86.70 | 82.00 |
| 23 | 194.10 | 213.70 | 212.00 | 214.60 | 157.40 | 67.70 |
| 24 | 1.13 | 1.44 | 1.00 | 1.75 | 1.00 | NA |
| 25 | 52.10 | 53.70 | 52.60 | 53.90 | 51.80 | 44.10 |
| 26 | 50.20 | 41.90 | 46.80 | 46.80 | 48.60 | 40.10 |
| 27 | 0.584 | 0.544 | 0.208 | 0.484 | 0.351 | 0.574 |
| 28 | 0.076 | 0.022 | 0.018 | 0.129 | 0.096 | 0.424 |
| 29 | 80.60 | 75.70 | 80.20 | 79.70 | 65.90 | 89.60 |
| 30 | NA | NA | NA | NA | NA | 5.79 |
| 31 | 2008.9 | 2212 | 1495.5 | 1997.8 | 2692.1 | 2647.7 |
| 32 | 54.90 | 94.80 | 101.60 | 113.00 | 88.30 | 163.80 |
| 33 | 0.88 | 1.57 | 1.73 | 1.91 | 1.59 | 2.87 |
| 34 | 67.70 | 63.70 | 56.00 | 59.00 | 56.00 | 75.30 |
| 35 | 107 | 92 | 107 | 107 | 107 | 107 |
| 36 | 0.045 | 0.045 | 0.046 | 0.063 | 0.086 | 0.099 |
| 37 | 1.97 | 2.05 | 2.29 | 1.87 | 1.71 | 2.14 |
| 38 | 2.93 | 2.47 | 2.56 | 2.48 | 2.74 | 1.64 |
| 39 | 10.71 | 10.82 | 10.84 | 10.84 | 10.7 | 10.55 |
| 40 | 10.09 | 10.85 | 11 | 11.2 | 7.36 | 8.62 |
| 41 | 2.83 | 3.22 | 4.02 | 4.88 | 2.82 | 8.79 |
| 42 | 2.97 | 3.72 | 5.90 | 5.07 | 3.78 | 9.98 |
| 43 | 17.80 | 18.70 | 13.50 | 15.00 | 14.70 | 16.40 |
| 44 | 21.50 | 21.00 | 19.50 | 16.50 | 19.90 | 19.40 |
| 45 | 17.40 | 16.30 | 13.30 | 15.00 | 16.40 | 18.70 |
| 46 | 1.26 | 1.50 | 1.94 | 1.92 | 1.96 | NA |
| 47 | 1.76 | 1.75 | 1.79 | 1.66 | 1.87 | 1.67 |
| 48 | 10.22 | 9.69 | 9.98 | 10.74 | 10.33 | NA |
| 49 | 7.23 | 7.31 | 7.92 | 7.06 | 5.40 | 4.82 |
| 50 | 26.60 | 60.40 | 53.60 | 55.00 | 44.60 | NA |
| 51 | 28.80 | 59.70 | 52.00 | 54.80 | 45.50 | 48.50 |
| 52 | 1607.7 | 3510.7 | 2907.8 | 3639.5 | 3045.6 | 3301.8 |
| 53 | 9.43 | 9.54 | 8.04 | 8.85 | 7.91 | 8.07 |
| 54 | 8.42 | 8.61 | 8.51 | 9.19 | 9.14 | 9.31 |

Table 63: Provided are the values of each of the parameters (as described above) measured in Sorghum accessions (Line) under normal conditions. Growth conditions are specified in the experimental procedure section. “NA” = not available.

TABLE 64
Measured parameters in Sorghum accessions under drought growth conditions

| | Line | | | | | |
|---|---|---|---|---|---|---|
| Corr. ID | Line-1 | Line-2 | Line-3 | Line-4 | Line-5 | Line-6 |
| 1 | 0.023 | 0.019 | 0.006 | 0.019 | 0.012 | 0.024 |
| 2 | 6967.7 | 5451.7 | 3960.3 | 9838.5 | 6481.7 | 12403 |
| 3 | 24.20 | 19.80 | 14.20 | 14.60 | 25.50 | 20.80 |
| 4 | 23.80 | 13.70 | 7.00 | 18.20 | 20.70 | 34.40 |
| 5 | 0.142 | 0.114 | 0.095 | 0.112 | 0.144 | 0.131 |
| 6 | 0.87 | 0.87 | 0.86 | 0.88 | 0.87 | 0.89 |
| 7 | 72.40 | 96.60 | 32.80 | 55.30 | 131.20 | 85.90 |
| 8 | 22.30 | 24.80 | 12.40 | 19.90 | 27.60 | 19.40 |
| 9 | 4.27 | 5.53 | 3.70 | 3.72 | 7.00 | 5.81 |
| 10 | 72.40 | 93.80 | 30.80 | 55.30 | 131.20 | 76.50 |
| 11 | 22.30 | 24.40 | 12.20 | 19.90 | 27.60 | 18.20 |
| 12 | 4.27 | 5.39 | 3.51 | 3.72 | 7.00 | 5.27 |
| 13 | 0.11 | 0.094 | 0.03 | 0.094 | 0.056 | 0.116 |
| 14 | 0.135 | 0.158 | 0.065 | 0.187 | 0.255 | 0.291 |
| 15 | 0.157 | 0.359 | 0.071 | 0.244 | 0.056 | 0.511 |
| 16 | NA | 12.10 | 24.80 | 37.00 | 23.30 | 11.70 |
| 17 | NA | 2.02 | 1.00 | 1.04 | NA | 1.06 |
| 18 | 36.10 | 35.80 | 35.50 | 36.60 | 35.90 | 33.80 |
| 19 | 35.80 | 36.00 | 36.50 | 38.40 | 35.90 | 36.50 |
| 20 | 30.4 | 774.8 | 61.8 | 68.3 | 31.2 | 330.5 |
| 21 | 135.1 | 561.2 | 94.4 | 276.2 | 64.1 | 217.2 |
| 22 | 65.60 | 78.50 | 83.80 | 54.90 | 69.70 | 74.50 |
| 23 | 75.90 | 143.30 | 62.90 | 44.40 | 61.40 | 106.10 |
| 24 | NA | 2.00 | NA | NA | NA | 1.00 |
| 25 | 45.80 | 47.00 | 38.80 | 38.20 | 35.90 | 43.40 |
| 26 | 43.50 | 27.00 | 36.00 | 34.10 | 27.30 | 25.80 |
| 27 | 0.371 | 0.728 | 0.407 | 0.695 | 0.425 | 0.878 |
| 28 | 0.286 | 0.424 | 0.256 | 0.478 | 0.366 | 0.394 |
| 29 | 86.90 | 61.30 | 75.00 | 77.80 | 75.50 | 80.40 |
| 30 | 3.58 | NA | 2.64 | 3.43 | 2.81 | NA |
| 31 | 3308.1 | 1206 | 2464.6 | 1142.9 | 2116.3 | 1550 |
| 32 | 104.6 | 83.2 | 113 | 69 | 104.2 | 133.5 |
| 33 | 1.59 | 1.56 | 1.83 | 1.28 | 1.8 | 2.02 |
| 34 | 91.50 | 66.30 | 88.00 | 74.70 | 90.00 | 71.00 |
| 35 | 115.00 | 92.00 | 115.00 | 107.00 | 107.00 | 107.00 |
| 36 | 0.082 | 0.039 | 0.086 | 0.062 | 0.017 | 0.048 |
| 37 | 1.76 | 1.46 | 2.27 | 2.78 | 2.39 | 1.28 |
| 38 | 1.96 | 1.6 | 2.27 | 2.49 | 3.56 | 1.25 |
| 39 | 9.62 | 10.46 | 7.49 | 10.79 | 10.25 | 9.66 |
| 40 | 9.68 | 8.31 | 7.38 | 10.11 | 10.72 | 5.51 |
| 41 | 7.79 | 4.03 | 16.46 | 3.29 | 10.83 | 10.82 |
| 42 | 7.06 | 4.51 | 16.23 | 3.31 | 9.88 | 10.5 |
| 43 | 20.10 | 16.10 | 14.40 | 18.50 | 15.50 | 14.10 |
| 44 | NA | 1.44 | NA | NA | NA | 1.38 |
| 45 | 2.33 | 1.43 | 2.17 | 1.92 | 1.85 | 1.66 |
| 46 | 0.86 | 9.89 | NA | NA | NA | 8.1 |
| 47 | 9.45 | 5.72 | 7.26 | 8.6 | 6.53 | 3.6 |
| 48 | 25.00 | 40.00 | NA | NA | NA | 15.90 |
| 49 | 26.60 | 39.60 | 15.50 | 31.10 | 31.10 | 20.70 |
| 50 | 1288.2 | 2524.3 | 468.4 | 1128.6 | 1370.3 | 1724.9 |
| 51 | 10.08 | 9.42 | 6.42 | 6.77 | 7.81 | 9.7 |
| 52 | 7.79 | 8.92 | 5.87 | 6.63 | 7.45 | 10.2 |
| 53 | 19.20 | 16.60 | 14.90 | 18.40 | 15.80 | 14.00 |
| 54 | 19.00 | 18.40 | 16.00 | 19.10 | 15.50 | 14.30 |

Table 64: Provided are the values of each of the parameters (as described above) measured in Sorghum accessions (Line) under drought conditions. Growth conditions are specified in the experimental procedure section.

TABLE 65
Measured parameters in additional Sorghum accessions under drought growth conditions

| | Line | | | | | |
|---|---|---|---|---|---|---|
| Corr. ID | Line-7 | Line-8 | Line-9 | Line-10 | Line-11 | Line-12 |
| 1 | 0.026 | 0.035 | 0.042 | 0.05 | 0.033 | 0.031 |
| 2 | 9979.9 | 17494.2 | 14526.2 | 15729 | 10949.1 | 13808.5 |
| 3 | 15.40 | 13.30 | 17.90 | 20.20 | 18.70 | 18.00 |
| 4 | 19.10 | 29.20 | 31.70 | 40.20 | 25.20 | 29.50 |
| 5 | 0.109 | 0.102 | 0.107 | 0.116 | 0.111 | 0.12 |
| 6 | 0.89 | 0.88 | 0.9 | 0.9 | 0.9 | 0.89 |
| 7 | 68.70 | 114.60 | 94.20 | 104.20 | 125.80 | 87.40 |
| 8 | 19.90 | 31.10 | 22.20 | 24.40 | 25.30 | 24.80 |
| 9 | 4.62 | 5.02 | 5.57 | 5.70 | 7.39 | 4.77 |
| 10 | 67.50 | 112.60 | 82.80 | 100.50 | 122.90 | 86.30 |
| 11 | 19.60 | 30.80 | 21.00 | 24.00 | 24.80 | 24.40 |
| 12 | 4.57 | 4.96 | 4.99 | 5.56 | 7.29 | 4.72 |
| 13 | 0.127 | 0.171 | 0.203 | 0.244 | 0.16 | 0.151 |
| 14 | 0.235 | 0.325 | 0.335 | 0.342 | 0.222 | 0.223 |
| 15 | 0.445 | 0.48 | 0.544 | 0.524 | 0.462 | 0.348 |
| 16 | 9.30 | 19.30 | 33.10 | 27.30 | 24.70 | 50.40 |
| 17 | 1.14 | 1.00 | 1.18 | 1.11 | 1.29 | 0.85 |
| 18 | 37.50 | 41.20 | 36.50 | 37.00 | 36.80 | 35.90 |
| 19 | 36.20 | 36.50 | 35.00 | 36.30 | 35.80 | 36.50 |
| 20 | 387.7 | 582.1 | 985.6 | 835 | 753.4 | 54.2 |
| 21 | 81.2 | 129.8 | 241.6 | 322.9 | 257 | 127.2 |
| 22 | 71.70 | 66.90 | 68.60 | 68.20 | 70.70 | 76.30 |
| 23 | 128.70 | 132.90 | 138.50 | 133.30 | 78.30 | 47.30 |
| 24 | 1.25 | 1.69 | 1.12 | 1.75 | 1.38 | NA |
| 25 | 47.60 | 44.70 | 51.90 | 48.80 | 40.00 | 37.60 |
| 26 | 42.90 | 30.90 | 43.70 | 37.80 | 38.40 | 32.50 |
| 27 | 0.678 | 0.807 | 0.788 | 0.731 | 0.741 | 0.831 |
| 28 | 0.326 | 0.329 | 0.364 | 0.377 | 0.469 | 0.625 |
| 29 | 64.20 | 70.80 | 64.10 | 75.70 | 72.10 | 87.20 |
| 30 | NA | NA | NA | NA | NA | 3.94 |
| 31 | 1476.2 | 1773.1 | 1052.7 | 1408.5 | 417.2 | 1247.1 |
| 32 | 47.8 | 80.9 | 93.4 | 104.1 | 75.8 | 105.6 |
| 33 | 0.92 | 1.44 | 1.6 | 1.87 | 1.33 | 1.9 |
| 34 | 68.30 | 63.00 | 56.00 | 59.70 | 56.00 | 76.70 |
| 35 | 92.00 | 92.00 | 92.00 | 92.00 | 92.00 | 107.00 |
| 36 | 0.038 | 0.033 | 0.033 | 0.044 | 0.061 | 0.076 |
| 37 | 1.75 | 1.69 | 2.37 | 1.61 | 1.52 | 2.03 |
| 38 | 2.38 | 1.71 | 1.66 | 1.64 | 2.36 | 1.6 |
| 39 | 10.87 | 10.36 | 11.28 | 10.7 | 10.71 | 9.68 |
| 40 | 7.51 | 7.54 | 8.75 | 8.34 | 4.52 | 7.76 |
| 41 | 2.82 | 4.04 | 4.75 | 4.72 | 3.29 | 7.66 |
| 42 | 3.11 | 4.12 | 4.31 | 5.74 | 3.53 | 5.9 |
| 43 | 17.00 | 16.40 | 13.70 | 14.70 | 14.00 | 19.50 |
| 44 | 1.47 | 1.81 | 2.12 | 1.79 | 2.07 | NA |
| 45 | 1.55 | 1.65 | 1.62 | 1.63 | 1.71 | 1.76 |
| 46 | 10.69 | 10.12 | 10.49 | 10.01 | 10.56 | NA |
| 47 | 4.61 | 5.18 | 5.39 | 5.4 | 2.98 | 5.53 |
| 48 | 25.80 | 50.10 | 46.80 | 46.90 | 44.20 | NA |
| 49 | 24.10 | 48.60 | 48.80 | 48.70 | 38.20 | 26.10 |
| 50 | 1507.8 | 2865.3 | 2857.9 | 2956 | 1964.3 | 1288.5 |
| 51 | 9.07 | 7.92 | 8.17 | 8.54 | 7.67 | 7.36 |
| 52 | 8.88 | 8.6 | 8.59 | 8.73 | 8.13 | 7.85 |
| 53 | 17.20 | 14.90 | 13.30 | 14.50 | 13.80 | 17.30 |
| 54 | 17.20 | 20.00 | 16.00 | 16.90 | 17.00 | 19.60 |

Table 65: Provided are the values of each of the parameters (as described above) measured in Sorghum accessions (Line) under drought conditions. Growth conditions are specified in the experimental procedure section.

TABLE 66
Correlation between the expression level of selected genes of some embodiments
of the invention in various tissues and the phenotypic performance
under normal conditions across Sorghum accessions

| Gene | | | Exp. | Corr. | Gene | | | Exp. | Corr. |
|---|---|---|---|---|---|---|---|---|---|
| Name | R | P value | set | ID | Name | R | P value | set | ID |
| LBY489 | 0.72 | 6.74E−02 | 2 | 53 | LBY489 | 0.78 | 6.69E−02 | 6 | 24 |
| LBY489 | 0.70 | 2.38E−02 | 6 | 10 | LBY489 | 0.71 | 1.43E−02 | 3 | 25 |
| LBY489 | 0.71 | 1.52E−02 | 3 | 51 | LBY489 | 0.82 | 4.56E−02 | 3 | 50 |
| LBY489 | 0.78 | 4.93E−03 | 3 | 20 | LBY489 | 0.74 | 9.92E−03 | 3 | 23 |
| LBY492 | 0.73 | 6.37E−02 | 2 | 39 | LBY492 | 0.87 | 1.09E−02 | 2 | 37 |
| LBY492 | 0.72 | 2.00E−02 | 6 | 35 | LBY492 | 0.82 | 3.84E−03 | 6 | 47 |
| LBY492 | 0.92 | 1.90E−04 | 4 | 10 | LBY492 | 0.76 | 1.09E−02 | 4 | 9 |
| LBY492 | 0.79 | 7.01E−03 | 4 | 11 | LBY492 | 0.75 | 1.17E−02 | 4 | 8 |
| LBY492 | 0.88 | 8.13E−04 | 4 | 12 | LBY492 | 0.86 | 1.44E−03 | 4 | 7 |
| LBY492 | 0.74 | 9.51E−03 | 3 | 16 | LBY492 | 0.71 | 7.22E−02 | 1 | 37 |
| LBY493 | 0.73 | 6.23E−02 | 2 | 38 | LBY493 | 0.92 | 3.54E−03 | 2 | 49 |
| LBY493 | 0.75 | 5.30E−02 | 2 | 40 | LBY493 | 0.86 | 1.37E−02 | 1 | 51 |
| LBY493 | 0.70 | 7.94E−02 | 1 | 40 | LBY531 | 0.70 | 7.80E−02 | 2 | 29 |
| LBY531 | 0.74 | 5.78E−02 | 2 | 33 | LBY531 | 0.77 | 4.15E−02 | 2 | 42 |
| LBY531 | 0.77 | 4.49E−02 | 2 | 32 | LBY531 | 0.71 | 7.44E−02 | 2 | 41 |
| LBY531 | 0.93 | 7.54E−03 | 6 | 50 | LBY531 | 0.74 | 8.67E−03 | 3 | 21 |
| LBY531 | 0.85 | 1.48E−02 | 1 | 45 | LYD1002 | 0.74 | 5.54E−02 | 2 | 33 |
| LYD1002 | 0.74 | 5.81E−02 | 2 | 54 | LYD1002 | 0.71 | 7.11E−02 | 2 | 42 |
| LYD1002 | 0.79 | 3.53E−02 | 2 | 32 | LYD1002 | 0.79 | 6.58E−03 | 4 | 33 |
| LYD1002 | 0.73 | 1.65E−02 | 4 | 4 | LYD1002 | 0.74 | 1.45E−02 | 4 | 5 |
| LYD1002 | 0.86 | 1.32E−03 | 4 | 42 | LYD1002 | 0.77 | 8.59E−03 | 4 | 28 |
| LYD1002 | 0.74 | 1.37E−02 | 4 | 32 | LYD1002 | 0.84 | 2.12E−03 | 4 | 41 |
| LYD1002 | 0.75 | 5.05E−02 | 1 | 4 | LYD1002 | 0.73 | 6.30E−02 | 1 | 5 |
| LYD1002 | 0.76 | 4.89E−02 | 1 | 43 | LYD1002 | 0.76 | 4.93E−02 | 1 | 12 |
| MGP93 | 0.87 | 1.02E−02 | 2 | 3 | MGP93 | 0.88 | 8.27E−03 | 2 | 1 |
| MGP93 | 0.77 | 4.27E−02 | 2 | 16 | MGP93 | 0.74 | 8.94E−03 | 5 | 28 |
| MGP93 | 0.76 | 1.12E−02 | 6 | 35 | MGP93 | 0.86 | 1.48E−03 | 6 | 47 |
| MGP93 | 0.90 | 1.31E−04 | 3 | 47 | | | | | |

Table 66. Correlations (R) between the genes expression levels in various tissues (Table 58) and the phenotypic performance according to correlated parameters specified in Table 60.
“Corr. ID”—correlation vector ID.
“Exp. Set”—Expression set.
“R” = Pearson correlation coefficient;
“P” = p value.

TABLE 67
Correlation between the expression level of selected genes
of some embodiments of the invention in various tissues and
the phenotypic performance under drought across Sorghum accessions

| Gene | | | Exp. | Corr. | Gene | | | Exp. | Corr. |
|---|---|---|---|---|---|---|---|---|---|
| Name | R | P value | set | ID | Name | R | P value | set | ID |
| LBY489 | 0.81 | 1.43E−02 | 1 | 49 | LBY489 | 0.91 | 5.03E−03 | 1 | 48 |
| LBY489 | 0.71 | 4.70E−02 | 1 | 54 | LBY489 | 0.78 | 2.30E−02 | 1 | 50 |
| LBY489 | 0.74 | 8.93E−02 | 1 | 24 | LBY489 | 0.72 | 1.09E−01 | 1 | 44 |
| LBY489 | 0.72 | 1.29E−02 | 5 | 11 | LBY489 | 0.72 | 1.17E−02 | 5 | 8 |
| LBY489 | 0.77 | 5.28E−03 | 3 | 25 | LBY489 | 0.79 | 3.89E−03 | 3 | 20 |
| LBY489 | 0.75 | 7.69E−03 | 3 | 52 | LBY489 | 0.72 | 1.23E−02 | 3 | 50 |
| LBY489 | 0.94 | 2.37E−05 | 3 | 23 | LBY489 | 0.83 | 2.10E−02 | 3 | 46 |
| LBY492 | 0.88 | 2.04E−02 | 1 | 17 | LBY492 | 0.87 | 2.22E−03 | 6 | 34 |
| LBY492 | 0.74 | 2.38E−02 | 6 | 41 | LBY492 | 0.93 | 3.11E−04 | 6 | 35 |
| LBY492 | 0.71 | 3.37E−02 | 6 | 29 | LBY492 | 0.91 | 6.64E−04 | 6 | 36 |
| LBY492 | 0.83 | 4.31E−02 | 4 | 44 | LBY492 | 0.76 | 4.68E−02 | 4 | 46 |
| LBY492 | 0.71 | 1.34E−02 | 3 | 34 | LBY492 | 0.72 | 1.18E−02 | 3 | 31 |
| LBY492 | 0.86 | 7.31E−04 | 3 | 45 | LBY492 | 0.72 | 1.18E−02 | 3 | 47 |
| LBY492 | 0.73 | 1.15E−02 | 3 | 35 | LBY492 | 0.90 | 5.51E−03 | 2 | 16 |
| LBY493 | 0.71 | 4.77E−02 | 1 | 13 | LBY493 | 0.80 | 1.69E−02 | 1 | 39 |
| LBY493 | 0.87 | 5.51E−03 | 1 | 49 | LBY493 | 0.89 | 8.06E−03 | 1 | 48 |
| LBY493 | 0.86 | 6.26E−03 | 1 | 20 | LBY493 | 0.87 | 5.06E−03 | 1 | 50 |
| LBY493 | 0.77 | 2.54E−02 | 1 | 23 | LBY493 | 0.71 | 4.77E−02 | 1 | 1 |
| LBY493 | 0.72 | 6.64E−02 | 1 | 46 | LBY531 | 0.83 | 2.02E−02 | 6 | 48 |
| LBY531 | 0.79 | 1.98E−02 | 6 | 16 | LBY531 | 0.72 | 1.05E−01 | 6 | 44 |
| LBY531 | 0.71 | 1.49E−02 | 4 | 41 | LBY531 | 0.77 | 5.10E−03 | 4 | 35 |
| LBY531 | 0.73 | 1.02E−02 | 4 | 42 | LBY531 | 0.74 | 8.81E−03 | 3 | 51 |
| LBY531 | 0.79 | 6.08E−02 | 3 | 44 | LBY531 | 0.80 | 1.68E−02 | 2 | 35 |
| LBY531 | 0.73 | 4.07E−02 | 2 | 36 | LYD1002 | 0.78 | 6.49E−02 | 1 | 17 |
| LYD1002 | 0.73 | 1.09E−02 | 5 | 10 | LYD1002 | 0.84 | 1.31E−03 | 5 | 9 |
| LYD1002 | 0.84 | 1.19E−03 | 5 | 12 | LYD1002 | 0.74 | 8.91E−03 | 5 | 7 |
| LYD1002 | 0.73 | 1.12E−02 | 4 | 21 | LYD1002 | 0.90 | 9.19E−04 | 4 | 17 |
| LYD1002 | 0.83 | 1.72E−03 | 3 | 52 | MGP93 | 0.78 | 2.16E−02 | 1 | 42 |
| MGP93 | 0.75 | 3.28E−02 | 1 | 41 | MGP93 | 0.77 | 5.83E−03 | 5 | 28 |
| MGP93 | 0.75 | 3.28E−02 | 1 | 32 | MGP93 | 0.77 | 5.40E−03 | 3 | 34 |
| MGP93 | 0.72 | 1.22E−02 | 4 | 38 | MGP93 | 0.80 | 1.63E−02 | 2 | 9 |
| MGP93 | 0.79 | 3.63E−03 | 3 | 38 | MGP93 | 0.75 | 3.06E−02 | 2 | 12 |

Table 67. Provided are the correlations (R) between the genes expression levels in various tissues (Table 59) and the phenotypic performance according to correlated parameters specified in Table 61.
“Corr. ID”—correlation vector ID
“Exp. Set”—Expression set.
“R” = Pearson correlation coefficient;
“P” = p value.

### Example 8

### Production of Maize Transcriptome and High Throughput Correlation Analysis Using 60K Maize Oligonucleotide Micro-Array

[0960] In order to produce a high throughput correlation analysis between plant phenotype and gene expression level, the present inventors utilized a maize oligonucleotide micro-array, produced by Agilent Technologies [chem. (dot) agilent (dot) com/Scripts/PDS (dot) asp?1Page=50879]. The array oligonucleotide represents about 45,000 maize genes and transcripts.

[0961] Correlation of Maize Hybrids Across Ecotypes Grown Under Regular Growth Conditions

[0962] Experimental Procedures

[0963] Twelve Maize hybrids were grown in 3 repetitive plots, in field. Maize seeds were planted and plants were grown in the field using commercial fertilization and irrigation protocols (normal growth conditions), which included 485 m³ water per dunam (1000 square meters) per entire growth period and fertilization of 30 units of URAN® 21% fertilization per dunam per entire growth period. In order to define correlations between the levels of RNA expression with stress and yield components or vigor related parameters, the 12 different maize hybrids were analyzed. Among them, 10 hybrids encompassing the observed variance were selected for RNA expression analysis. The correlation between the RNA levels and the characterized parameters were analyzed using Pearson correlation test [davidmlane (dot) com/hyperstat/A34739 (dot) html].

[0964] Analyzed Maize tissues—10 selected maize hybrids were sampled in three time points (TP2=V2-V3 (when two to three collar leaf are visible, rapid growth phase and kernel row determination begins), TP5=R1-R2 (silking-blister), TP6=R3-R4 (milk-dough). Four types of plant tissues [Ear, flag leaf indicated in Table as leaf, grain distal part, and internode] were sampled and RNA was extracted as described in “GENERAL EXPERIMENTAL AND BIOINFORMATICS METHODS”. For convenience, each micro-array expression information tissue type has received a Set ID as summarized in Table 68 below.

TABLE 68
Tissues used for Maize transcriptome expression sets

| Expression Set | Set ID |
|---|---|
| Ear under normal conditions at reproductive stage: R1-R2 | 1 |
| Ear under normal conditions at reproductive stage: R3-R4 | 2 |
| Internode under normal conditions at vegetative stage: | 3 |
| Vegetative V2-3 | |
| Internode under normal conditions at reproductive stage: R1-R2 | 4 |
| Internode under normal conditions at reproductive stage: R3-R4 | 5 |
| Leaf under normal conditions at vegetative stage: Vegetative | 6 |
| V2-3 | |
| Leaf under normal conditions at reproductive stage: R1-R2 | 7 |
| Grain distal under normal conditions at reproductive stage: | 8 |
| R1-R2 | |

Table 68: Provided are the maize transcriptome expression sets.
Leaf = the leaf below the main ear; Ear = the female flower at the anthesis day. Grain Distal = maize developing grains from the cob extreme area; Internodes = internodes located above and below the main ear in the plant.

[0965] The following parameters were collected using digital imaging system:

[0966] Grain Area (cm²)—At the end of the growing period the grains were separated from the ear. A sample of ˜200 grains was weighted, photographed and images were processed using the below described image processing system. The grain area was measured from those images and was divided by the number of grains.

[0967] Grain Length and Grain width (cm)—At the end of the growing period the grains were separated from the ear. A sample of ˜200 grains were weighted, photographed and images were processed using the below described image processing system. The sum of grain lengths /or width (longest axis) was measured from those images and was divided by the number of grains.

[0968] Ear Area (cm²)—At the end of the growing period 5 ears were photographed and images were processed using the below described image processing system. The ear area was measured from those images and was divided by the number of ears.

[0969] Ear Length and Ear Width (cm)—At the end of the growing period 5 ears were photographed and images were processed using the below described image processing system. The ear length and width (longest axis) was measured from those images and was divided by the number of ears.

[0970] The image processing system used, which consists of a personal desktop computer (Intel P4 3.0 GHz processor) and a public domain program—ImageJ 1.37, Java based image processing software, was developed at the U.S. National Institutes of Health and is freely available on the internet at rsbweb (dot) nih (dot) gov/. Images were captured in resolution of 10 Mega Pixels (3888×2592 pixels) and stored in a low compression JPEG (Joint Photographic Experts Group standard) format. Next, image processing output data for seed area and seed length was saved to text files and analyzed using the JMP statistical analysis software (SAS institute).

[0971] Additional parameters were collected either by sampling 6 plants per plot or by measuring the parameter across all the plants within the plot.

[0972] Normalized Grain Weight per plant (gr.)—At the end of the experiment all ears from plots within blocks A-C were collected. Six ears were separately threshed and grains were weighted, all additional ears were threshed together and weighted as well. The average grain weight per ear was calculated by dividing the total grain weight by number of total ears per plot (based on plot). In case of 5 ears, the total grains weight of 5 ears was divided by 5.

[0973] Ear FW (gr.)—At the end of the experiment (when ears were harvested) total and 6 selected ears per plots within blocks A-C were collected separately. The plants (total and 6) were weighted (gr.) separately and the average ear per plant was calculated for total (Ear FW per plot) and for 6 plants (Ear FW per plant).

[0974] Plant height and Ear height [cm]—Plants were characterized for height at harvesting. In each measure, 6 plants were measured for their height using a measuring tape. Height was measured from ground level to top of the plant below the tassel. Ear height was measured from the ground level to the place where the main ear is located.

[0975] Leaf number per plant [num]—Plants were characterized for leaf number during growing period at 5 time points. In each measure, plants were measured for their leaf number by counting all the leaves of 3 selected plants per plot.

[0976] Relative Growth Rate was calculated using Formula 7 (described above).

[0977] SPAD—Chlorophyll content was determined using a Minolta SPAD 502 chlorophyll meter and measurement was performed 64 days post sowing. SPAD meter readings were done on young fully developed leaves. Three measurements per leaf were taken per plot. Data were taken after 46 and 54 days after (post) sowing (DPS).

[0978] Dry weight per plant—At the end of the experiment (when inflorescence were dry) all vegetative material from plots within blocks A-C were collected.

[0979] Dry weight=total weight of the vegetative portion above ground (excluding roots) after drying at 70° C. in oven for 48 hours.

[0980] Harvest Index (HI) (Maize)—The harvest index was calculated using Formula 17 above.

[0981] Percent Filled Ear [%]—was calculated as the percentage of the Ear area with grains out of the total ear.

[0982] Cob diameter [mm]—The diameter of the cob without grains was measured using a ruler.

[0983] Kernel Row Number per Ear [number]—The number of rows in each ear was counted.

TABLE 69
Maize correlated parameters (vectors)

| Correlated parameter with | Corr. ID |
|---|---|
| SPAD 54 DPS [SPAD unit] at normal growth conditions | 1 |
| SPAD 46 DPS [SPAD unit] at normal growth conditions | 2 |
| Relative Growth Rate [leaves/day] at normal growth | 3 |
| conditions | |
| Plant height [cm] at normal growth conditions | 4 |
| Ear height [cm] at normal growth conditions | 5 |
| Leaf number per plant [num] at normal growth conditions | 6 |
| Ear Length [cm] at normal growth conditions | 7 |
| Percent Filled Ear [%] at normal growth conditions | 8 |
| Cob diameter [mm] at normal growth conditions | 9 |
| Kernel Row Number per Ear [num] at normal growth | 10 |
| conditions | |
| Dry weight per plant [gr.] at normal growth conditions | 11 |
| Ear FW (per plant) [gr.] at normal growth conditions | 12 |
| Ear FW (per plot) [gr.] at normal growth conditions | 14 |
| Normalized Grain Weight per plant (per plot) [gr.] at | 14 |
| normal growth conditions | |
| Normalized Grain Weight per plant (per plant) [gr.] at | 15 |
| normal growth conditions | |
| Ear Area [cm²] at normal growth conditions | 16 |
| Ear Width [cm] at normal growth conditions | 17 |
| Grain Area [cm²] at normal growth conditions | 19 |
| Grain Length [cm] at normal growth conditions | 20 |
| Grain width [cm] at normal growth conditions | 21 |

Table 69. SPAD 46 DPS and SPAD 54 DPS = Chlorophyll level after 46 and 54 days after sowing (DPS), respectively.
“FW” = fresh weight; “Corr.” = correlation.

[0984] Experimental Results

[0985] Twelve different maize hybrids were grown and characterized for different parameters. The correlated parameters are described in Table 69. The average for each of the measured parameters was calculated using the JMP software (Tables 70-71) and subsequent correlation analysis was performed (Table 72). Results were then integrated to the database.

TABLE 70
Measured parameters in Maize accessions under normal conditions

| | Line | | | | | |
|---|---|---|---|---|---|---|
| Corr. ID | Line-1 | Line-2 | Line-3 | Line-4 | Line-5 | Line-6 |
| 1 | 54.3 | 57.2 | 56 | 59.7 | 54.8 | 59.1 |
| 2 | 51.7 | 56.4 | 53.5 | 55.2 | 55.3 | 59.4 |
| 3 | 0.283 | 0.221 | 0.281 | 0.269 | 0.306 | 0.244 |
| 4 | 278.1 | 260.5 | 275.1 | 238.5 | 286.9 | 224.8 |
| 5 | 135.2 | 122.3 | 132 | 114 | 135.3 | 94.3 |
| 6 | 12 | 11.1 | 11.7 | 11.8 | 11.9 | 12.3 |
| 7 | 19.7 | 19.1 | 20.5 | 21.3 | 20.9 | 18.2 |
| 8 | 80.6 | 86.8 | 82.1 | 92.7 | 80.4 | 82.8 |
| 9 | 29 | 25.1 | 28.1 | 25.7 | 28.7 | 25.8 |
| 10 | 16.2 | 14.7 | 16.2 | 15.9 | 16.2 | 15.2 |
| 11 | 657.5 | 491.7 | 641.1 | 580.6 | 655.6 | 569.4 |
| 12 | 245.8 | 208.3 | 262.2 | 263.9 | 272.2 | 177.8 |
| 14 | 278.2 | 217.5 | 288.3 | 247.9 | 280.1 | 175.8 |
| 15 | 153.9 | 135.9 | 152.5 | 159.2 | 140.5 | 117.1 |
| 16 | 85.1 | 85.8 | 90.5 | 96 | 91.6 | 72.4 |
| 17 | 5.58 | 5.15 | 5.67 | 5.53 | 5.73 | 5.23 |
| 18 | 0.916 | 0.922 | 0.927 | 0.917 | 0.908 | 0.95 |
| 19 | 0.753 | 0.708 | 0.755 | 0.766 | 0.806 | 0.713 |
| 20 | 1.17 | 1.09 | 1.18 | 1.2 | 1.23 | 1.12 |
| 21 | 0.81 | 0.814 | 0.803 | 0.803 | 0.824 | 0.803 |

Table 70. Provided are the values of each of the parameters (as described above) measured in maize accessions (Line) under regular growth conditions. Growth conditions are specified in the experimental procedure section.
“Corr.” = correlation.

TABLE 71
Additional measured parameters in
Maize accessions under normal growth conditions

| | Line | | | | | |
|---|---|---|---|---|---|---|
| Corr. | Line-7 | Line-8 | Line-9 | Line-10 | Line-11 | Line-12 |
| 1 | 58 | 60.4 | 54.8 | 51.4 | 61.1 | 53.3 |
| 2 | 58.5 | 55.9 | 53 | 53.9 | 59.7 | 50 |
| 3 | 0.244 | 0.266 | — | 0.194 | 0.301 | — |
| 4 | 264.4 | 251.6 | — | 163.8 | 278.4 | — |
| 5 | 120.9 | 107.7 | — | 60.4 | 112.5 | — |
| 6 | 12.4 | 12.2 | — | 9.3 | 12.6 | — |
| 7 | 19 | 18.6 | — | 16.7 | 21.7 | — |
| 8 | 73.2 | 81.1 | — | 81.1 | 91.6 | — |
| 9 | 26.4 | 25.2 | — | 26.7 | — | — |
| 10 | 16 | 14.8 | — | 14.3 | 15.4 | — |
| 11 | 511.1 | 544.4 | — | 574.2 | 522.2 | — |
| 12 | 188.9 | 197.2 | — | 141.1 | 261.1 | — |
| 14 | 192.5 | 204.7 | — | 142.7 | 264.2 | — |
| 15 | 123.2 | 131.3 | — | 40.8 | 170.7 | — |
| 16 | 74 | 76.5 | — | 55.2 | 95.4 | — |
| 17 | 5.22 | 5.33 | — | 4.12 | 5.58 | — |
| 18 | 0.873 | 0.939 | — | 0.796 | 0.958 | — |
| 19 | 0.714 | 0.753 | — | 0.502 | 0.762 | — |
| 20 | 1.14 | 1.13 | — | 0.92 | 1.18 | — |
| 21 | 0.791 | 0.837 | — | 0.675 | 0.812 | — |

Table 71. Provided are the values of each of the parameters (as described above) measured in maize accessions (Line) under regular growth conditions. Growth conditions are specified in the experimental procedure section.
“Corr.” = correlation.

TABLE 72
Correlation between the expression level of selected genes of some embodiments
of the invention in various tissues and the phenotypic performance
under normal conditions across maize accessions

| Gene | | | Exp. | Corr. | Gene | | | Exp. | Corr. |
|---|---|---|---|---|---|---|---|---|---|
| Name | R | P value | set | ID | Name | R | P value | set | ID |
| LBY477 | 0.80 | 3.00E−02 | 1 | 6 | LBY477 | 0.81 | 2.67E−02 | 1 | 17 |
| LBY477 | 0.71 | 7.28E−02 | 1 | 18 | LBY477 | 0.85 | 1.57E−02 | 1 | 20 |
| LBY477 | 0.96 | 1.33E−04 | 8 | 19 | LBY477 | 0.92 | 1.10E−03 | 8 | 3 |
| LBY477 | 0.85 | 7.45E−03 | 8 | 13 | LBY477 | 0.88 | 3.62E−03 | 8 | 18 |
| LBY477 | 0.73 | 4.01E−02 | 8 | 14 | LBY477 | 0.89 | 2.72E−03 | 8 | 12 |
| LBY477 | 0.87 | 5.14E−03 | 8 | 11 | LBY477 | 0.85 | 7.60E−03 | 8 | 7 |
| LBY477 | 0.86 | 6.53E−03 | 8 | 10 | LBY477 | 0.79 | 1.97E−02 | 8 | 9 |
| LBY477 | 0.96 | 1.39E−04 | 8 | 16 | LBY478 | 0.70 | 5.17E−02 | 5 | 17 |
| LBY478 | 0.76 | 4.89E−02 | 4 | 19 | LBY478 | 0.71 | 7.42E−02 | 4 | 3 |
| LBY478 | 0.72 | 6.65E−02 | 4 | 13 | LBY478 | 0.73 | 6.26E−02 | 4 | 12 |
| LBY478 | 0.74 | 5.97E−02 | 4 | 11 | LBY478 | 0.96 | 4.88E−04 | 4 | 10 |
| LBY478 | 0.74 | 5.78E−02 | 4 | 16 | LBY478 | 0.71 | 7.29E−02 | 7 | 6 |
| LBY478 | 0.71 | 5.08E−02 | 8 | 5 | LBY478 | 0.73 | 4.05E−02 | 8 | 4 |
| LBY478 | 0.74 | 1.46E−02 | 6 | 2 | LBY478 | 0.79 | 1.22E−02 | 3 | 8 |
| LBY478 | 0.96 | 2.81E−03 | 2 | 20 | LBY479 | 0.78 | 4.03E−02 | 7 | 19 |
| LBY479 | 0.75 | 5.07E−02 | 7 | 15 | LBY479 | 0.80 | 3.02E−02 | 7 | 5 |
| LBY479 | 0.75 | 5.03E−02 | 7 | 13 | LBY479 | 0.71 | 7.25E−02 | 7 | 18 |
| LBY479 | 0.74 | 5.92E−02 | 7 | 14 | LBY479 | 0.74 | 5.49E−02 | 7 | 12 |
| LBY479 | 0.86 | 1.31E−02 | 7 | 10 | LBY479 | 0.79 | 3.27E−02 | 7 | 16 |
| LBY481 | 0.71 | 7.57E−02 | 4 | 19 | LBY481 | 0.81 | 2.71E−02 | 4 | 3 |
| LBY481 | 0.76 | 4.84E−02 | 4 | 15 | LBY481 | 0.80 | 3.26E−02 | 4 | 4 |
| LBY481 | 0.83 | 2.09E−02 | 4 | 13 | LBY481 | 0.77 | 4.07E−02 | 4 | 14 |
| LBY481 | 0.79 | 3.50E−02 | 4 | 12 | LBY481 | 0.81 | 2.85E−02 | 4 | 7 |
| LBY481 | 0.70 | 7.94E−02 | 4 | 10 | LBY481 | 0.76 | 4.70E−02 | 4 | 16 |
| LBY481 | 0.81 | 4.91E−02 | 2 | 20 | LBY517 | 0.70 | 7.78E−02 | 4 | 5 |
| LBY517 | 0.76 | 2.95E−02 | 8 | 11 | LBY517 | 0.73 | 3.81E−02 | 8 | 16 |
| LBY517 | 0.73 | 9.69E−02 | 2 | 5 | LBY517 | 0.77 | 7.34E−02 | 2 | 11 |
| LBY518 | 0.74 | 3.50E−02 | 5 | 3 | LBY518 | 0.75 | 3.30E−02 | 5 | 18 |
| LBY518 | 0.78 | 3.76E−02 | 1 | 3 | LBY519 | 0.78 | 3.83E−02 | 4 | 10 |
| LBY519 | 0.76 | 2.84E−02 | 8 | 3 | LBY519 | 0.74 | 3.75E−02 | 8 | 18 |
| LBY519 | 0.73 | 3.89E−02 | 8 | 11 | LBY519 | 0.81 | 1.41E−02 | 8 | 9 |
| LBY519 | 0.81 | 5.18E−02 | 2 | 8 | — | — | — | — | — |

Table 72. Provided are the correlations (R) between the expression levels of the yield improving genes and their homologs in various tissues [Expression (Exp) sets, Table 68] and the phenotypic performance (yield, biomass, growth rate and/or vigor components, Table 70-71) as determined using the Correlation (Corr.) vectors specified in Table 69 under normal conditions across maize varieties.
P = p value.

### Example 9

### Production of Maize Transcriptome and High Throughput Correlation Analysis with Yield, NUE, and ABST Related Parameters Measured in Semi-Hydroponics Conditions Using 60K Maize Oligonucleotide Micro-Arrays

[0986] Maize vigor related parameters under low nitrogen, salinity stress (100 mM NaCl), low temperature (10±2° C.) and normal growth conditions—Twelve Maize hybrids were grown in 5 repetitive plots, each containing 7 plants, at a net house under semi-hydroponics conditions. Briefly, the growing protocol was as follows: Maize seeds were sown in trays filled with a mix of vermiculite and peat in a 1:1 ratio. Following germination, the trays were transferred to the high salinity solution (100 mM NaCl in addition to the Full Hoagland solution at 28±2° C.); low temperature (“cold conditions” of 10±2° C. in the presence of Full Hoagland solution), low nitrogen solution (the amount of total nitrogen was reduced in 90% from the full Hoagland solution (i.e., to a final concentration of 10% from full Hoagland solution, final amount of 1.6 mM N at 28±2° C.) or at Normal growth solution (Full Hoagland containing 16 mM N solution, at 28±2° C.).

[0987] Full Hoagland solution consists of: KNO₃—0.808 grams/liter, MgSO₄—0.12 grams/liter, KH₂PO₄—0.136 grams/liter and 0.01% (volume/volume) of ‘Super coratin’ micro elements (Iron-EDDHA [ethylenediamine-N,N′-bis(2-hydroxyphenylacetic acid)]—40.5 grams/liter; Mn—20.2 grams/liter; Zn 10.1 grams/liter; Co 1.5 grams/liter; and Mo 1.1 grams/liter), solution's pH should be 6.5-6.8].

[0988] Analyzed Maize tissues—Twelve selected Maize hybrids were sampled per each treatment. Two tissues [leaves and root tip] growing at salinity stress (100 mM NaCl), low temperature (10±2° C., cold stress), low Nitrogen (1.6 mM Nitrogen, nitrogen deficiency) or under Normal conditions were sampled at the vegetative stage (V4-5) and RNA was extracted as described above. Each micro-array expression information tissue type has received a Set ID as summarized in Tables 73-76 below.

TABLE 73
Maize transcriptome expression sets under
semi hydroponics and normal conditions

| Expression set | Set ID |
|---|---|
| leaf at vegetative stage (V4-V5) under Normal | 1 |
| conditions | |
| root tip at vegetative stage (V4-V5) under Normal | 2 |
| conditions | |

Table 73: Provided are the Maize transcriptome expression sets at normal conditions.

TABLE 74
Maize transcriptome expression sets under semi
hydroponics and cold stress conditions

| Expression set | Set ID |
|---|---|
| leaf at vegetative stage (V4-V5) under cold conditions | 1 |
| root tip at vegetative stage (V4-V5) under cold conditions | 2 |

Table 74: Provided are the Maize transcriptome expression sets at cold conditions.

TABLE 75
Maize transcriptome expression sets under semi
hydroponics and low N (Nitrogen deficient)

| Expression set | Set ID |
|---|---|
| leaf at vegetative stage (V4-V5) under low | 1 |
| N conditions (1.6 mM N) | |
| root tip at vegetative stage (V4-V5) under | 2 |
| low N conditions (1.6 mM N) | |

Table 75: Provided are the Maize transcriptome expression sets at low nitrogen conditions 1.6 mM Nitrogen.

TABLE 76
Maize transcriptome expression sets
under semi hydroponics and salinity stress conditions

| Expression set | Set ID |
|---|---|
| leaf at vegetative stage (V4-V5) under | 1 |
| salinity conditions (NaCl 100 mM) | |
| root tip at vegetative stage (V4-V5) under | 2 |
| salinity conditions (NaCl 100 mM) | |

Table 76: Provided are the Maize transcriptome expression sets at 100 mM NaCl.

[0989] The following parameters were collected:

[0990] Leaves DW—leaves dry weight per plant (average of five plants).

[0991] Plant Height growth—was calculated as regression coefficient of plant height [cm] along time course (average of five plants).

[0992] Root DW—At the end of the experiment, the root material was collected, measured and divided by the number of plants. (average of four plants).

[0993] Root length—the length of the root was measured at V4 developmental stage.

[0994] Shoot DW—shoot dry weight per plant, all vegetative tissue above ground (average of four plants) after drying at 70° C. in oven for 48 hours.

[0995] Shoot FW—shoot fresh weight per plant, all vegetative tissue above ground (average of four plants).

[0996] SPAD—Chlorophyll content was determined using a Minolta SPAD 502 chlorophyll meter and measurement was performed 30 days post sowing. SPAD meter readings were done on young fully developed leaf. Three measurements per leaf were taken per plot.

[0997] Experimental Results

[0998] 12 different Maize hybrids were grown and characterized at the vegetative stage (V4-5) for different parameters. The correlated parameters (vectors) are described in Tables 77-80 below. The average for each of the measured parameters was calculated using the JMP software and values are summarized in Tables 81-88 below. Subsequent correlation analysis was performed (Tables 89-92). Results were then integrated to the database.

TABLE 77
Maize correlated parameters (vectors) under low
nitrogen (nitrogen deficiency) growth conditions

| Correlated parameter with | Correlation ID |
|---|---|
| Leaves DW [gr.] | 1 |
| Plant height growth [cm/day] | 2 |
| Root DW [gr.] | 3 |
| Shoot DW [gr.] | 5 |
| Shoot FW [gr.] | 6 |
| SPAD | 7 |
| Root length [cm] | 4 |

Table 77: Provided are the Maize correlated parameters.
“DW” = dry weight; “FW” = fresh weight “gr. = gram(s).

TABLE 78
Maize correlated parameters
(vectors) under salinity stress growth conditions

| Correlated parameter with | Correlation ID |
|---|---|
| Leaves DW [gr.] | 1 |
| Plant height growth [cm/day] | 2 |
| Root DW [gr.] | 3 |
| Shoot DW [gr.] | 4 |
| Shoot FW [gr.] | 5 |
| SPAD | 6 |
| Root length [cm] | 7 |

Table 78: Provided are the Maize correlated parameters.
“DW” = dry weight; “FW” = fresh weight “gr. = gram(s).

TABLE 79
Maize correlated
parameters (vectors) under cold stress growth conditions

| Correlated parameter with | Correlation ID |
|---|---|
| Plant height growth [cm/day] | 1 |
| Root DW [gr.] | 2 |
| Shoot DW [gr.] | 3 |
| Shoot FW [gr.] | 4 |
| SPAD | 5 |
| Leaves DW [gr.] | 6 |
| Root length [cm] | 7 |

Table 79: Provided are the Maize correlated parameters.
“DW” = dry weight; “FW” = fresh weight “gr. = gram(s).

TABLE 80
Maize correlated parameters
(vectors) under regular growth conditions

| Correlated parameter with | Correlation ID |
|---|---|
| Leaves DW [gr.] | 1 |
| Plant height growth [cm/day] | 2 |
| Root DW [gr.] | 3 |
| Shoot DW [gr.] | 4 |
| Shoot FW [gr.] | 5 |
| SPAD | 6 |
| Root length [cm] | 7 |

Table 80: Provided are the Maize correlated parameters.
“DW” = dry weight; “FW” = fresh weight “gr. = gram(s).

TABLE 81
Maize accessions, measured parameters under low nitrogen
(nitrogen deficiency) growth conditions

| | Line | | | | | |
|---|---|---|---|---|---|---|
| Corr. | Line-1 | Line-2 | Line-3 | Line-4 | Line-5 | Line-6 |
| 1 | 0.566 | 0.451 | 0.464 | 0.476 | 0.355 | 0.514 |
| 2 | 0.752 | 0.811 | 0.877 | 0.691 | 0.831 | 0.835 |
| 3 | 0.38 | 0.353 | 0.255 | 0.36 | 0.313 | 0.297 |
| 4 | 44.5 | 45.6 | 44.2 | 43.6 | 40.7 | 42 |
| 5 | 2.56 | 1.96 | 2.01 | 1.94 | 1.94 | 2.52 |
| 6 | 23.3 | 20.6 | 19.3 | 20 | 18 | 22.1 |
| 7 | 21.4 | 21.2 | 22.2 | 24.6 | 22.8 | 26.5 |

Table 81: Provided are the values of each of the parameters (as described above) measured in Maize accessions (Line) under low nitrogen (nitrogen deficient) conditions. Growth conditions are specified in the experimental procedure section.

TABLE 82
Maize accessions, measured parameters under low nitrogen
(nitrogen deficiency) growth conditions

| | Line | | | | | |
|---|---|---|---|---|---|---|
| Corr. | Line-7 | Line-8 | Line-9 | Line-10 | Line-11 | Line-12 |
| 1 | 0.529 | 0.579 | 0.551 | 0.51 | 0.563 | 0.392 |
| 2 | 0.782 | 0.918 | 0.887 | 0.853 | 0.805 | 0.642 |
| 3 | 0.289 | 0.306 | 0.291 | 0.322 | 0.43 | 0.168 |
| 4 | 42.6 | 45.1 | 45.3 | 42.2 | 41 | 37.6 |
| 5 | 2.03 | 2.37 | 2.09 | 2.17 | 2.62 | 1.53 |
| 6 | 21.3 | 22.1 | 20.3 | 19.9 | 22.5 | 15.9 |
| 7 | 22.1 | 25.1 | 23.7 | 25.7 | 25 | 19.5 |

Table 82: Provided are the values of each of the parameters (as described above) measured in Maize accessions (Line) under low nitrogen (nitrogen deficient) conditions. Growth conditions are specified in the experimental procedure section.

TABLE 83
Maize accessions, measured parameters under
salinity stress growth conditions

| | Line | | | | | |
|---|---|---|---|---|---|---|
| Corr. | Line-7 | Line-8 | Line-9 | Line-10 | Line-11 | Line-12 |
| 1 | 0.407 | 0.502 | 0.432 | 0.481 | 0.434 | 0.564 |
| 2 | 0.457 | 0.398 | 0.454 | 0.316 | 0.322 | 0.311 |
| 3 | 0.047 | 0.0503 | 0.0295 | 0.071 | 0.0458 | 0.0307 |
| 4 | 2.43 | 2.19 | 2.25 | 2.26 | 1.54 | 1.94 |
| 5 | 19.6 | 20.8 | 18.4 | 19.4 | 15.6 | 16.1 |
| 6 | 36.5 | 39.9 | 37.8 | 41.3 | 40.8 | 44.4 |
| 7 | 10.9 | 11.3 | 11.8 | 10.1 | 8.5 | 10.6 |

Table 83: Provided are the values of each of the parameters (as described above) measured in Maize accessions (Line) under salinity stress (100 mM NaCl) growth conditions. Growth conditions are specified in the experimental procedure section.

TABLE 84
Maize accessions, measured parameters
under salinity stress growth conditions

| | Line | | | | | |
|---|---|---|---|---|---|---|
| Corr. | Line-7 | Line-8 | Line-9 | Line-10 | Line-11 | Line-12 |
| 1 | 0.327 | 0.507 | 0.465 | 0.984 | 0.475 | 0.154 |
| 2 | 0.29 | 0.359 | 0.37 | 0.355 | 0.305 | 0.272 |
| 3 | 0.0954 | 0.0625 | 0.0163 | 0.0355 | 0.0494 | 0.0146 |
| 4 | 1.78 | 1.9 | 1.89 | 2.2 | 1.86 | 0.97 |
| 5 | 12.5 | 16.9 | 16.8 | 17.6 | 15.9 | 9.4 |
| 6 | 37.9 | 43.2 | 39.8 | 38.2 | 38.1 | 37.8 |
| 7 | 10.1 | 11.8 | 10.5 | 11.2 | 10.1 | 8.9 |

Table 84: Provided are the values of each of the parameters (as described above) measured in Maize accessions (Line) under salinity stress (100 mM NaCl) growth conditions. Growth conditions are specified in the experimental procedure section.

TABLE 85
Maize accessions, measured parameters
under cold stress growth conditions

| | Line | | | | | |
|---|---|---|---|---|---|---|
| Corr. | Line-1 | Line-2 | Line-3 | Line-4 | Line-5 | Line-6 |
| 1 | 2.15 | 1.93 | 2.12 | 1.8 | 2.32 | 2.15 |
| 2 | 0.0466 | 0.0683 | 0.1 | 0.0808 | 0.0659 | 0.0667 |
| 3 | 5.74 | 4.86 | 3.98 | 4.22 | 4.63 | 4.93 |
| 4 | 73.8 | 55.5 | 53.3 | 54.9 | 59 | 62.4 |
| 5 | 28.9 | 29.1 | 27.1 | 32.4 | 32.7 | 32.9 |
| 6 | 1.19 | 1.17 | 1.02 | 1.18 | 1.04 | 1.23 |

Table 85: Provided are the values of each of the parameters (as described above) measured in Maize accessions (Line) under cold stress growth conditions. Growth conditions are specified in the experimental procedure section.

TABLE 86
Maize accessions, measured parameters
under cold stress growth conditions

| | Line | | | | | |
|---|---|---|---|---|---|---|
| Corr. | Line-7 | Line-8 | Line-9 | Line-10 | Line-11 | Line-12 |
| 1 | 2.49 | 2.01 | 1.95 | 2.03 | 1.85 | 1.21 |
| 2 | 0.1367 | 0.0667 | 0.0733 | 0.0204 | 0.0517 | 0.0567 |
| 3 | 4.82 | 4.03 | 3.57 | 3.99 | 4.64 | 1.89 |
| 4 | 63.6 | 54.9 | 48.2 | 52.8 | 55.1 | 29.6 |
| 5 | 31.6 | 33 | 28.6 | 31.4 | 30.6 | 30.7 |
| 6 | 1.13 | 0.98 | 0.88 | 1.28 | 1.1 | 0.6 |

Table 86: Provided are the values of each of the parameters (as described above) measured in Maize accessions (Line) under cold stress growth conditions. Growth conditions are specified in the experimental procedure section.

TABLE 87
Maize accessions, measured parameters under regular growth conditions

| | Line | | | | | |
|---|---|---|---|---|---|---|
| Corr. | Line-1 | Line-2 | Line-3 | Line-4 | Line-5 | Line-6 |
| 1 | 1.161 | 1.099 | 0.924 | 1.013 | 0.935 | 0.907 |
| 2 | 1.99 | 1.92 | 1.93 | 1.93 | 2.15 | 1.95 |
| 3 | 0.14 | 0.106 | 0.227 | 0.155 | 0.077 | 0.049 |
| 4 | 5.27 | 4.67 | 3.88 | 5.08 | 4.1 | 4.46 |
| 5 | 79 | 62.8 | 59.7 | 63.9 | 60.1 | 64.7 |
| 6 | 34.5 | 35.8 | 34.7 | 34.4 | 35.3 | 37.5 |
| 7 | 20.1 | 15.9 | 18.6 | 18.7 | 16.4 | 14.9 |

Table 87: Provided are the values of each of the parameters (as described above) measured in Maize accessions (Line) under regular (normal) growth conditions. Growth conditions are specified in the experimental procedure section.

TABLE 88
Maize accessions, measured parameters under regular growth conditions

| | Line | | | | | |
|---|---|---|---|---|---|---|
| Corr. | Line-7 | Line-8 | Line-9 | Line-10 | Line-11 | Line-12 |
| 1 | 1.105 | 1.006 | 1.011 | 1.024 | 1.23 | 0.44 |
| 2 | 2.23 | 1.94 | 1.97 | 2.05 | 1.74 | 1.26 |
| 3 | 0.175 | 0.101 | 0.069 | 0.104 | 0.138 | 0.03 |
| 4 | 4.68 | 4.59 | 4.08 | 4.61 | 5.42 | 2.02 |
| 5 | 68.1 | 65.8 | 58.3 | 61.9 | 70 | 36 |
| 6 | 36.5 | 36.1 | 33.7 | 34.3 | 35.7 | 29 |
| 7 | 17.5 | 15.7 | 15.7 | 17.6 | 16.1 | 17.4 |

Table 88: Provided are the values of each of the parameters (as described above) measured in Maize accessions (Line) under regular (normal) growth conditions. Growth conditions are specified in the experimental procedure section.

TABLE 89
Correlation between the expression level of selected genes of some embodiments
of the invention in various tissues and the phenotypic performance
under normal conditions across Maize accessions

| Gene | | | Exp. | Corr. | Gene | | | Exp. | Corr. |
|---|---|---|---|---|---|---|---|---|---|
| Name | R | P value | set | ID | Name | R | P value | set | ID |
| LBY477 | 0.76 | 1.86E−02 | 2 | 7 | LBY478 | 0.70 | 2.37E−02 | 1 | 7 |
| LBY517 | 0.74 | 1.47E−02 | 1 | 2 | LBY517 | 0.72 | 1.96E−02 | 1 | 6 |
| LBY519 | 0.86 | 1.51E−03 | 1 | 3 | | | | | |

Table 89. Provided are the correlations (R) between the expression levels of yield improving genes and their homologues in tissues [Leaves or roots; Expression sets (Exp) Table 73]] and the phenotypic performance in various biomass, growth rate and/or vigor components [Tables 87-88 using the Correlation vector (corr.) as described in Table 80] under normal conditions across Maize accessions.
P = p value.

TABLE 90
Correlation between the expression level of selected genes of some embodiments
of the invention in various tissues and the phenotypic performance
under low nitrogen (nitrogen deficiency) conditions across Maize accessions

| Gene | | | Exp. | Corr. | Gene | | | Exp. | Corr. |
|---|---|---|---|---|---|---|---|---|---|
| Name | R | P value | set | ID | Name | R | P value | set | ID |
| LBY477 | 0.81 | 8.17E−03 | 2 | 1 | LBY477 | 0.73 | 2.65E−02 | 2 | 6 |
| LBY477 | 0.88 | 1.95E−03 | 2 | 4 | LBY478 | 0.70 | 2.33E−02 | 1 | 7 |

Table 90. Provided are the correlations (R) between the expression levels of yield improving genes and their homologues in tissues [Leaves or roots; Expression sets (Exp) Table 75] and the phenotypic performance in various biomass, growth rate and/or vigor components [Tables 81-82 using the Correlation vector (corr.) as described in Table 77] under low nitrogen conditions across Maize accessions.
P = p value.

TABLE 91
Correlation between the expression level of selected genes of some embodiments
of the invention in various tissues and the phenotypic performance
under cold stress conditions across Maize accessions

| Gene | | | Exp. | Corr. | Gene | | | Exp. | Corr. |
|---|---|---|---|---|---|---|---|---|---|
| Name | R | P value | set | ID | Name | R | P value | set | ID |
| LBY478 | 0.85 | 7.60E−03 | 1 | 2 | LBY481 | 0.71 | 4.97E−02 | 1 | 6 |
| LBY481 | 0.75 | 3.08E−02 | 1 | 5 | LBY518 | 0.72 | 2.84E−02 | 2 | 5 |
| LBY519 | 0.93 | 6.84E−04 | 1 | 2 | | | | | |

Table 91. Provided are the correlations (R) between the expression levels of yield improving genes and their homologues in tissues [Leaves or roots; Expression sets (Exp) Table 74] and the phenotypic performance in various biomass, growth rate and/or vigor components [Tables 85-86 using the Correlation vector (corr.) as described in Table 79] under cold conditions (10 ± 2° C.) across Maize accessions.
P = p value.

TABLE 92
Correlation between the expression level of selected genes of some embodiments
of the invention in various tissues and the phenotypic performance
under salinity stress conditions across Maize accessions

| Gene | | | Exp. | Corr. | Gene | | | Exp. | Corr. Set |
|---|---|---|---|---|---|---|---|---|---|
| Name | R | P value | set | Set ID | Name | R | P value | set | ID |
| LBY478 | 0.76 | 1.04E−02 | 1 | 5 | LBY478 | 0.76 | 1.11E−02 | 1 | 1 |
| LBY481 | 0.77 | 1.63E−02 | 2 | 2 | LBY518 | 0.88 | 7.74E−04 | 1 | 2 |

Table 92. Provided are the correlations (R) between the expression levels of yield improving genes and their homologues in tissues [Leaves or roots; Expression sets (Exp) Table 76] and the phenotypic performance in various biomass, growth rate and/or vigor components [Tables 83-84 using the Correlation vector (corr.) as described in Table 78] under salinity conditions (100 mM NaCl) across Maize accessions.
P = p value.

### Example 10

### Production of Maize Transcriptome and High Throughput Correlation Analysis when Grown Under Normal and Defoliation Conditions Using 60K Maize Oligonucleotide Micro-Array

[0999] To produce a high throughput correlation analysis, the present inventors utilized a Maize oligonucleotide micro-array, produced by Agilent Technologies [chem. (dot) agilent (dot) com/Scripts/PDS (dot) asp?1Page=50879]. The array oligonucleotide represents about 60K Maize genes and transcripts designed based on data from Public databases (Example 28). To define correlations between the levels of RNA expression and yield, biomass components or vigor related parameters, various plant characteristics of 13 different Maize hybrids were analyzed under normal and defoliation conditions. Same hybrids were subjected to RNA expression analysis. The correlation between the RNA levels and the characterized parameters was analyzed using Pearson correlation test [davidmlane (dot) com/hyperstat/A34739 (dot) html].

[1000] Experimental Procedures

[1001] 13 maize hybrids lines were grown in 6 repetitive plots, in field. Maize seeds were planted and plants were grown in the field using commercial fertilization and irrigation protocols (normal conditions). After silking 3 plots in every hybrid line the plants underwent the defoliation treatment. In this treatment all the leaves above the ear (about 75% of the total leaves) were removed. After the treatment all the plants were grown according to the same commercial fertilization and irrigation protocols.

[1002] Three tissues at flowering developmental (R1) and grain filling (R3) stage including leaf (flowering—R1), stem (flowering—R1 and grain filling—R3), and flowering meristem (flowering—R1) representing different plant characteristics, were sampled from treated and untreated plants. RNA was extracted as described in “GENERAL EXPERIMENTAL AND BIOINFORMATICS METHODS”. For convenience, each micro-array expression information tissue type has received a Set ID as summarized in Tables 93-94 below.

TABLE 93
Tissues used for Maize
transcriptome expression sets (Under normal conditions)

| Expression Set | Set ID |
|---|---|
| Female meristem at flowering stage under normal conditions | 1 |
| leaf at flowering stage under normal conditions | 2 |
| stem at flowering stage under normal conditions | 3 |
| stem at grain filling stage under normal conditions | 4 |

Table 93: Provided are the identification (ID) numbers of each of the Maize expression sets.

TABLE 94
Tissues used for Maize
transcriptome expression sets (Under defoliation treatment)

| Expression Set | Set ID |
|---|---|
| Female meristem at flowering stage under defoliation treatment | 1 |
| Leaf at flowering stage under defoliation treatment | 2 |
| Stem at flowering stage under defoliation treatment | 3 |
| Stem at grain filling stage under defoliation treatment | 4 |

Table 94: Provided are the identification (ID) numbers of each of the Maize expression sets.

[1003] The image processing system used, which consists of a personal desktop computer (Intel P4 3.0 GHz processor) and a public domain program—ImageJ 1.37, Java based image processing software, was developed at the U.S. National Institutes of Health and is freely available on the internet at rsbweb (dot) nih (dot) gov/. Images were captured in resolution of 10 Mega Pixels (3888×2592 pixels) and stored in a low compression JPEG (Joint Photographic Experts Group standard) format. Next, image processing output data for seed area and seed length was saved to text files and analyzed using the JMP statistical analysis software (SAS institute).

[1004] The following parameters were collected by imaging.

[1005] 1000 grain weight—At the end of the experiment all seeds from all plots were collected and weighed and the weight of 1000 was calculated.

[1006] Ear Area (cm²)—At the end of the growing period 5 ears were photographed and images were processed using the below described image processing system. The Ear area was measured from those images and was divided by the number of ears.

[1007] Ear Length and Ear Width (cm)—At the end of the growing period 6 ears were, photographed and images were processed using the below described image processing system. The Ear length and width (longest axis) was measured from those images and was divided by the number of ears.

[1008] Grain Area (cm²)—At the end of the growing period the grains were separated from the ear. A sample of ˜200 grains were weighted, photographed and images were processed using the below described image processing system. The grain area was measured from those images and was divided by the number of grains.

[1009] Grain Length and Grain width (cm)—At the end of the growing period the grains were separated from the ear. A sample of ˜200 grains was weighted, photographed and images were processed using the below described image processing system. The sum of grain lengths/or width (longest axis) was measured from those images and was divided by the number of grains.

[1010] Grain Perimeter (cm)—At the end of the growing period the grains were separated from the ear. A sample of ˜200 grains was weighted, photographed and images were processed using the below described image processing system. The sum of grain perimeter was measured from those images and was divided by the number of grains.

[1011] Ear filled grain area (cm²)—At the end of the growing period 5 ears were photographed and images were processed using the below described image processing system. The Ear area filled with kernels was measured from those images and was divided by the number of Ears.

[1012] Filled per Whole Ear—was calculated as the length of the ear with grains out of the total ear.

[1013] Additional parameters were collected either by sampling 6 plants per plot or by measuring the parameter across all the plants within the plot.

[1014] Cob width [cm]—The diameter of the cob without grains was measured using a ruler.

[1015] Ear average weight [kg]—At the end of the experiment (when ears were harvested) total and 6 selected ears per plots were collected. The ears were weighted and the average ear per plant was calculated. The ear weight was normalized using the relative humidity to be 0%.

[1016] Plant height and Ear height—Plants were characterized for height at harvesting. In each measure, 6 plants were measured for their height using a measuring tape. Height was measured from ground level to top of the plant below the tassel. Ear height was measured from the ground level to the place where the main ear is located.

[1017] Ear row number—The number of rows per ear was counted.

[1018] Ear fresh weight per plant (GF)—During the grain filling period (GF) and total and 6 selected ears per plot were collected separately. The ears were weighted and the average ear weight per plant was calculated.

[1019] Ears dry weight—At the end of the experiment (when ears were harvested) total and 6 selected ears per plots were collected and weighted. The ear weight was normalized using the relative humidity to be 0%.

[1020] Ears fresh weight—At the end of the experiment (when ears were harvested) total and 6 selected ears per plots were collected and weighted.

[1021] Ears per plant—number of ears per plant were counted.

[1022] Grains weight (Kg.)—At the end of the experiment all ears were collected. Ears from 6 plants from each plot were separately threshed and grains were weighted.

[1023] Grains dry weight (Kg.)—At the end of the experiment all ears were collected. Ears from 6 plants from each plot were separately threshed and grains were weighted. The grain weight was normalized using the relative humidity to be 0%.

[1024] Grain weight per ear (Kg.)—At the end of the experiment all ears were collected. 5 ears from each plot were separately threshed and grains were weighted. The average grain weight per ear was calculated by dividing the total grain weight by the number of ears.

[1025] Leaves area per plant at GF and HD [LAI, leaf area index]=Total leaf area of 6 plants in a plot was measured using a Leaf area-meter at two time points during the course of the experiment; at heading (HD) and during the grain filling period (GF).

[1026] Leaves fresh weight at GF and HD—This parameter was measured at two time points during the course of the experiment; at heading (HD) and during the grain filling period (GF). Leaves used for measurement of the LAI were weighted.

[1027] Lower stem fresh weight at GF, HD and H—This parameter was measured at three time points during the course of the experiment: at heading (HD), during the grain filling period (GF) and at harvest (H). Lower internodes from at least 4 plants per plot were separated from the plant and weighted.

[1028] Lower stem length at GF, HD and H—This parameter was measured at three time points during the course of the experiment; at heading (HD), during the grain filling period (GF) and at harvest (H). Lower internodes from at least 4 plants per plot were separated from the plant and their length was measured using a ruler.

[1029] Average internode length—was calculated by dividing plant height by node number per plant.

[1030] Lower stem width at GF, HD, and H—This parameter was measured at three time points during the course of the experiment: at heading (HD), during the grain filling period (GF) and at harvest (H). Lower internodes from at least 4 plants per plot were separated from the plant and their diameter was measured using a caliber.

[1031] Plant height growth—the relative growth rate (RGR) of Plant Height was calculated as described in Formula 3 above.

[1032] SPAD—Chlorophyll content was determined using a Minolta SPAD 502 chlorophyll meter and measurement was performed 64 days post sowing. SPAD meter readings were done on young fully developed leaf. Three measurements per leaf were taken per plot. Data were taken after 46 and 54 days after sowing (DPS).

[1033] Stem fresh weight at GF and HD—This parameter was measured at two time points during the course of the experiment: at heading (HD) and during the grain filling period (GF). Stems of the plants used for measurement of the LAI were weighted.

[1034] Total dry matter—Total dry matter was calculated using Formula 21 above.

[1035] Upper stem fresh weight at GF, HD and H—This parameter was measured at three time points during the course of the experiment; at heading (HD), during the grain filling period (GF) and at harvest (H). Upper internodes from at least 4 plants per plot were separated from the plant and weighted.

[1036] Upper stem length at GF, HD, and H—This parameter was measured at three time points during the course of the experiment; at heading (HD), during the grain filling period (GF) and at harvest (H). Upper internodes from at least 4 plants per plot were separated from the plant and their length was measured using a ruler.

[1037] Upper stem width at GF, HD and H (mm)—This parameter was measured at three time points during the course of the experiment; at heading (HD), during the grain filling period (GF) and at harvest (H). Upper internodes from at least 4 plants per plot were separated from the plant and their diameter was measured using a caliber.

[1038] Vegetative dry weight (Kg.)—total weight of the vegetative portion of 6 plants (above ground excluding roots) after drying at 70° C. in oven for 48 hours weight by the number of plants.

[1039] Vegetative fresh weight (Kg.)—total weight of the vegetative portion of 6 plants (above ground excluding roots).

[1040] Node number—nodes on the stem were counted at the heading stage of plant development.

[1041] Harvest Index (HI) (Maize)—The harvest index per plant was calculated using Formula 17.

TABLE 95
Maize correlated parameters (vectors) under normal grown
conditions and under the treatment of defoliation

| Normal conditions | | Defoliation treatment | |
|---|---|---|---|
| | Corr. | | Corr. |
| Correlated parameter with | ID | Correlated parameter with | ID |
| Vegetative FW (SP) [kg] | 1 | 1000 grains weight [gr.] | 1 |
| Plant height growth [cm/day] | 2 | Avr. internode length [cm] | 2 |
| SPAD (GF) [SPAD unit] | 3 | Cob width [mm] | 3 |
| Stem FW (GF) [gr.] | 4 | Ear Area [cm²] | 4 |
| Stem FW (HD) [gr.] | 5 | Ear avr weight [gr.] | 5 |
| Total dry matter (SP) [kg] | 6 | Ear Filled Grain Area [cm²] | 6 |
| Upper Stem FW (GF) [gr.] | 7 | Ear height [cm] | 7 |
| Upper Stem FW (H) [gr.] | 8 | Ear length (feret's diameter) | 8 |
| | | [cm] | |
| Upper Stem length (GF) [cm] | 9 | Ear row number [num] | 9 |
| Upper Stem length (H) [cm] | 10 | Ear Width [cm] | 10 |
| Upper Stem width (GF) [mm] | 11 | Ears dry weight (SP) [gr.] | 11 |
| Upper Stem width (H) [mm] | 12 | Ears fresh weight (SP) [kg] | 12 |
| Vegetative DW (SP) [kg] | 13 | Ears per plant (SP) [num] | 13 |
| Lower Stem FW (GF) [gr.] | 14 | Filled/Whole Ear [ratio] | 14 |
| Lower Stem FW (H) [gr.] | 15 | Grain area [cm²] | 15 |
| Lower Stem FW (HD) [gr.] | 16 | Grain length [cm] | 16 |
| Lower Stem length (GF) [cm] | 17 | Grain Perimeter [cm] | 17 |
| Lower Stem length (H) [cm] | 18 | Grain width [mm] | 18 |
| Lower Stem length (HD) [cm] | 19 | Grains dry yield (SP) [kg] | 19 |
| Lower Stem width (GF) [mm] | 20 | Grains yield (SP) [kg] | 20 |
| Lower Stem width (H) [mm] | 21 | Grains yield per ear (SP) [kg] | 21 |
| Lower Stem width (HD) | 22 | Leaves area PP (HD) [cm²] | 23 |
| [mm] | | | |
| Node number [num] | 23 | Leaves FW (HD) [gr.] | 24 |
| Plant height [cm] | 24 | Leaves temperature [GF] | 25 |
| | | [° C.] | |
| Ears per plant (SP) [num] | 25 | Lower Stem FW [H] [gr.] | 26 |
| Filled/Whole Ear [ratio] | 26 | Lower Stem FW (HD) [gr.] | 27 |
| Grain area [cm²] | 27 | Lower Stem length [H] [cm] | 28 |
| Grain length [cm] | 28 | Lower Stem length (HD) | 29 |
| | | [cm] | |
| Grain Perimeter [cm] | 29 | Lower Stem width [H] [mm] | 30 |
| Grain width [cm] | 30 | Lower Stem width (HD) | 31 |
| | | [mm] | |
| Grains dry yield (SP) [kg] | 31 | Node number [num] | 32 |
| Grains yield (SP) [kg] | 32 | Plant height [cm] | 33 |
| Grains yield per ear (SP) [kg] | 33 | Plant height growth [cm/day] | 34 |
| Leaves area PP (GF) [cm²] | 34 | SPAD (GF) [SPAD unit] | 35 |
| Leaves area PP (HD) [cm²] | 35 | Stem FW (HD) [gr.] | 36 |
| Leaves FW (GF) [gr.] | 36 | Total dry matter (SP) [kg] | 37 |
| Leaves FW (HD) [gr.] | 37 | Upper Stem FW (H) [gr.] | 38 |
| Leaves temperature (GF) | 38 | Upper Stem length (H) [cm] | 39 |
| [° C.] | | | |
| 1000 grains weight [gr.] | 39 | Upper Stem width (H) [mm] | 40 |
| Cob width [mm] | 40 | Vegetative DW (SP) [kg] | 41 |
| Ear Area [cm²] | 41 | Vegetative FW (SP) [kg] | 42 |
| Ear avr. Weight [gr.] | 42 | Harvest index [ratio] | 42 |
| Ear Filled Grain Area [cm²] | 43 | | |
| Ear height [cm] | 44 | | |
| Ear length [feret's diameter] | 45 | | |
| [cm] | | | |
| Ear row number [num] | 46 | | |
| Ear Width [cm] | 47 | | |
| Ears dry weight (SP) [kg] | 48 | | |
| Ears fresh weight (SP) [kg] | 49 | | |
| Ears FW per plant (GF) [gr./ | 50 | | |
| plant] | | | |

Table 95.
“Avr.” = Average; “GF” = grain filling period; “HD” = heading period; “H” = harvest; “FW” = fresh weight; “DW” = dry weight; “PP” = per plant; “SP” = selected plants; “num” = number; “kg” = kilogram(s); “cm” = centimeter(s); “mm” = millimeter(s);

[1042] Thirteen maize varieties were grown, and characterized for parameters, as described above. The average for each of the measured parameters was calculated using the JMP software, and values are summarized in Tables 96-99 below. Subsequent correlation between the various transcriptome sets for all or sub set of lines was done and results were integrated into the database (Tables 100 and 101 below).

TABLE 96
Measured parameters in Maize Hybrid under normal conditions

| | Line | | | | | | |
|---|---|---|---|---|---|---|---|
| Corr. ID | Line-1 | Line-2 | Line-3 | Line-4 | Line-5 | Line-6 | Line-7 |
| 1 | 3.16 | 2.25 | 2.61 | 2.6 | 2.42 | 2.64 | 2.22 |
| 2 | 5.43 | 5.59 | 6.15 | 5.99 | 6.37 | 6.47 | 4.82 |
| 3 | 59.8 | 53.2 | 53.2 | 54.9 | 54 | 55.2 | 55.4 |
| 4 | 649 | 489.3 | 524.1 | 512.7 | 542.2 | 627.8 | 507.8 |
| 5 | 758.6 | 587.9 | 801.3 | 794.8 | 721.9 | 708.4 | 660.7 |
| 6 | 2.57 | 2.06 | 2.32 | 2.44 | 2.36 | 2.57 | 2.23 |
| 7 | 19.6 | 15.5 | 17.8 | 10.8 | 14.4 | 20.3 | 15.8 |
| 8 | 12.9 | 11.2 | 13 | 6.5 | 8 | 12.1 | 9.7 |
| 9 | 16.6 | 18.8 | 18.4 | 17.9 | 17.6 | 18.8 | 17.1 |
| 10 | 16.9 | 18.8 | 18.7 | 20 | 19.4 | 19.6 | 16.4 |
| 11 | 16 | 14.1 | 13.5 | 11.9 | 13.1 | 14.3 | 15 |
| 12 | 14.9 | 13 | 12.4 | 12 | 12.9 | 13.3 | 13.1 |
| 13 | 1.31 | 0.97 | 1.25 | 1.13 | 1.13 | 1.21 | 1.07 |
| 14 | 35.4 | 25 | 26.5 | 21.7 | 26.1 | 34.4 | 27.6 |
| 15 | 23.5 | 20.3 | 25.1 | 14.2 | 17.5 | 25.7 | 20.6 |
| 16 | 73 | 59.9 | 74.7 | 90.5 | 69.5 | 66.9 | 60.4 |
| 17 | 19.4 | 20.4 | 20.9 | 21.4 | 20 | 20.3 | 18.1 |
| 18 | 16.8 | 20 | 22.6 | 21.7 | 22.3 | 21.4 | 17.1 |
| 19 | 14.5 | 17.8 | 20 | 19.4 | 20.3 | 20.8 | 15 |
| 20 | 19.9 | 16.8 | 16.1 | 16.4 | 17 | 17.5 | 18.1 |
| 21 | 19.4 | 17.2 | 16.1 | 16.9 | 17.5 | 17.9 | 18 |
| 22 | 24.1 | 20.5 | 21 | 24.4 | 21.7 | 19.5 | 23.5 |
| 23 | 15.2 | 14.6 | 14.6 | 14.8 | 15 | 13.8 | 14.3 |
| 24 | 265.1 | 255.9 | 271.1 | 283.9 | 279.7 | 268.8 | 244.2 |
| 25 | 1 | 1.11 | 1 | 1 | 1 | 1.06 | 1 |
| 26 | 0.982 | 0.969 | 0.953 | 0.953 | 0.949 | 0.937 | 0.93 |
| 27 | 0.72 | 0.667 | 0.706 | 0.722 | 0.671 | 0.753 | 0.665 |
| 28 | 1.12 | 1.12 | 1.13 | 1.17 | 1.08 | 1.16 | 1.14 |
| 29 | 3.3 | 3.23 | 3.28 | 3.34 | 3.18 | 3.38 | 3.25 |
| 30 | 0.808 | 0.753 | 0.789 | 0.782 | 0.787 | 0.823 | 0.74 |
| 31 | 0.907 | 0.8 | 0.766 | 0.923 | 0.833 | 0.986 | 0.82 |
| 32 | 1.04 | 0.91 | 0.87 | 1.06 | 0.95 | 1.12 | 0.94 |
| 33 | 0.151 | 0.133 | 0.128 | 0.154 | 0.139 | 0.164 | 0.137 |
| 34 | 7034.6 | 6402.8 | 6353.1 | 6443.9 | 6835.5 | 6507.3 | 7123.5 |
| 35 | 4341.2 | 3171 | 4205.5 | 4347.5 | 3527 | 4517.3 | 3984.8 |
| 36 | 230.1 | 197.6 | 201 | 205.5 | 224.8 | 204.5 | 212.4 |
| 37 | 111 | 80.6 | 157.2 | 128.8 | 100.6 | 111.8 | 116.8 |
| 38 | 33.1 | 33.5 | 33.9 | 34.2 | 33.8 | 32.9 | 33.2 |
| 39 | 296.5 | 263.2 | 303.6 | 304.7 | 281.2 | 330.5 | 290.9 |
| 40 | 24.6 | 25.1 | 23.2 | 23.7 | 22.8 | 22.4 | 23.2 |
| 41 | 82.3 | 74.6 | 77 | 90.2 | 83.8 | 96.6 | 78.4 |
| 42 | 209.5 | 164.6 | 177.4 | 218.5 | 205.6 | 135.8 | 147.5 |
| 43 | 80.9 | 72.4 | 73.4 | 86 | 80.6 | 95 | 74.4 |
| 44 | 121.7 | 134.2 | 149.6 | 152.1 | 143.8 | 133.6 | 118.4 |
| 45 | 22.1 | 19.6 | 20 | 23.2 | 22.6 | 23.7 | 20.3 |
| 46 | 13 | 14.9 | 14.6 | 14.6 | 13.6 | 13.1 | 16.1 |
| 47 | 4.66 | 4.79 | 4.96 | 5 | 4.65 | 4.8 | 4.79 |
| 48 | 1.26 | 1.09 | 1.06 | 1.31 | 1.23 | 1.35 | 1.16 |
| 49 | 1.69 | 1.46 | 1.41 | 1.7 | 1.52 | 1.74 | 1.8 |
| 50 | 351.3 | 323.1 | 307.9 | 330.6 | 320.5 | 434.6 | 325.1 |

Table 96.

TABLE 97
Measured parameters in Maize Hybrid under normal conditions, additional maize lines

| Ecotype/Treatment | Line-8 | Line-9 | Line-10 | Line-11 | Line-12 | Line-13 |
|---|---|---|---|---|---|---|
| 1 | 2.9 | 2.22 | 2.83 | 2.29 | 2.15 | 2.9 |
| 2 | 6.01 | 5.99 | 6.66 | 5.99 | 5.62 | 6.53 |
| 3 | 56.8 | 55.8 | 58.5 | 51.7 | 55.2 | 54.2 |
| 4 | 549.3 | 509.7 | 662.1 | 527.4 | 474.7 | 544 |
| 5 | 724.6 | 618.5 | 837.6 | 612.8 | 728 | 950.3 |
| 6 | 2.73 | 2.33 | 2.4 | 2.2 | 2.08 | 2.84 |
| 7 | 14.4 | 17.8 | 20.4 | 13.9 | 13.1 | 16.5 |
| 8 | 7 | 9.4 | 13.6 | 9.2 | 7.7 | 10.2 |
| 9 | 17.5 | 18.1 | 18.6 | 17.7 | 18.1 | 18.6 |
| 10 | 18.3 | 16.6 | 19.4 | 16.7 | 16.3 | 15.9 |
| 11 | 13.6 | 14.7 | 14.6 | 13.2 | 12.8 | 14.2 |
| 12 | 13.5 | 13.4 | 13.3 | 13.1 | 12.5 | 13.8 |
| 13 | 1.44 | 0.96 | 1.1 | 1.01 | 0.95 | 1.31 |
| 14 | 25.3 | 26.2 | 34.3 | 25.5 | 23.1 | 25.6 |
| 15 | 16.3 | 18.9 | 27.3 | 22.3 | 19.3 | 22.8 |
| 16 | 63.1 | 55.9 | 82.1 | 60 | 58.7 | 116.1 |
| 17 | 20.2 | 19.8 | 22.9 | 19.8 | 19.5 | 21.4 |
| 18 | 20.7 | 18.5 | 23.3 | 19.4 | 19.7 | 20 |
| 19 | 18.7 | 20.5 | 22.6 | 19.8 | 14.5 | 20.3 |
| 20 | 17.1 | 16.9 | 17.5 | 16.6 | 17.1 | 17.4 |
| 21 | 18.4 | 17.4 | 18.1 | 17.7 | 17.6 | 18.9 |
| 22 | 21 | 21.5 | 21.4 | 22.1 | 23.2 | 24.3 |
| 23 | 14.7 | 15.4 | 14.3 | 14.4 | 14.9 | 14.4 |
| 24 | 273.6 | 273.2 | 295.3 | 259.2 | 257.9 | 277.2 |
| 25 | 1.06 | 1 | 1 | 1 | 1 | 1 |
| 26 | 0.982 | 0.986 | 0.974 | 0.966 | NA | 0.989 |
| 27 | 0.646 | 0.705 | 0.678 | 0.67 | 0.652 | 0.723 |
| 28 | 1.12 | 1.15 | 1.16 | 1.12 | 1.09 | 1.21 |
| 29 | 3.18 | 3.29 | 3.27 | 3.22 | 3.15 | 3.38 |
| 30 | 0.73 | 0.774 | 0.739 | 0.756 | 0.757 | 0.76 |
| 31 | 0.921 | 1.017 | 0.942 | 0.852 | 0.813 | 1.142 |
| 32 | 1.05 | 1.15 | 1.08 | 0.97 | 0.92 | 1.29 |
| 33 | 0.154 | 0.169 | 0.157 | 0.142 | 0.136 | 0.19 |
| 34 | 6075.2 | 6597.7 | 6030.4 | 6307.1 | 6617.6 | 6848 |
| 35 | 3696.8 | 3926.7 | 3127.7 | 3942.8 | 3955 | 4854 |
| 36 | 181.4 | 199.2 | 206.9 | 168.5 | 199.4 | 200.1 |
| 37 | 106.9 | 86 | 102.7 | 105.7 | 102.1 | 143.1 |
| 38 | 33.7 | 33.8 | 32.6 | 34 | 33.3 | 33.9 |
| 39 | 250.3 | 306.2 | 253.2 | 277 | 269.5 | 274.8 |
| 40 | 24.9 | 26.5 | 23.1 | 22.7 | 23.6 | 26.3 |
| 41 | 93.9 | 96.8 | 85.4 | 76.8 | NA | 98 |
| 42 | 207.1 | 228.4 | 215.9 | 198.7 | 188.5 | 254.4 |
| 43 | 92.3 | 95.4 | 83.3 | 74.3 | NA | 96.9 |
| 44 | 145.2 | 133.8 | 143.7 | 134.2 | 143 | 147.8 |
| 45 | 22.6 | 23.8 | 21.7 | 20 | NA | 22.4 |
| 46 | 15.9 | 14 | 15.4 | 14.9 | 14.9 | 16.8 |
| 47 | 5.18 | 5 | 4.95 | 4.79 | NA | 5.43 |
| 48 | 1.29 | 1.37 | 1.3 | 1.19 | 1.13 | 1.53 |
| 49 | 1.6 | 1.74 | 1.68 | 1.56 | 1.42 | 1.89 |
| 50 | 327.1 | 363.7 | 405.7 | 338.2 | 345.3 | 369.7 |

Table 97.

TABLE 98
Measured parameters in Maize Hybrid under defoliation

| Ecotype/Treatment | Line-1 | Line-2 | Line-3 | Line-4 | Line-5 | Line-6 | Line-7 |
|---|---|---|---|---|---|---|---|
| 1 | 280 | 251.9 | 294.3 | 295.4 | 288.4 | 308.3 | 230.1 |
| 2 | 16.6 | 17.3 | 17.9 | 18.9 | 19.3 | 18.4 | 17.7 |
| 3 | 19 | 22.1 | 16.3 | 21.5 | 19.8 | 18.2 | 19.8 |
| 4 | 53.6 | 45.5 | 38.3 | 58.5 | 53.9 | 63.5 | 39.8 |
| 5 | 89.2 | 100.8 | 73.4 | 129.8 | 129.8 | 115.1 | 85 |
| 6 | 51.5 | 43 | 34.6 | 55.7 | 51.4 | 61.4 | 36.3 |
| 7 | 119.4 | 131.6 | 145.5 | 156.1 | 145.3 | 129.5 | 123.4 |
| 8 | 16.3 | 13.6 | 12.9 | 15.9 | 15.3 | 17.5 | 13.2 |
| 9 | 12.7 | 14.4 | 13 | 14.1 | 13.5 | 13.1 | 14.1 |
| 10 | 4.18 | 4.21 | 3.92 | 4.77 | 4.51 | 4.61 | 4.1 |
| 11 | 0.747 | 0.583 | 0.44 | 0.742 | 0.779 | 0.576 | 0.454 |
| 12 | 0.973 | 0.833 | 0.629 | 0.979 | 1.01 | 0.803 | 0.648 |
| 13 | 1 | 0.944 | 1 | 0.944 | 1 | 0.941 | 0.889 |
| 14 | 0.954 | 0.915 | 0.873 | 0.95 | 0.948 | 0.961 | 0.905 |
| 15 | 0.649 | 0.632 | 0.669 | 0.675 | 0.677 | 0.683 | 0.631 |
| 16 | 1.05 | 1.08 | 1.08 | 1.11 | 1.09 | 1.09 | 1.07 |
| 17 | 3.11 | 3.14 | 3.18 | 3.21 | 3.2 | 3.23 | 3.13 |
| 18 | 0.777 | 0.74 | 0.781 | 0.765 | 0.786 | 0.788 | 0.75 |
| 19 | 0.523 | 0.4 | 0.289 | 0.517 | 0.547 | 0.398 | 0.302 |
| 20 | 0.604 | 0.456 | 0.331 | 0.588 | 0.624 | 0.458 | 0.345 |
| 21 | 0.0871 | 0.0687 | 0.0482 | 0.0902 | 0.0911 | 0.0798 | 0.0564 |
| 22 | 0.338 | 0.281 | 0.206 | 0.334 | 0.349 | 0.256 | 0.225 |
| 23 | 3914 | 3480 | 4276.5 | 4985.5 | 4643.5 | 4223 | 3436 |
| 24 | 112.3 | 95 | 125.1 | 144.5 | 112.5 | 116.2 | 113.8 |
| 25 | 32.5 | 33.1 | 33.6 | 32.3 | 32.9 | 33.4 | 33.4 |
| 26 | 23 | 26.5 | 27 | 15.2 | 18.2 | 37.2 | 27.9 |
| 27 | 64.2 | 53.8 | 56.4 | 81 | 71.3 | 66.7 | 64.2 |
| 28 | 16.3 | 21.4 | 20.9 | 22.6 | 22.9 | 21.6 | 18.8 |
| 29 | 15.2 | 18.5 | 16.7 | 18.1 | 18 | 19.8 | 16.1 |
| 30 | 19.5 | 16.9 | 15.8 | 17 | 17.1 | 18.2 | 18.2 |
| 31 | 24.3 | 20.6 | 21.1 | 24.9 | 20.9 | 20.5 | 21 |
| 32 | 15.2 | 14.4 | 15 | 15.1 | 14.5 | 14.2 | 14.4 |
| 33 | 251.4 | 248.6 | 268.1 | 285.1 | 278.8 | 261.9 | 254.6 |
| 34 | 6.38 | 6.32 | 6.31 | 6.93 | 6.83 | 7.14 | 6.48 |
| 35 | 61.2 | 57.4 | 58 | 62.4 | 60.7 | 62.2 | 59.7 |
| 36 | 713.5 | 538 | 705.5 | 803.3 | 703.4 | 664.2 | 673.2 |
| 37 | 1.54 | 1.37 | 1.44 | 1.53 | 1.57 | 1.57 | 1.34 |
| 38 | 8.68 | 11.07 | 14.1 | 4.89 | 6.04 | 13.95 | 10.93 |
| 39 | 16.2 | 18.8 | 17.7 | 19.6 | 20.7 | 20.1 | 17.2 |
| 40 | 14.3 | 12.8 | 12.7 | 11.1 | 12 | 13 | 14.3 |
| 41 | 0.792 | 0.782 | 1 | 0.79 | 0.792 | 0.998 | 0.883 |
| 42 | 2.51 | 1.96 | 2.8 | 2.11 | 2.2 | 2.79 | 2.54 |

Table 98.

TABLE 99
Measured parameters in Maize Hybrid under defoliation, additional maize lines

| Ecotype/Treatment | Line-8 | Line-9 | Line-10 | Line-11 | Line-12 | Line-13 |
|---|---|---|---|---|---|---|
| 1 | 271.3 | 259.4 | 244 | 262.4 | 248.6 | 244.2 |
| 2 | 17.9 | 17.3 | 18.9 | 18.7 | 18.3 | 20 |
| 3 | 22.4 | 20.3 | 19.6 | 22.3 | 23.3 | 27.8 |
| 4 | 47.3 | 65.9 | 43.8 | 43.3 | 52.3 | 58.3 |
| 5 | 33.1 | 161.8 | 89.4 | 87.7 | 88.2 | 124.6 |
| 6 | 43.3 | 64.8 | 39.6 | 40.4 | 49.3 | 55.7 |
| 7 | 135 | 136.5 | 136.4 | 130.3 | 139.7 | 143.4 |
| 8 | 14.8 | 17.6 | 13.8 | 13.7 | 15.5 | 14.9 |
| 9 | 13.8 | 13.9 | 12.8 | 13 | 14.3 | 15.8 |
| 10 | 4.2 | 4.66 | 4.06 | 4.01 | 4.41 | 4.98 |
| 11 | 0.63 | 0.803 | 0.536 | 0.552 | 0.512 | 0.748 |
| 12 | 0.819 | 1.148 | 0.877 | 0.791 | 0.693 | 0.991 |
| 13 | 1 | 0.882 | 1 | 1.056 | 0.944 | 1 |
| 14 | 0.905 | 0.983 | 0.89 | 0.918 | 0.94 | 0.95 |
| 15 | 0.61 | 0.623 | 0.619 | 0.6 | 0.583 | 0.631 |
| 16 | 1.02 | 1.08 | 1.05 | 1.02 | 1 | 1.09 |
| 17 | 3.02 | 3.12 | 3.09 | 3.03 | 2.98 | 3.15 |
| 18 | 0.75 | 0.724 | 0.741 | 0.738 | 0.733 | 0.725 |
| 19 | 0.439 | 0.667 | 0.359 | 0.377 | 0.344 | 0.531 |
| 20 | 0.505 | 0.767 | 0.411 | 0.435 | 0.394 | 0.609 |
| 21 | 0.0731 | 0.1239 | 0.0599 | 0.0628 | 0.0589 | 0.0885 |
| 22 | 0.28 | 0.384 | 0.238 | 0.287 | 0.226 | 0.308 |
| 23 | 4593 | 4315.5 | 4020.5 | 4154 | 4851.5 | 3750 |
| 24 | 93.7 | 89.9 | 87 | 117.3 | 150.7 | 161.6 |
| 25 | 33.4 | 34 | 33.1 | 32.6 | 33.5 | 33.3 |
| 26 | 17.3 | 20.5 | 25.4 | 28.4 | 23.2 | 38.8 |
| 27 | 76.2 | 57.9 | 70 | 67.3 | 72.9 | 83.6 |
| 28 | 20.9 | 17.8 | 20.7 | 20.4 | 20.1 | 24.1 |
| 29 | 14.8 | 17.5 | 23.7 | 19 | 16.4 | 20.6 |
| 30 | 17.2 | 17.9 | 17.1 | 17.5 | 18.6 | 19.9 |
| 31 | 22.5 | 21.2 | 19.8 | 21.3 | 23.6 | 21.4 |
| 32 | 14.7 | 15.6 | 14.4 | 14.1 | 14.6 | 14 |
| 33 | 261.9 | 268.9 | 272.7 | 262.5 | 266.3 | 279.1 |
| 34 | 6.28 | 7.04 | 7.2 | 7.34 | 6.94 | 7.27 |
| 35 | 60 | 56.8 | 65.7 | 57.9 | 60.3 | 57.7 |
| 36 | 738.4 | 692.2 | 619.8 | 729.2 | 794.6 | 847.5 |
| 37 | 1.47 | 1.66 | 1.48 | 1.31 | 1.48 | 1.71 |
| 38 | 6.48 | 9.01 | 10.69 | 10.38 | 8.49 | 12.29 |
| 39 | 19.1 | 16.7 | 16 | 17.3 | 18.2 | 17.8 |
| 40 | 12.8 | 13.5 | 13.1 | 13.4 | 13.2 | 14.7 |
| 41 | 0.844 | 0.86 | 0.94 | 0.762 | 0.964 | 0.967 |
| 42 | 2.48 | 2.35 | 2.59 | 2.41 | 2.7 | 2.72 |

Table 99.

[1043] Tables 100 and 101 hereinbelow provide the correlations (R) between the expression levels of the genes of some embodiments of the invention and their homologs in various tissues [Expression (Exp) sets] and the phenotypic performance [yield, biomass, growth rate and/or vigor components as described in Tables 96-99 using the Correlation (Corr.) vector ID described in Table 95]] under normal conditions (Table 100) and defoliation treatment (Table 101) across maize varieties. P=p value.

TABLE 100
Correlation between the expression level of selected genes of
some embodiments of the invention in various tissues and the
phenotypic performance under normal conditions across maize varieties

| Gene | | | Exp. | Corr. | Gene | | | Exp. | Corr. |
|---|---|---|---|---|---|---|---|---|---|
| Name | R | P value | set | ID | Name | R | P value | set | ID |
| LBY477 | 0.75 | 3.30E−03 | 1 | 16 | LBY477 | 0.73 | 1.14E−02 | 4 | 19 |
| LBY477 | 0.84 | 1.14E−03 | 4 | 18 | LBY477 | 0.76 | 7.11E−03 | 4 | 24 |
| LBY477 | 0.83 | 1.42E−03 | 4 | 10 | LBY477 | 0.77 | 5.79E−03 | 4 | 17 |
| LBY478 | 0.77 | 1.92E−03 | 1 | 20 | LBY478 | 0.78 | 1.77E−03 | 1 | 3 |
| LBY478 | 0.70 | 1.58E−02 | 4 | 16 | LBY478 | 0.71 | 1.53E−02 | 4 | 28 |
| LBY478 | 0.78 | 4.21E−03 | 4 | 34 | LBY478 | 0.78 | 4.57E−03 | 4 | 17 |
| LBY479 | 0.71 | 6.66E−03 | 1 | 20 | LBY479 | 0.74 | 3.51E−03 | 1 | 4 |
| LBY479 | 0.81 | 7.54E−04 | 1 | 3 | LBY479 | 0.81 | 8.03E−04 | 1 | 21 |
| LBY479 | 0.77 | 3.12E−03 | 3 | 10 | LBY479 | 0.74 | 8.87E−03 | 4 | 2 |
| LBY479 | 0.79 | 4.16E−03 | 4 | 17 | LBY481 | 0.74 | 5.72E−03 | 3 | 35 |
| LBY481 | 0.71 | 9.05E−03 | 3 | 37 | LBY481 | 0.75 | 7.56E−03 | 4 | 16 |
| LBY481 | 0.85 | 9.67E−04 | 4 | 17 | LBY481 | 0.89 | 2.84E−04 | 4 | 50 |
| LBY516 | 0.80 | 3.30E−03 | 4 | 25 | LBY517 | 0.83 | 7.67E−04 | 3 | 2 |
| LBY517 | 0.74 | 6.26E−03 | 3 | 19 | LBY517 | 0.75 | 7.62E−03 | 4 | 50 |
| LBY518 | 0.77 | 6.07E−03 | 4 | 5 | LBY518 | 0.83 | 1.38E−03 | 4 | 16 |
| LBY518 | 0.76 | 6.43E−03 | 4 | 28 | LBY519 | 0.71 | 1.38E−02 | 4 | 44 |

Table 100. Provided are the correlations (R) between the genes expression levels in various tissues and the phenotypic performance.
“Corr. ID”—correlation vector ID according to the correlated parameters specified in Table 95.
“Exp. Set”—Expression set specified in Table 93.
“R” = Pearson correlation coefficient;
“P” = p value.

TABLE 101
Correlation between the expression level of selected genes of
some embodiments of the invention in various tissues and the
phenotypic performance under defoliation treatment across maize varieties

| Gene | | | Exp. | Corr. | Gene | | | Exp. | Corr. |
|---|---|---|---|---|---|---|---|---|---|
| Name | R | P value | set | ID | Name | R | P value | set | ID |
| LBY477 | 0.80 | 3.37E−03 | 4 | 1 | LBY477 | 0.80 | 2.99E−03 | 4 | 18 |
| LBY479 | 0.74 | 5.87E−03 | 1 | 37 | LBY479 | 0.70 | 1.07E−02 | 1 | 34 |
| LBY479 | 0.79 | 2.04E−03 | 3 | 16 | LBY479 | 0.79 | 2.38E−03 | 3 | 17 |
| LBY479 | 0.78 | 2.95E−03 | 3 | 15 | LBY479 | 0.79 | 2.17E−03 | 2 | 41 |
| LBY479 | 0.71 | 1.41E−02 | 4 | 16 | LBY479 | 0.75 | 8.42E−03 | 4 | 17 |
| LBY479 | 0.74 | 8.63E−03 | 4 | 15 | LBY481 | 0.78 | 4.84E−03 | 4 | 12 |
| LBY481 | 0.71 | 1.48E−02 | 4 | 15 | LBY481 | 0.71 | 1.49E−02 | 4 | 11 |
| LBY517 | 0.75 | 5.34E−03 | 3 | 25 | LBY517 | 0.76 | 6.12E−03 | 4 | 10 |
| LBY517 | 0.76 | 6.86E−03 | 4 | 6 | LBY517 | 0.75 | 7.67E−03 | 4 | 14 |
| LBY517 | 0.73 | 1.07E−02 | 4 | 37 | LBY517 | 0.71 | 1.41E−02 | 4 | 5 |
| LBY517 | 0.75 | 8.24E−03 | 4 | 4 | | | | | |

Table 101: Provided are the correlations (R) between the genes expression levels in various tissues and the phenotypic performance.
“Corr. ID”—correlation vector ID according to the correlated parameters specified in Table 95.
“Exp. Set”—Expression set specified in Table 94.
“R” = Pearson correlation coefficient;
“P” = p value.

### Example 11

### Production of Brachypodium Transcriptome and High Throughput Correlation Analysis Using 60K Brachypodium Oligonucleotide Micro-Array

[1044] In order to produce a high throughput correlation analysis comparing between plant phenotype and gene expression level, the present inventors utilized a Brachypodium oligonucleotide micro-array, produced by Agilent Technologies [chem. (dot) agilent (dot) com/Scripts/PDS (dot) asp?1Page=50879]. The array oligonucleotide represents about 60K Brachypodium genes and transcripts. In order to define correlations between the levels of RNA expression and yield or vigor related parameters, various plant characteristics of 24 different Brachypodium accessions were analyzed. Among them, 22 accessions encompassing the observed variance were selected for RNA expression analysis and comparative genomic hybridization (CGH) analysis.

[1045] The correlation between the RNA levels and the characterized parameters was analyzed using Pearson correlation test [davidmlane (dot) com/hyperstat/A34739 (dot) html].

[1046] Additional correlation analysis was done by comparing plant phenotype and gene copy number. The correlation between the normalized copy number hybridization signal and the characterized parameters was analyzed using Pearson correlation test [davidmlane (dot) com/hyperstat/A34739 (dot) html].

[1047] Experimental Procedures

[1048] Analyzed Brachypodium tissues—two tissues [leaf and spike] were sampled and RNA was extracted as described above. Each micro-array expression information tissue type has received a Set ID as summarized in Table 102 below.

TABLE 102
Brachypodium transcriptome expression sets

| Expression Set | Set ID |
|---|---|
| Leaf at flowering stage under normal growth conditions | 1 |
| Spike at flowering stage under normal growth | 2 |
| conditions | |
| Leaf at flowering stage under normal growth conditions | 3 |

Table 102. From set ID No. 3 the sample was used to extract DNA; from set ID Nos. 1 and 2 the samples were used to extract RNA.

[1049] Brachypodium Yield Components and Vigor Related Parameters Assessment

[1050] 22 Brachypodium accessions were grown in 4-6 repetitive plots (8 plants per plot) in a green house. The growing protocol was as follows: Brachypodium seeds were sown in plots and grown under normal condition (6 mM of Nitrogen as ammonium nitrate). Plants were continuously phenotyped during the growth period and at harvest (Table 104-106, below). The image analysis system included a personal desktop computer (Intel P4 3.0 GHz processor) and a public domain program—ImageJ 1.37 (Java based image processing program, which was developed at the U.S. National Institutes of Health and freely available on the internet [rsbweb (dot) nih (dot) gov/]. Next, analyzed data was saved to text files and processed using the JMP statistical analysis software (SAS institute).

[1051] At the end of the growing period the grains were separated from the spikes and the following parameters were measured using digital imaging system and collected:

[1052] Number of tillering—all tillers were counted per plant at harvest (mean per plot).

[1053] Head number—At the end of the experiment, heads were harvested from each plot and were counted.

[1054] Total Grains weight per plot (gr.)—At the end of the experiment (plant ‘Heads’) heads from plots were collected, threshed and the grains were weighted. In addition, the average grain weight per head was calculated by dividing the total grain weight by number of total heads per plot (based on plot).

[1055] Highest number of spikelets—The highest spikelet number per head was calculated per plant (mean per plot).

[1056] Mean number of spikelets—The mean spikelet number per head was calculated per plot.

[1057] Plant height—Each of the plants was measured for its height using a measuring tape. Height was measured from ground level to spike base of the longest spike at harvest.

[1058] Vegetative dry weight and spike yield—At the end of the experiment (50% of the spikes were dry) all spikes and vegetative material from plots were collected. The biomass and spikes weight of each plot was separated, measured and divided by the number of plants/plots.

[1059] Dry weight—total weight of the vegetative portion above ground (excluding roots) after drying at 70° C. in oven for 48 hours;

[1060] Spike yield per plant=total spike weight per plant (gr.) after drying at 30° C. in oven for 48 hours.

[1061] Spikelets weight (gr.)—The biomass and spikes weight of each plot was separated and measured per plot.

[1062] Average head weight—calculated by dividing spikelets weight with head number (gr.).

[1063] Harvest Index—The harvest index was calculated using Formula 15 (described above).

[1064] Spikelets Index—The Spikelets index is calculated using Formula 31 above.

[1065] Percent Number of heads with spikelets—The number of heads with more than one spikelet per plant were counted and the percent from all heads per plant was calculated.

[1066] Total dry mater per plot—Calculated as Vegetative portion above ground plus all the spikelet dry weight per plot.

[1067] 1000 grain weight—At the end of the experiment all grains from all plots were collected and weighted and the weight of 1000 grains was calculated.

[1068] The following parameters were collected using digital imaging system:

[1069] At the end of the growing period the grains were separated from the spikes and the following parameters were measured and collected:

[1070] (i) Average Grain Area (cm²)—A sample of ˜200 grains was weighted, photographed and images were processed using the below described image processing system. The grain area was measured from those images and was divided by the number of grains.

[1071] (ii) Average Grain Length, perimeter and width (cm)—A sample of ˜200 grains was weighted, photographed and images were processed using the below described image processing system. The sum of grain lengths and width (longest axis) was measured from those images and was divided by the number of grains.

[1072] The image processing system that was used, consisted of a personal desktop computer (Intel P4 3.0 GHz processor) and a public domain program—ImageJ 1.37, Java based image processing software, which was developed at the U.S. National Institutes of Health and is freely available on the internet at rsbweb (dot) nih (dot) gov/. Images were captured in resolution of 10 Mega Pixels (3888×2592 pixels) and stored in a low compression JPEG (Joint Photographic Experts Group standard) format. Next, image processing output data for seed area and seed length was saved to text files and analyzed using the JMP statistical analysis software (SAS institute).

TABLE 103
Brachypodium correlated parameters (vectors)

| Correlated parameter with | Correlation ID |
|---|---|
| % Number of heads with spikelets (%) | 1 |
| 1000 grain weight (gr.) | 2 |
| Average head weight (gr.) | 3 |
| Grain area (cm²) | 5 |
| Grain length (cm) | 6 |
| Grain Perimeter (cm) | 4 |
| Grain width (cm) | 7 |
| Grains weight per plant (gr.) | 8 |
| Grains weight per plot (gr.) | 9 |
| Harvest index | 10 |
| Heads per plant | 11 |
| Heads per plot | 12 |
| Highest number of spikelets per plot | 13 |
| Mean number of spikelets per plot | 14 |
| Number of heads with spikelets per plant | 15 |
| Plant height (cm) | 17 |
| Plant Vegetative DW (gr.) | 16 |
| Plants number | 18 |
| Spikelets DW per plant (gr.) | 19 |
| Spikelets weight (gr.) | 20 |
| Spikes index | 21 |
| Tillering (number) | 22 |
| Total dry mater per plant (gr.) | 23 |
| Total dry mater per plot (gr.) | 24 |
| Vegetative DW (gr.) | 25 |

Table 103. Provided are the Brachypodium correlated parameters.
“DW” = dry weight;

[1073] Experimental Results

[1074] 22 different Brachypodium accessions were grown and characterized for different parameters as described above. The average for each of the measured parameter was calculated using the JMP software and values are summarized in Tables 104-106 below. Subsequent correlation analysis between the various transcriptome sets and the average parameters was conducted (Table 107). Follow, results were integrated to the database.

TABLE 104
Measured parameters of correlation IDs
in Brachypodium accessions under normal conditions

| Ecotype/ | | | | | | | | |
|---|---|---|---|---|---|---|---|---|
| Treatment | Line-1 | Line-2 | Line-3 | Line-4 | Line-5 | Line-6 | Line-7 | Line-8 |
| 1 | 27.61 | 35.33 | 21.67 | 52.40 | 20.84 | 47.73 | 17.55 | 16.51 |

Table 104. Correlation IDs: 1, 2, 3, 4, 5, . . . etc. refer to those described in Table 103 above [Brachypodium correlated parameters (vectors)].

TABLE 105
Additional measured parameters of correlation IDs in
brachypodium accessions under normal conditions

| Ecotype/ | | | | | Line- | | Line- |
|---|---|---|---|---|---|---|---|
| Treatment | Line-9 | Line-10 | Line-11 | Line-12 | 13 | Line-14 | 15 |
| 1 | 5.42 | 15.42 | 14.00 | 6.40 | 4.51 | 15.52 | 20.34 |

Table 105. Correlation IDs: 1, 2, 3, 4, 5, . . . etc. refer to those described in Table 103 above [Brachypodium correlated parameters (vectors)].

TABLE 106
Additional measured parameters of correlation IDs
in brachypodium accessions under normal conditions

| Ecotype/ | | | | | Line- | | Line- |
|---|---|---|---|---|---|---|---|
| Treatment | Line-16 | Line-17 | Line-18 | Line-19 | 20 | Line-21 | 22 |
| 1 | 8.11 | 53.21 | 55.41 | 47.81 | 42.81 | 59.01 | 34.92 |

Table 106. Correlation IDs: 1, 2, 3, 4, 5, . . . etc. refer to those described in Table 103 above [Brachypodium correlated parameters (vectors)].

TABLE 107
Correlation between the expression level of selected genes of some
embodiments of the invention in various tissues and the phenotypic
performance under normal conditions across brachypodium varieties

| Gene Name | R | P value | Exp. set | Corr. ID |
|---|---|---|---|---|
| MGP6 | 0.72 | 8.12E−03 | 3 | 2 |

Table 107. Provided are the correlations (R) between the expression levels of the genes of some embodiments of the invention and their homologs in various tissues [Expression (Exp) sets, Table 102] and the phenotypic performance [yield, biomass, growth rate and/or vigor components (as described in Tables 104-106 using the Correlation (Corr.) vectors described in Table 103] under normal conditions across brachypodium varieties.
P = p value.

### Example 12

### Production of Soybean (Glycine max) Transcriptome and High Throughput Correlation Analysis with Yield Parameters Using 44K B. Soybean Oligonucleotide Micro-Arrays

[1075] In order to produce a high throughput correlation analysis, the present inventors utilized a Soybean oligonucleotide micro-array, produced by Agilent Technologies [chem. (dot) agilent (dot) com/Scripts/PDS (dot) asp?1Page=50879]. The array oligonucleotide represents about 42,000 Soybean genes and transcripts. In order to define correlations between the levels of RNA expression with yield components, plant architecture related parameters or plant vigor related parameters, various plant characteristics of 29 different Glycine max varieties were analyzed and 26 varieties were further used for RNA expression analysis. The correlation between the RNA levels and the characterized parameters was analyzed using Pearson correlation test.

[1076] Correlation of Glycine max Genes' Expression Levels with Phenotypic Characteristics Across Ecotype

[1077] Experimental Procedures

[1078] 29 Soybean varieties were grown in three repetitive plots in field. Briefly, the growing protocol was as follows: Soybean seeds were sown in soil and grown under normal conditions (no irrigation, good organomic particles) which included high temperature about 82.38 (° F.), low temperature about 58.54 (° F.); total precipitation rainfall from May through September (from sowing until harvest) was about 16.97 inch.

[1079] In order to define correlations between the levels of RNA expression with yield components, plant architecture related parameters or vigor related parameters, 26 different Soybean varieties (out of 29 varieties) were analyzed and used for gene expression analyses. Analysis was performed at two pre-determined time periods: at pod set (when the soybean pods are formed) and at harvest time (when the soybean pods are ready for harvest, with mature seeds).

TABLE 108
Soybean transcriptome expression sets

| Expression Set | Set ID |
|---|---|
| Apical meristem at vegetative stage under normal growth | 1 |
| condition | |
| Leaf at vegetative stage under normal growth condition | 2 |
| Leaf at flowering stage under normal growth condition | 3 |
| Leaf at pod setting stage under normal growth condition | 4 |
| Root at vegetative stage under normal growth condition | 5 |
| Root at flowering stage under normal growth condition | 6 |
| Root at pod setting stage under normal growth condition | 7 |
| Stem at vegetative stage under normal growth condition | 8 |
| Stem at pod setting stage under normal growth condition | 9 |
| Flower bud at flowering stage under normal growth | 10 |
| condition | |
| Pod (R3-R4) at pod setting stage under normal growth | 11 |
| condition | |

Table 108.

[1080] RNA extraction—All 12 selected Soybean varieties were sampled per treatment. Plant tissues [leaf, root, Stem, Pod, apical meristem, Flower buds] growing under normal conditions were sampled and RNA was extracted as described above. The collected data parameters were as follows:

[1081] Main branch base diameter [mm] at pod set—the diameter of the base of the main branch (based diameter) average of three plants per plot.

[1082] Fresh weight [gr./plant] at pod set]—total weight of the vegetative portion above ground (excluding roots) before drying at pod set, average of three plants per plot.

[1083] Dry weight [gr./plant] at pod set—total weight of the vegetative portion above ground (excluding roots) after drying at 70° C. in oven for 48 hours at pod set, average of three plants per plot.

[1084] Total number of nodes with pods on lateral branches [value/plant]—counting of nodes which contain pods in lateral branches at pod set, average of three plants per plot.

[1085] Number of lateral branches at pod set [value/plant]—counting number of lateral branches at pod set, average of three plants per plot.

[1086] Total weight of lateral branches at pod set [gr./plant]—weight of all lateral branches at pod set, average of three plants per plot.

[1087] Total weight of pods on main stem at pod set [gr./plant]—weight of all pods on main stem at pod set, average of three plants per plot.

[1088] Total number of nodes on main stem [value/plant]—count of number of nodes on main stem starting from first node above ground, average of three plants per plot.

[1089] Total number of pods with I seed on lateral branches at pod set [value/plant]—count of the number of pods containing 1 seed in all lateral branches at pod set, average of three plants per plot.

[1090] Total number of pods with 2 seeds on lateral branches at pod set [value/plant]—count of the number of pods containing 2 seeds in all lateral branches at pod set, average of three plants per plot.

[1091] Total number of pods with 3 seeds on lateral branches at pod set [value/plant]—count of the number of pods containing 3 seeds in all lateral branches at pod set, average of three plants per plot.

[1092] Total number of pods with 4 seeds on lateral branches at pod set [value/plant]—count of the number of pods containing 4 seeds in all lateral branches at pod set, average of three plants per plot.

[1093] Total number of pods with 1 seed on main stem at pod set [value/plant]—count of the number of pods containing 1 seed in main stem at pod set, average of three plants per plot.

[1094] Total number of pods with 2 seeds on main stem at pod set [value/plant]—count of the number of pods containing 2 seeds in main stem at pod set, average of three plants per plot.

[1095] Total number of pods with 3 seeds on main stem at pod set [value/plant]—count of the number of pods containing 3 seeds in main stem at pod set, average of three plants per plot.

[1096] Total number of pods with 4 seeds on main stem at pod set [value/plant]—count of the number of pods containing 4 seeds in main stem at pod set, average of three plants per plot.

[1097] Total number of seeds per plant at pod set [value/plant]—count of number of seeds in lateral branches and main stem at pod set, average of three plants per plot.

[1098] Total number of seeds on lateral branches at pod set [value/plant]—count of total number of seeds on lateral branches at pod set, average of three plants per plot.

[1099] Total number of seeds on main stem at pod set [value/plant]—count of total number of seeds on main stem at pod set, average of three plants per plot.

[1100] Plant height at pod set [cm/plant]—total length from above ground till the tip of the main stem at pod set, average of three plants per plot.

[1101] Plant height at harvest [cm/plant]—total length from above ground till the tip of the main stem at harvest, average of three plants per plot.

[1102] Total weight of pods on lateral branches at pod set [gr./plant]—weight of all pods on lateral branches at pod set, average of three plants per plot.

[1103] Ratio of the number of pods per node on main stem at pod set—calculated in Formula 23 (above), average of three plants per plot.

[1104] Ratio of total number of seeds in main stem to number of seeds on lateral branches—calculated in Formula 24 above, average of three plants per plot.

[1105] Total weight of pods per plant at pod set [gr./plant]—weight of all pods on lateral branches and main stem at pod set, average of three plants per plot.

[1106] Days till 50% flowering [days]—number of days till 50% flowering for each plot.

[1107] Days till 100% flowering [days]—number of days till 100% flowering for each plot.

[1108] Maturity [days]—measure as 95% of the pods in a plot have ripened (turned 100% brown). Delayed leaf drop and green stems are not considered in assigning maturity. Tests are observed 3 days per week, every other day, for maturity. The maturity date is the date that 95% of the pods have reached final color. Maturity is expressed in days after August 31 [according to the accepted definition of maturity in USA, Descriptor list for SOYBEAN, ars-grin (dot) gov/cgi-bin/npgs/html/desclist (dot) pl?51].

[1109] Seed quality [ranked 1-5]—measure at harvest; a visual estimate based on several hundred seeds. Parameter is rated according to the following scores considering the amount and degree of wrinkling, defective coat (cracks), greenishness, and moldy or other pigment. Rating is “1”—very good, “2”—good, “3”—fair, “4”—poor, “5”—very poor.

[1110] Lodging [ranked 1-5]—is rated at maturity per plot according to the following scores: “1”—most plants in a plot are erected; “2”—all plants leaning slightly or a few plants down; “3”—all plants leaning moderately, or 25%-50% down; “4”—all plants leaning considerably, or 50%-80% down; “5”—most plants down. Note: intermediate score such as 1.5 are acceptable.

[1111] Seed size [gr.]—weight of 1000 seeds per plot normalized to 13% moisture, measure at harvest.

[1112] Total weight of seeds per plant [gr./plant]—calculated at harvest (per 2 inner rows of a trimmed plot) as weight in grams of cleaned seeds adjusted to 13% moisture and divided by the total number of plants in two inner rows of a trimmed plot.

[1113] Yield at harvest [bushels/hectare]—calculated at harvest (per 2 inner rows of a trimmed plot) as weight in grams of cleaned seeds, adjusted to 13% moisture, and then expressed as bushels per acre.

[1114] Average lateral branch seeds per pod [number]—Calculate number of seeds on lateral branches-at pod set and divide by the number of pods with seeds on lateral branches-at pod set.

[1115] Average main stem seeds per pod [number]—Calculate total number of seeds on main stem at pod set and divide by the number of pods with seeds on main stem at pod setting.

[1116] Main stem average internode length [cm]—Calculate plant height at pod set and divide by the total number of nodes on main stem at pod setting.

[1117] Total number of pods with seeds on main stem [number]—count all pods containing seeds on the main stem at pod setting.

[1118] Total number of pods with seeds on lateral branches [number]—count all pods containing seeds on the lateral branches at pod setting.

[1119] Total number of pods per plant at pod set [number]—count pods on main stem and lateral branches at pod setting.

TABLE 109
Soybean correlated parameters (vectors)

| | Correlation |
|---|---|
| Correlated parameter with | ID |
| 100 percent flowering (days) | 1 |
| Lodging (score 1-5) | 2 |
| Maturity (days) | 3 |
| Plant height at harvest (cm) | 4 |
| Seed quality (score 1-5) | 5 |
| yield at harvest (bushel/hectare) | 6 |
| Total weight of seeds per plant (gr./plant) | 7 |
| Average lateral branch seeds per pod (number) | 8 |
| Average main stem seeds per pod (number) | 9 |
| Base diameter at pod set (mm) | 10 |
| DW at pod set (gr.) | 11 |
| fresh weight at pod set (gr.) | 12 |
| Main stem average internode length (cm) | 13 |
| Num of lateral branches (number) | 14 |
| Num of nodes with pods on lateral branches-pod set | 15 |
| (number) | |
| Num of pods with 1 seed on lateral branch-pod set (number) | 16 |
| Num of pods with 1 seed on main stem at pod set (number) | 17 |
| Num of pods with 2 seed on lateral branch-pod set (number) | 18 |
| Num of pods with 2 seed on main stem at pod set (number) | 19 |
| Num of pods with 3 seed on main stem at pod set (number) | 20 |
| Num of pods with 4 seed on main stem at pod set (number) | 21 |
| Num of Seeds on lateral branches-at pod set | 22 |
| Num pods with 3 seed on lateral branch-at pod set (number) | 23 |
| Num pods with 4 seed on lateral branch-at pod set (number) | 24 |
| Num pods with seeds on lateral branches-at pod set (number) | 25 |
| Plant height at pod set (cm) | 26 |
| Ratio num of seeds-main stem to lateral branches (ratio) | 27 |
| Ratio number of pods per node on main stem (ratio) | 28 |
| Total number of nodes on main stem (number) | 30 |
| Total number of pods per plant (number) | 31 |
| Total number of pods with seeds on main stem (number) | 32 |
| Total Number of Seeds on main stem at pod set (number) | 33 |
| Total number of seeds per plant (number) | 34 |
| Total weight of lateral branches at pod set (gr.) | 35 |
| Total weight of pods on main stem at pod set (gr.) | 36 |
| Total weight of pods per plant (gr./plant) | 37 |
| Weight of pods on lateral branches at pod set (gr.) | 38 |
| 50 percent flowering (days) | 39 |
| corrected Seed size (gr.) | 40 |

Table 109.
“Num” = number; “DW” = dry weight.

[1120] Experimental Results

[1121] 29 different Soybean varieties lines were grown and characterized for 40 parameters as specified above. Tissues for expression analysis were sampled from a subset of 12-26 lines. The correlated parameters are described in Table 109 above. The average for each of the measured parameter was calculated using the JMP software (Tables 110-113) and a subsequent correlation analysis was performed (Tables 114-115). Results were then integrated to the database.

TABLE 110
Measured parameters in Soybean varieties (lines 1-8)

| | Line | | | | | | | |
|---|---|---|---|---|---|---|---|---|
| Corr. ID | Line-1 | Line-2 | Line-3 | Line-4 | Line-5 | Line-6 | Line-7 | Line-8 |
| 1 | 67.30 | 67.30 | 67.30 | 70.00 | 68.00 | 71.70 | 67.30 | 67.70 |
| 2 | 2.00 | 2.00 | 1.67 | 1.67 | 1.17 | 1.83 | 1.67 | 1.17 |
| 3 | 27.70 | 27.70 | 24.00 | 30.30 | 31.30 | 43.70 | 27.00 | 30.30 |
| 4 | 69.20 | 85.00 | 96.70 | 75.80 | 73.30 | 76.70 | 75.00 | 67.50 |
| 5 | 3.00 | 2.17 | 2.33 | 2.33 | 2.50 | 3.50 | 2.67 | 3.00 |
| 6 | 55.50 | 50.30 | 47.60 | 46.80 | 55.90 | 43.80 | 51.70 | 50.40 |
| 7 | 21.40 | 14.70 | 15.10 | 13.40 | 16.60 | 10.50 | 16.00 | 17.20 |
| 8 | 2.53 | 2.58 | 2.67 | 2.51 | 2.74 | 1.95 | 2.46 | 2.43 |
| 9 | 2.52 | 2.49 | 2.60 | 2.36 | 2.77 | 1.89 | 2.50 | 2.52 |
| 10 | 8.27 | 8.00 | 8.33 | 7.16 | 7.78 | 9.54 | 8.13 | 9.68 |
| 11 | 35.80 | 51.70 | 53.70 | 34.70 | 47.50 | 50.30 | 53.50 | 38.00 |
| 12 | 158.90 | 185.80 | 170.90 | 146.80 | 172.80 | 198.20 | 166.40 | 152.60 |
| 13 | 4.29 | 4.93 | 5.24 | 3.61 | 3.85 | 4.15 | 4.29 | 3.91 |
| 14 | 5.11 | 8.44 | 9.00 | 7.00 | 8.67 | 8.67 | 7.11 | 9.11 |
| 15 | 13.90 | 20.90 | 23.00 | 22.40 | 26.10 | 16.00 | 21.60 | 23.10 |
| 16 | 0.78 | 0.89 | 1.56 | 0.78 | 1.00 | 3.00 | 1.22 | 1.78 |
| 17 | 0.56 | 2.44 | 1.11 | 2.56 | 0.89 | 4.38 | 1.89 | 1.44 |
| 18 | 15.30 | 17.60 | 17.00 | 23.30 | 18.10 | 18.80 | 21.20 | 26.40 |
| 19 | 16.40 | 17.20 | 16.90 | 25.30 | 10.40 | 16.20 | 20.00 | 13.20 |
| 20 | 19.30 | 23.30 | 29.60 | 23.30 | 30.60 | 1.80 | 23.60 | 19.80 |
| 21 | 0.00 | 0.00 | 0.00 | 0.00 | 2.22 | 0.00 | 0.00 | 0.11 |
| 22 | 92.80 | 124.00 | 150.90 | 122.80 | 174.90 | 55.90 | 112.70 | 134.00 |
| 23 | 20.40 | 29.30 | 38.40 | 25.10 | 43.20 | 2.00 | 23.00 | 26.40 |
| 24 | 0.00 | 0.00 | 0.00 | 0.00 | 2.00 | 0.00 | 0.00 | 0.00 |
| 25 | 36.60 | 47.80 | 57.00 | 49.20 | 64.30 | 28.60 | 45.40 | 54.70 |
| 26 | 66.80 | 79.40 | 86.80 | 64.10 | 68.00 | 69.60 | 74.10 | 62.40 |
| 27 | 1.28 | 1.13 | 0.89 | 1.35 | 0.86 | 0.90 | 1.43 | 0.87 |
| 28 | 2.34 | 2.67 | 2.87 | 2.87 | 2.51 | 1.38 | 2.65 | 2.13 |
| 30 | 15.60 | 16.10 | 16.60 | 17.80 | 17.70 | 16.80 | 17.30 | 16.10 |
| 31 | 72.90 | 90.80 | 104.60 | 100.40 | 108.40 | 51.70 | 90.90 | 89.20 |
| 32 | 36.30 | 43.00 | 47.60 | 51.20 | 44.10 | 23.10 | 45.40 | 34.60 |
| 33 | 91.40 | 106.90 | 123.60 | 123.20 | 122.30 | 43.90 | 112.60 | 87.70 |
| 34 | 184.20 | 230.90 | 274.40 | 246.00 | 297.20 | 99.80 | 225.20 | 221.70 |
| 35 | 57.80 | 66.70 | 67.80 | 57.00 | 73.70 | 63.80 | 64.40 | 64.90 |
| 36 | 22.60 | 22.20 | 22.10 | 17.90 | 17.90 | 14.30 | 23.80 | 16.00 |
| 37 | 45.60 | 47.20 | 48.10 | 36.20 | 41.10 | 29.20 | 51.70 | 36.10 |
| 38 | 23.00 | 25.00 | 26.00 | 18.30 | 23.20 | 14.90 | 27.90 | 20.10 |
| 39 | — | — | 61 | — | — | 65.3 | — | 60.7 |
| 40 | — | — | 89 | — | — | — | — | 93 |

Table 110.

TABLE 111
Measured parameters in Soybean varieties (lines 9-16)

| | Line | | | | | | | |
|---|---|---|---|---|---|---|---|---|
| Corr. ID | Line-9 | Line-10 | Line-11 | Line-12 | Line-13 | Line-14 | Line-15 | Line-16 |
| 1 | 71.70 | 67.30 | 67.00 | 69.70 | 60.00 | 70.70 | 71.70 | 71.70 |
| 2 | 1.83 | 1.67 | 1.17 | 2.67 | 2.67 | 1.50 | 3.00 | 1.83 |
| 3 | 35.30 | 30.30 | 28.00 | 41.00 | 38.30 | 31.00 | 36.00 | 38.70 |
| 4 | 75.00 | 75.80 | 66.70 | 115.80 | 74.20 | 72.50 | 83.30 | 76.70 |
| 5 | 2.00 | 2.17 | 2.00 | 3.00 | 2.83 | 2.17 | 2.00 | 2.33 |
| 6 | 52.90 | 56.30 | 55.10 | 40.20 | 44.00 | 52.40 | 46.90 | 48.60 |
| 7 | 14.60 | 16.50 | 17.10 | 10.50 | 12.10 | 15.80 | 12.60 | 12.60 |
| 8 | 2.43 | 2.53 | 2.60 | 2.34 | 2.13 | 2.48 | 2.47 | 2.70 |
| 9 | 2.48 | 2.53 | 2.60 | 2.26 | 2.17 | 2.40 | 2.52 | 2.68 |
| 10 | 8.41 | 8.11 | 7.54 | 7.83 | 8.82 | 8.10 | 8.72 | 9.54 |
| 11 | 45.80 | 46.20 | 38.70 | 50.70 | 60.80 | 44.30 | 52.30 | 54.50 |
| 12 | 175.70 | 163.90 | 136.60 | 191.70 | 224.70 | 155.30 | 216.20 | 192.10 |
| 13 | 3.90 | 3.92 | 3.41 | 4.38 | 4.15 | 3.50 | 4.36 | 3.67 |
| 14 | 8.67 | 9.89 | 5.33 | 5.00 | 7.67 | 4.78 | 7.78 | 8.78 |
| 15 | 26.30 | 33.00 | 21.30 | 14.40 | 15.20 | 18.60 | 30.40 | 28.00 |
| 16 | 2.78 | 1.78 | 0.89 | 0.33 | 5.67 | 1.56 | 5.12 | 0.67 |
| 17 | 2.33 | 1.44 | 1.67 | 1.67 | 4.56 | 2.67 | 4.14 | 1.89 |
| 18 | 34.40 | 32.30 | 19.90 | 12.60 | 21.60 | 21.20 | 29.60 | 16.70 |
| 19 | 22.30 | 16.90 | 17.00 | 19.20 | 27.00 | 32.90 | 18.70 | 15.10 |
| 20 | 25.40 | 22.30 | 31.90 | 10.00 | 11.70 | 27.90 | 31.40 | 41.90 |
| 21 | 0.11 | 0.11 | 0.00 | 0.00 | 0.00 | 0.00 | 1.71 | 0.44 |
| 22 | 171.10 | 160.40 | 139.70 | 49.40 | 75.40 | 112.30 | 204.70 | 180.80 |
| 23 | 33.00 | 31.30 | 33.00 | 8.00 | 8.90 | 22.80 | 40.20 | 48.80 |
| 24 | 0.11 | 0.00 | 0.00 | 0.00 | 0.00 | 0.00 | 0.75 | 0.11 |
| 25 | 70.30 | 65.40 | 53.80 | 20.90 | 36.10 | 45.60 | 83.10 | 66.20 |
| 26 | 69.70 | 70.90 | 62.30 | 94.40 | 69.40 | 66.80 | 75.40 | 68.60 |
| 27 | 1.38 | 0.89 | 1.41 | 2.40 | 2.32 | 1.54 | 0.80 | 1.21 |
| 28 | 2.77 | 2.26 | 2.76 | 1.43 | 2.60 | 3.32 | 3.19 | 3.17 |
| 30 | 18.00 | 18.10 | 18.30 | 21.60 | 16.80 | 19.10 | 17.30 | 18.80 |
| 31 | 120.60 | 106.20 | 104.30 | 51.80 | 79.30 | 109.00 | 138.90 | 125.60 |
| 32 | 50.20 | 40.80 | 50.60 | 30.90 | 43.20 | 63.40 | 55.80 | 59.30 |
| 33 | 123.80 | 102.70 | 131.30 | 70.10 | 93.60 | 152.10 | 140.10 | 159.60 |
| 34 | 294.90 | 263.10 | 271.00 | 119.60 | 169.00 | 264.40 | 344.80 | 340.30 |
| 35 | 80.30 | 74.90 | 58.30 | 55.20 | 54.00 | 52.40 | 105.00 | 67.00 |
| 36 | 18.00 | 15.00 | 19.60 | 15.40 | 33.80 | 21.60 | 16.20 | 26.60 |
| 37 | 41.00 | 35.10 | 39.90 | 27.40 | 54.90 | 36.90 | 40.00 | 47.20 |
| 38 | 23.00 | 20.10 | 19.30 | 12.00 | 21.10 | 15.30 | 23.80 | 20.70 |
| 39 | — | 61 | — | — | 54.7 | — | — | — |
| 40 | — | 86 | — | — | — | — | — | — |

Table 111.

TABLE 112
Measured parameters in Soybean varieties (lines 18-23)

| | Line | | | | | | |
|---|---|---|---|---|---|---|---|
| Corr. ID | Line-17 | Line-18 | Line-19 | Line-20 | Line-21 | Line-22 | Line-23 |
| 1 | 74.00 | 73.00 | 72.30 | 73.30 | 67.30 | 68.70 | 69.30 |
| 2 | 2.83 | 2.67 | 2.50 | 1.67 | 2.50 | 1.83 | 2.00 |
| 3 | 40.00 | 41.00 | 38.30 | 37.00 | 24.70 | 31.00 | 37.70 |
| 4 | 76.70 | 101.70 | 98.30 | 89.20 | 93.30 | 75.80 | 78.30 |
| 5 | 2.00 | 3.50 | 2.50 | 2.00 | 2.50 | 2.17 | 2.17 |
| 6 | 40.30 | 34.20 | 44.30 | 46.20 | 49.70 | 53.70 | 52.50 |
| 7 | 10.20 | 7.30 | 11.40 | 13.90 | 14.60 | 15.70 | 14.80 |
| 8 | 2.68 | 2.12 | 2.58 | 2.48 | 2.61 | 2.58 | 2.70 |
| 9 | 2.59 | 2.22 | 2.49 | 2.53 | 2.53 | 2.47 | 2.67 |
| 10 | 10.12 | 8.46 | 8.09 | 8.11 | 7.09 | 8.26 | 7.57 |
| 11 | 55.70 | 48.00 | 52.00 | 45.20 | 57.00 | 44.20 | 43.30 |
| 12 | 265.00 | 160.70 | 196.30 | 166.30 | 171.40 | 155.30 | 175.80 |
| 13 | 3.74 | 4.80 | 4.36 | 4.18 | 4.89 | 4.20 | 4.16 |
| 14 | 17.56 | 11.67 | 12.11 | 10.44 | 8.00 | 8.00 | 9.00 |
| 15 | 45.20 | 8.20 | 25.40 | 22.70 | 23.00 | 21.90 | 23.80 |
| 16 | 5.62 | 2.88 | 3.00 | 2.33 | 1.67 | 1.25 | 0.89 |
| 17 | 1.67 | 4.00 | 4.33 | 1.89 | 1.78 | 2.11 | 0.44 |
| 18 | 33.50 | 8.50 | 22.80 | 21.90 | 22.90 | 21.80 | 13.20 |
| 19 | 8.10 | 21.30 | 17.70 | 20.00 | 17.40 | 20.30 | 11.20 |
| 20 | 22.80 | 11.10 | 28.20 | 27.90 | 25.10 | 24.10 | 25.20 |
| 21 | 0.44 | 0.00 | 0.56 | 0.56 | 0.44 | 0.00 | 0.11 |
| 22 | 324.60 | 46.90 | 176.20 | 121.60 | 151.60 | 143.00 | 144.00 |
| 23 | 82.00 | 9.00 | 42.10 | 24.60 | 34.10 | 32.80 | 38.90 |
| 24 | 1.50 | 0.00 | 0.33 | 0.44 | 0.44 | 0.00 | 0.00 |
| 25 | 122.60 | 20.40 | 68.20 | 49.20 | 59.10 | 55.80 | 53.00 |
| 26 | 63.90 | 89.80 | 82.10 | 81.10 | 85.70 | 70.60 | 70.80 |
| 27 | 0.36 | 3.90 | 0.78 | 1.36 | 0.92 | 1.18 | 0.82 |
| 28 | 1.87 | 1.98 | 2.71 | 2.58 | 2.45 | 2.78 | 2.15 |
| 30 | 17.10 | 18.80 | 18.90 | 19.40 | 19.90 | 16.80 | 17.00 |
| 31 | 155.60 | 61.00 | 119.00 | 99.60 | 103.90 | 103.20 | 90.00 |
| 32 | 33.00 | 36.40 | 50.80 | 50.30 | 44.80 | 46.60 | 37.00 |
| 33 | 88.00 | 80.00 | 126.60 | 127.80 | 113.80 | 115.10 | 99.00 |
| 34 | 412.50 | 136.00 | 302.80 | 249.30 | 265.30 | 260.50 | 243.00 |
| 35 | 167.20 | 45.40 | 83.20 | 63.70 | 69.70 | 64.30 | 76.20 |
| 36 | 9.00 | 9.00 | 16.00 | 14.60 | 19.80 | 15.90 | 14.70 |
| 37 | 38.90 | 14.20 | 36.10 | 29.50 | 44.10 | 32.80 | 33.90 |
| 38 | 30.20 | 4.10 | 20.10 | 14.90 | 24.30 | 17.00 | 19.20 |
| 39 | 68.3 | 66.5 | 68.3 | — | — | 62.3 | — |
| 40 | 71.3 | 88 | 75 | — | — | 80.7 | — |

Table 112.

TABLE 113
Measured parameters in Soybean varieties (lines 24-29)

| | Line | | | | | |
|---|---|---|---|---|---|---|
| Corr. ID | Line-24 | Line-25 | Line-26 | Line-27 | Line-28 | Line-29 |
| 1 | 73.70 | 68.00 | 68.70 | 68.00 | 67.00 | 70.70 |
| 2 | 3.50 | 3.33 | 1.83 | 1.50 | 2.33 | 1.50 |
| 3 | 39.00 | 27.30 | 27.70 | 27.30 | 36.30 | 32.70 |
| 4 | 116.70 | 76.70 | 85.00 | 78.30 | 79.20 | 71.70 |
| 5 | 2.33 | 2.17 | 2.17 | 2.33 | 2.17 | 2.17 |
| 6 | 42.50 | 43.60 | 51.90 | 52.50 | 46.40 | 52.20 |
| 7 | 10.80 | 13.00 | 16.40 | 16.60 | 15.80 | 15.20 |
| 8 | 2.67 | 2.62 | 2.37 | 2.67 | 2.62 | 2.58 |
| 9 | 2.71 | 2.51 | 2.53 | 2.64 | 2.65 | 2.61 |
| 10 | 7.73 | 8.16 | 8.18 | 6.88 | 7.82 | 7.89 |
| 11 | 52.70 | 56.00 | 56.20 | 43.50 | 46.00 | 47.50 |
| 12 | 178.10 | 204.40 | 205.90 | 144.70 | 176.40 | 164.20 |
| 13 | 4.82 | 4.12 | 4.36 | 4.64 | 4.47 | 3.57 |
| 14 | 9.11 | 6.78 | 7.11 | 4.33 | 9.11 | 10.00 |
| 15 | 16.30 | 22.60 | 19.90 | 11.80 | 16.00 | 24.20 |
| 16 | 2.67 | 1.78 | 1.00 | 0.56 | 2.11 | 3.00 |
| 17 | 1.89 | 3.44 | 3.22 | 1.67 | 3.33 | 1.22 |
| 18 | 10.70 | 23.80 | 26.80 | 10.20 | 15.90 | 25.70 |
| 19 | 16.10 | 28.10 | 24.70 | 14.70 | 14.30 | 16.60 |
| 20 | 36.40 | 39.70 | 35.80 | 31.70 | 37.60 | 32.30 |
| 21 | 3.89 | 0.00 | 0.00 | 0.78 | 0.78 | 0.00 |
| 22 | 105.40 | 184.30 | 166.20 | 92.30 | 143.80 | 187.30 |
| 23 | 25.70 | 45.00 | 37.20 | 23.80 | 35.90 | 44.30 |
| 24 | 1.11 | 0.00 | 0.00 | 0.00 | 0.56 | 0.00 |
| 25 | 40.10 | 70.60 | 71.70 | 34.60 | 54.40 | 73.00 |
| 26 | 101.70 | 79.60 | 77.40 | 73.70 | 73.70 | 67.20 |
| 27 | 1.98 | 1.03 | 1.48 | 1.82 | 1.35 | 0.83 |
| 28 | 2.75 | 3.70 | 3.58 | 3.06 | 3.34 | 2.84 |
| 30 | 21.10 | 19.30 | 17.80 | 15.90 | 16.70 | 20.80 |
| 31 | 98.40 | 141.80 | 135.30 | 83.30 | 110.40 | 123.10 |
| 32 | 58.30 | 71.20 | 63.70 | 48.80 | 56.00 | 50.10 |
| 33 | 159.00 | 178.70 | 159.90 | 129.10 | 147.80 | 131.30 |
| 34 | 264.40 | 363.00 | 326.10 | 221.40 | 291.60 | 318.70 |
| 35 | 52.00 | 76.90 | 74.80 | 35.30 | 52.10 | 67.00 |
| 36 | 14.60 | 30.40 | 24.20 | 26.40 | 21.40 | 18.00 |
| 37 | 23.80 | 58.60 | 48.40 | 40.70 | 35.80 | 40.60 |
| 38 | 9.20 | 28.10 | 24.20 | 14.30 | 15.10 | 22.60 |
| 39 | 67.7 | 61.7 | — | — | — | 64.3 |
| 40 | 75.7 | 76.3 | — | — | — | 77.3 |

Table 113.

TABLE 114
Correlation between the expression level of selected
genes of some embodiments of the invention in various tissues
and the phenotypic performance under normal conditions
across 26 soybean varieties

| Gene Name | R | P value | Exp. set | Corr. ID |
|---|---|---|---|---|
| LYD1014 | 0.70 | 4.56E−05 | 3 | 31 |

Table 114. Provided are the correlations (R) between the expression levels yield improving genes and their homologs in various tissues [Expression (Exp) sets, Table 108] and the phenotypic performance (yield, biomass, and plant architecture) according to the Correlation(Corr.) vectors (Table 109) under normal conditions across soybean varieties.
P = p value.

TABLE 115
Correlation between the expression level of selected genes of some embodiments of
the invention in various tissues and the phenotypic performance under normal
conditions across 12 soybean varieties

| Gene | | | Exp. | Corr. | Gene | | | Exp. | Corr. |
|---|---|---|---|---|---|---|---|---|---|
| Name | R | P value | set | ID | Name | R | P value | set | ID |
| LBY496 | 0.83 | 3.06E−03 | 5 | 39 | LBY496 | 0.74 | 1.37E−02 | 8 | 39 |
| LBY496 | 0.78 | 2.34E−02 | 9 | 39 | LBY496 | 0.81 | 2.40E−03 | 2 | 39 |
| LBY496 | 0.78 | 2.61E−03 | 4 | 39 | LBY534 | 0.91 | 2.98E−04 | 5 | 39 |
| LBY534 | 0.88 | 3.59E−03 | 9 | 39 | LYD1003 | 0.72 | 8.56E−03 | 4 | 38 |
| LYD1004 | 0.77 | 8.50E−03 | 5 | 39 | LYD1006 | 0.78 | 8.15E−03 | 5 | 39 |
| LYD1007 | 0.83 | 1.11E−02 | 9 | 38 | LYD1008 | 0.86 | 6.12E−03 | 9 | 39 |
| LYD1014 | 0.72 | 1.81E−02 | 8 | 38 | LYD1014 | 0.97 | 9.69E−05 | 9 | 39 |
| LYD1016 | 0.86 | 3.23E−04 | 4 | 39 | | | | | |

Table 115. Provided are the correlations (R) between the expression levels yield improving genes and their homologs in various tissues [Expression (Exp) sets, Table 108] and the phenotypic performance (yield, biomass, and plant architecture) according to the Correlation (Corr.) vectors (Table 109) under normal conditions across soybean varieties.
P = p value.

### Example 13

### Production of Tomato Transcriptome and High Throughput Correlation Analysis Using 44K Tomato Oligonucleotide Micro-Array

[1122] In order to produce a high throughput correlation analysis between nitrogen use efficiency (NUE) related phenotypes and gene expression, the present inventors utilized a Tomato oligonucleotide micro-array, produced by Agilent Technologies [chem (dot) agilent (dot) com/Scripts/PDS (dot) asp?1Page=50879]. The array oligonucleotide represents about 44,000 Tomato genes and transcripts. In order to define correlations between the levels of RNA expression with NUE, abiotic stress tolerance (ABST), yield components or vigor related parameters various plant characteristics of 18 different Tomato varieties were analyzed. Among them, 10 varieties encompassing the observed variance were selected for RNA expression analysis. The correlation between the RNA levels and the characterized parameters was analyzed using Pearson correlation test [davidmlane (dot) com/hyperstat/A34739 (dot) html].

[1123] I. Correlation of Tomato Varieties Across Ecotypes Grown Under Low Nitrogen, Drought and Regular Growth Conditions

[1124] Experimental Procedures:

[1125] 18 Tomato varieties were grown in 3 repetitive blocks, each containing 6 plants per plot were grown at net house. Briefly, the growing protocol was as follows:

[1126] 1. Regular growth conditions: Tomato varieties were grown under normal conditions: 4-6 Liters/m² of water per day and fertilized with NPK (nitrogen, phosphorous and potassium at a ratio 6:6:6, respectively) as recommended in protocols for commercial tomato production.

[1127] 2. Low Nitrogen fertilization conditions: Tomato varieties were grown under normal conditions (4-6 Liters/m² per day and fertilized with NPK as recommended in protocols for commercial tomato production) until flower stage. At this time, Nitrogen fertilization was stopped.

[1128] 3. Drought stress: Tomato variety was grown under normal conditions (4-6 Liters/m² per day) until flower stage. At this time, irrigation was reduced to 50% compared to normal conditions.

[1129] Plants were phenotyped on a daily basis following the standard descriptor of tomato (Table 117). Harvest was conducted while 50% of the fruits were red (mature). Plants were separated to the vegetative part and fruits, of them, 2 nodes were analyzed for additional inflorescent parameters such as size, number of flowers, and inflorescent weight. Fresh weight of all vegetative material was measured. Fruits were separated to colors (red vs. green) and in accordance with the fruit size (small, medium and large). Next, analyzed data was saved to text files and processed using the JMP statistical analysis software (SAS institute). Data parameters collected are summarized in Tables 125-127, herein below.

[1130] Analyzed Tomato tissues—Two tissues at different developmental stages [flower and leaf], representing different plant characteristics, were sampled and RNA was extracted as described above. For convenience, each micro-array expression information tissue type has received a Set ID as summarized in Table 116 below.

TABLE 116
Tomato transcriptome expression sets

| Expression Set | Set ID |
|---|---|
| Leaf at reproductive stage under normal conditions | 1 |
| Flower under normal conditions | 2 |
| Leaf at reproductive stage under low N conditions | 3 |
| Flower under low N conditions | 4 |
| Leaf at reproductive stage under drought | 5 |
| conditions | |
| Flower under drought conditions | 6 |

Table 116: Provided are the identification (ID) digits of each of the tomato expression sets.

[1131] The collected data parameters were as follows:

[1132] Fruit Weight (gr.)—At the end of the experiment [when 50% of the fruits were ripe (red)] all fruits from plots within blocks A-C were collected. The total fruits were counted and weighted. The average fruits weight was calculated by dividing the total fruit weight by the number of fruits.

[1133] Yield/SLA—Fruit yield divided by the specific leaf area (SLA) gives a measurement of the balance between reproductive and vegetative processes.

[1134] Yield/total leaf area—Fruit yield divided by the total leaf area, gives a measurement of the balance between reproductive and vegetative processes.

[1135] Plant vegetative Weight (FW) (gr.)—At the end of the experiment [when 50% of the fruit were ripe (red)] all plants from plots within blocks A-C were collected. Fresh weight was measured (grams).

[1136] Inflorescence Weight (gr.)—At the end of the experiment [when 50% of the fruits were ripe (red)] two Inflorescence from plots within blocks A-C were collected. The Inflorescence weight (gr.) and number of flowers per inflorescence were counted.

[1137] SPAD—Chlorophyll content was determined using a Minolta SPAD 502 chlorophyll meter and measurement was performed at time of flowering. SPAD meter readings were done on young fully developed leaf. Three measurements per leaf were taken per plot.

[1138] Water use efficiency (WUE)—can be determined as the biomass produced per unit transpiration. To analyze WUE, leaf relative water content was measured in control and transgenic plants. Fresh weight (FW) was immediately recorded; then leaves were soaked for 8 hours in distilled water at room temperature in the dark, and the turgid weight (TW) was recorded. Total dry weight (DW) was recorded after drying the leaves at 60° C. to a constant weight. Relative water content (RWC) was calculated according to the following Formula 1 as described above.

[1139] Plants that maintain high relative water content (RWC) compared to control lines were considered more tolerant to drought than those exhibiting reduced relative water content.

TABLE 117
Tomato correlated parameters (vectors)

| Correlated parameter with | Correlation ID |
|---|---|
| Total Leaf Area [cm²], under Normal growth conditions | 1 |
| Leaflet Length [cm], under Normal growth conditions | 2 |
| Leaflet Width [cm], under Normal growth conditions | 3 |
| 100 weight green fruit [gr.], under Normal growth conditions | 4 |
| 100 weight red fruit [gr.], under Normal growth conditions | 5 |
| SLA [leaf area/plant biomass] [cm²/gr], under Normal growth conditions | 6 |
| Yield/total leaf area [gr./cm²], under Normal growth conditions | 7 |
| Yield/SLA [gr./(cm²/gr.)], under Normal growth conditions | 8 |
| NUE [yield/SPAD] [gr./number], under Normal growth conditions | 9 |
| NUpE [biomass/SPAD] [gr./number], under Normal growth conditions | 10 |
| HI [yield/yield + biomass], under Normal growth conditions | 11 |
| NUE2 [total biomass/SPAD] [gr./number], under Normal growth conditions | 12 |
| 100 weight red fruit [gr.], under Low N growth conditions | 13 |
| Fruit Yield/Plant [gr./number], under Low N growth conditions | 14 |
| FW/Plant [gr./number], under Low N growth conditions | 15 |
| Average red fruit weight [gr.], under Low N growth conditions | 16 |
| Fruit number (ratio, Low N/Normal conditions) | 17 |
| FW [gr.] (ratio, Low N/Normal conditions) | 18 |
| SPAD, under Low N growth conditions | 19 |
| RWC, under Low N growth conditions | 20 |
| SPAD 100% RWC, under Low N growth conditions | 21 |
| SPAD (ratio, Low N/Normal) | 22 |
| SPAD 100% RWC (ratio, Low N/Normal) | 23 |
| RWC (ratio, Low N/Normal) | 24 |
| No flowers (Low N conditions) | 25 |
| Weight clusters (flowers) (Low N conditions) | 26 |
| Num. Flowers (ratio, Low N/Normal) | 27 |
| Cluster Weight (ratio, Low N/Normal) | 28 |
| NUE [yield/SPAD], under Low N growth conditions | 29 |
| NUpE [biomass/SPAD], under Low N growth conditions | 30 |
| HI [yield/yield + biomass], under Low N growth conditions | 31 |
| NUE2 [total biomass/SPAD] [gr./number], under Low N growth conditions | 32 |
| Total Leaf Area [cm²], under Low N growth conditions | 33 |
| Leaflet Length [cm], under Low N growth conditions | 34 |
| Leaflet Width [cm], under Low N growth conditions | 35 |
| 100 weight green fruit [gr.], under Low N growth conditions | 36 |
| SLA [leaf area/plant biomass] [cm²/gr], under Low N growth conditions | 37 |
| Yield/total leaf area [gr/cm²], under Low N growth conditions | 38 |
| Yield/SLA [gr./(cm²/gr.)], under Low N growth conditions | 39 |
| RWC, under Drought growth conditions | 40 |
| RWC (ratio, Drought/Normal) | 41 |
| Number of flowers, under Drought growth conditions | 42 |
| Weight flower clusters [gr.], under Drought growth conditions | 43 |
| Number of Flower (ratio, Drought/Normal) | 44 |
| Number of Flower (ratio, Drought/Low N) | 45 |
| Flower cluster weight (ratio, Drought/Normal) | 46 |
| Flower cluster weight (ratio, Drought/Low N) | 47 |
| Fruit Yield/Plant [gr./number], under Drought growth conditions | 48 |
| FW/Plant [gr./number], under Drought growth conditions | 49 |
| Average red fruit weight [gr.], under Drought growth conditions | 50 |
| Fruit Yield (ratio, Drought/Normal) | 51 |
| Fruit (ratio, Drought/Low N) | 52 |
| FW (ratio, Drought/Normal) | 53 |
| Red fruit weight (ratio, Drought/Normal) | 54 |
| Total Leaf Area [cm²]), under Drought growth conditions | 55 |
| Leaflet Length [cm]), under Drought growth conditions | 56 |
| Leaflet Width [cm], under Drought growth conditions | 57 |
| 100 weight green fruit [gr.], under Drought growth conditions | 58 |
| 100 weight red fruit [gr.], under Drought growth conditions | 59 |
| Fruit yield/Plant [gr.], under Normal growth conditions | 60 |
| FW/Plant [gr./number], under Normal growth conditions | 61 |
| Average red fruit weight [gr.], under Normal growth conditions | 62 |
| SPAD, under Normal growth conditions | 63 |
| RWC, under Normal growth conditions | 64 |
| SPAD 100% RWC, under Normal growth conditions | 65 |
| Number of flowers, under Normal growth conditions | 66 |
| Weight Flower clusters [gr.], under Normal growth conditions | 67 |

Table 117. Provided are the tomato correlated parameters.
“low N” = low nitrogen growth conditions, nitrogen deficiency as described above. “gr.” = grams; “FW” = fresh weight; “NUE” = nitrogen use efficiency; “RWC” = relative water content; “NUpE” = nitrogen uptake efficiency; “SPAD” = chlorophyll levels; “HI” = harvest index (vegetative weight divided on yield); “SLA” = specific leaf area (leaf area divided by leaf dry weight). “ratio, Low N/Normal conditions” = the ratio between values measured under low N growth conditions to the values measured under normal growth conditions; “ratio, Drought/Normal” = the ratio between the values measured under drought growth conditions to the values measured under normal growth conditions; “ratio, Drought/Low N” = the ratio between the values measured under drought growth conditions and the values measured under low N growth conditions;

[1140] Experimental Results

[1141] Table 117 provides the tomato correlated parameters (Vectors). The average for each of the measured parameters was calculated using the JMP software and values are summarized in Tables 118-120 below. Subsequent correlation analysis was conducted (Table 121). Results were integrated to the database.

TABLE 118
Measured parameters in Tomato accessions (lines 1-6)

| | Line | | | | | |
|---|---|---|---|---|---|---|
| Corr. ID | Line-1 | Line-2 | Line-3 | Line-4 | Line-5 | Line-6 |
| 1 | — | — | 426.1 | 582.4 | 291.4 | 593.6 |
| 2 | — | — | 6.34 | 7.99 | 5.59 | 7.70 |
| 3 | — | — | 3.69 | 4.77 | 3.43 | 4.56 |
| 4 | — | — | 0.56 | 3.05 | 0.24 | 2.58 |
| 5 | — | — | 0.82 | 2.46 | 0.50 | 2.76 |
| 6 | — | — | 141 | 689.7 | 130.2 | 299.1 |
| 7 | — | — | 0.0012 | 0.0002 | 0.0017 | 0.0008 |
| 8 | — | — | 0.0035 | 0.0002 | 0.0037 | 0.0015 |
| 9 | 0.0166 | 0.0092 | 0.0089 | 0.0026 | 0.0101 | 0.0105 |
| 10 | 0.0307 | 0.0853 | 0.0542 | 0.0182 | 0.0464 | 0.0457 |
| 11 | 0.351 | 0.097 | 0.14 | 0.125 | 0.179 | 0.186 |
| 12 | 0.0473 | 0.0945 | 0.063 | 0.0208 | 0.0565 | 0.0562 |
| 13 | 1.06 | 6.87 | 0.65 | 0.53 | 7.17 | 0.44 |
| 14 | 0.41 | 0.66 | 0.48 | 0.46 | 1.35 | 0.35 |
| 15 | 4.04 | 1.21 | 2.25 | 2.54 | 1.85 | 3.06 |
| 16 | 0.0239 | 0.1907 | 0.0065 | 0.0053 | 0.0963 | 0.0044 |
| 17 | 0.49 | 1.93 | 0.97 | 3.80 | 2.78 | 0.78 |
| 18 | 2.65 | 0.38 | 0.74 | 3.01 | 0.83 | 1.54 |
| 19 | 38.40 | 39.40 | 47.50 | 37.00 | 44.60 | 41.70 |
| 20 | 74.10 | 99.10 | 69.50 | 63.20 | 77.40 | 77.90 |
| 21 | 28.50 | 39.00 | 33.00 | 23.40 | 34.50 | 32.50 |
| 22 | 0.77 | 1.06 | 0.85 | 0.80 | 0.93 | 0.96 |
| 23 | 0.79 | 1.37 | 0.92 | 0.75 | 1.31 | 0.97 |
| 24 | 1.02 | 1.30 | 1.08 | 0.94 | 1.41 | 1.00 |
| 25 | 19.00 | 5.30 | 9.00 | 13.00 | 10.70 | 16.70 |
| 26 | 0.53 | 0.37 | 0.31 | 0.35 | 0.47 | 0.25 |
| 27 | 3.35 | 0.28 | 1.42 | 1.70 | 1.10 | 2.00 |
| 28 | 0.457 | 1.072 | 0.442 | 0.006 | 1.076 | 0.022 |
| 29 | 0.0142 | 0.0169 | 0.0144 | 0.0196 | 0.0391 | 0.0109 |
| 30 | 0.1419 | 0.0311 | 0.068 | 0.1085 | 0.0536 | 0.0942 |
| 31 | 0.091 | 0.352 | 0.175 | 0.153 | 0.422 | 0.104 |
| 32 | 0.1562 | 0.048 | 0.0825 | 0.128 | 0.0927 | 0.1051 |
| 33 | 565.9 | 384.8 | 294.8 | 378 | 476.4 | 197.1 |
| 34 | 6.40 | 5.92 | 3.69 | 5.43 | 6.95 | 3.73 |
| 35 | 3.47 | 1.97 | 1.79 | 2.55 | 3.52 | 1.73 |
| 36 | 0.87 | 3.66 | 0.57 | 0.37 | 3.40 | 0.68 |
| 37 | 140.00 | 317.10 | 131.30 | 148.80 | 257.50 | 64.30 |
| 38 | 0.0007 | 0.0017 | 0.0016 | 0.0012 | 0.0028 | 0.0018 |
| 39 | 0.0029 | 0.0021 | 0.0036 | 0.0031 | 0.0052 | 0.0055 |
| 40 | 72.10 | 74.50 | 65.30 | 72.20 | 66.10 | 68.30 |
| 41 | 0.99 | 0.97 | 1.02 | 1.08 | 1.21 | 0.88 |
| 42 | 16.70 | 6.50 | 15.70 | 20.30 | 11.70 | 25.30 |
| 43 | 0.368 | 0.407 | 0.325 | 0.288 | 0.551 | 0.311 |
| 44 | 2.94 | 0.34 | 2.47 | 2.65 | 1.21 | 3.04 |
| 45 | 0.88 | 1.22 | 1.74 | 1.56 | 1.09 | 1.52 |
| 46 | 0.32 | 1.19 | 0.47 | 0.01 | 1.25 | 0.03 |
| 47 | 0.69 | 1.11 | 1.06 | 0.82 | 1.16 | 1.25 |
| 48 | 0.467 | 0.483 | 0.629 | 0.347 | 2.044 | 0.25 |
| 49 | 2.62 | 1.09 | 1.85 | 2.22 | 2.63 | 2.71 |
| 50 | 0.0092 | 0.1948 | 0.209 | 0.0047 | 0.102 | 0.0019 |
| 51 | 0.57 | 1.41 | 1.27 | 2.88 | 4.2 | 0.55 |
| 52 | 1.15 | 0.73 | 1.32 | 0.76 | 1.51 | 0.71 |
| 53 | 1.72 | 0.34 | 0.61 | 2.63 | 1.18 | 1.36 |
| 54 | 0.19 | 24.37 | 25.38 | 0.02 | 20.26 | 0.04 |
| 55 | — | — | — | — | — | — |
| 56 | — | — | — | — | — | — |
| 57 | — | — | — | — | — | — |
| 58 | — | — | — | — | — | — |
| 59 | — | — | — | — | — | — |
| 60 | 0.826 | 0.342 | 0.494 | 0.121 | 0.487 | 0.454 |
| 61 | 1.53 | 3.17 | 3.02 | 0.84 | 2.24 | 1.98 |
| 62 | 0.0479 | 0.008 | 0.0082 | 0.2861 | 0.005 | 0.0541 |
| 63 | 49.70 | 37.20 | 55.80 | 46.40 | 48.20 | 43.40 |
| 64 | 72.80 | 76.50 | 64.30 | 67.10 | 54.80 | 77.60 |
| 65 | 36.20 | 28.40 | 35.90 | 31.10 | 26.40 | 33.70 |
| 66 | 5.67 | 19.33 | 6.33 | 7.67 | 9.67 | 8.33 |
| 67 | 1.17 | 0.34 | 0.69 | 56.35 | 0.44 | 11.31 |

Table 118. Provided are the values of each of the parameters (as described above) measured in tomato accessions 1-6 (line numbers) under all growth conditions. Growth conditions are specified in the experimental procedure section.

TABLE 119
Measured parameters in Tomato accessions (lines 7-12)

| | Line | | | | | |
|---|---|---|---|---|---|---|
| Corr. ID | Line-7 | Line-8 | Line-9 | Line-10 | Line-11 | Line-12 |
| 1 | 947.6 | 233.4 | 340.7 | 339.1 | 190.1 | 421.8 |
| 2 | 7.85 | 6.22 | 6.16 | 5.65 | 4.39 | 4.44 |
| 3 | 4.44 | 3.15 | 3.37 | 3.13 | 2.40 | 2.02 |
| 4 | 6.32 | 5.75 | 0.38 | 0.30 | 1.95 | 2.53 |
| 5 | 5.32 | 5.24 | 0.61 | 0.66 | 2.70 | 0.70 |
| 6 | 1117.7 | 111.8 | 106.3 | 123.1 | 105 | 111.9 |
| 7 | 0.0006 | 0.0019 | 0.0006 | 0.0009 | 0.0035 | 0.0004 |
| 8 | 0.0005 | 0.0039 | 0.002 | 0.0025 | 0.0063 | 0.0017 |
| 9 | 0.0123 | 0.0083 | 0.0036 | 0.0061 | 0.0166 | 0.004 |
| 10 | 0.0198 | 0.0392 | 0.0548 | 0.0539 | 0.0453 | 0.0792 |
| 11 | 0.384 | 0.174 | 0.061 | 0.101 | 0.268 | 0.048 |
| 12 | 0.0321 | 0.0474 | 0.0584 | 0.06 | 0.0618 | 0.0832 |
| 13 | | 0.55 | 0.75 | 0.58 | 1.27 | 1.34 |
| 14 | 0.01 | 0.51 | 0.44 | 0.47 | 1.59 | 0.39 |
| 15 | 3.13 | 2.54 | 1.84 | 1.52 | 1.91 | 1.86 |
| 16 | 0.0055 | 0.0075 | 0.0058 | 0.0127 | 0.0212 | 0.0052 |
| 17 | 0.02 | 1.16 | 2.07 | 1.51 | 2.41 | 2.06 |
| 18 | 3.70 | 1.22 | 0.58 | 0.55 | 1.06 | 0.49 |
| 19 | 34.40 | 50.00 | 44.70 | 53.70 | 35.70 | 58.80 |
| 20 | 80.50 | 67.40 | 67.20 | 66.10 | 69.60 | 69.30 |
| 21 | 27.70 | 33.70 | 30.00 | 35.50 | 24.80 | 40.80 |
| 22 | 0.80 | 0.94 | 0.76 | 1.05 | 0.89 | 1.24 |
| 23 | 1.11 | 0.95 | 0.79 | 0.92 | 0.94 | 1.36 |
| 24 | 1.38 | 1.01 | 1.04 | 0.88 | 1.05 | 1.10 |
| 25 | 6.00 | 16.00 | 15.00 | 6.00 | 17.00 | 13.00 |
| 26 | 0.29 | 0.47 | 0.40 | 0.30 | 0.82 | 0.40 |
| 27 | 1.20 | 1.92 | 1.50 | 0.86 | 1.89 | 1.62 |
| 28 | 0.371 | 0.809 | 0.548 | 0.364 | 0.953 | 0.8 |
| 29 | 0.0003 | 0.0151 | 0.0145 | 0.0132 | 0.0642 | 0.0095 |
| 30 | 0.1133 | 0.0755 | 0.0614 | 0.0427 | 0.0771 | 0.0455 |
| 31 | 0.003 | 0.167 | 0.191 | 0.236 | 0.454 | 0.173 |
| 32 | 0.1136 | 0.0906 | 0.0759 | 0.0559 | 0.1413 | 0.055 |
| 33 | 453.2 | 625.5 | 748 | 454 | 164.9 | 338.3 |
| 34 | 4.39 | 6.72 | 6.66 | 4.39 | 3.90 | 5.29 |
| 35 | 1.87 | 3.54 | 3.28 | 2.52 | 2.61 | 2.61 |
| 36 | 0.45 | 0.47 | 0.54 | 0.39 | 0.97 | 0.91 |
| 37 | 144.60 | 246.10 | 405.50 | 299.30 | 86.20 | 182.30 |
| 38 | 0 | 0.0008 | 0.0006 | 0.001 | 0.0097 | 0.0011 |
| 39 | 0.0001 | 0.0021 | 0.0011 | 0.0016 | 0.0185 | 0.0021 |
| 40 | 78.10 | 18.50 | 73.20 | 62.50 | 67.20 | 75.80 |
| 41 | 1.34 | 0.28 | 1.13 | 0.83 | 1.01 | 1.20 |
| 42 | 29.70 | 17.30 | 14.70 | 29.70 | 15.00 | 10.30 |
| 43 | 0.445 | 0.555 | 0.304 | 0.315 | 0.308 | 0.311 |
| 44 | 5.95 | 2.08 | 1.47 | 4.24 | 1.67 | 1.29 |
| 45 | 4.96 | 1.08 | 0.98 | 4.94 | 0.88 | 0.79 |
| 46 | 0.56 | 0.96 | 0.42 | 0.38 | 0.36 | 0.62 |
| 47 | 1.52 | 1.19 | 0.76 | 1.04 | 0.38 | 0.78 |
| 48 | 0.045 | 0.453 | 0.292 | 1.017 | 0.6 | 0.494 |
| 49 | 3.41 | 2.11 | 1.95 | 1.76 | 1.72 | 1.92 |
| 50 | 0.0346 | 0.0063 | 0.0053 | 0.0049 | 0.0052 | 0.012 |
| 51 | 0.09 | 1.03 | 1.39 | 3.28 | 0.91 | 2.62 |
| 52 | 5.06 | 0.89 | 0.67 | 2.17 | 0.38 | 1.27 |
| 53 | 4.02 | 1.01 | 0.61 | 0.64 | 0.95 | 0.51 |
| 54 | 0.15 | 0.02 | 0.86 | 0.74 | 0.09 | 1.72 |
| 55 | — | — | — | — | — | 337.60 |
| 56 | — | — | — | — | — | 5.15 |
| 57 | — | — | — | — | — | 2.55 |
| 58 | — | — | — | — | — | 0.80 |
| 59 | — | — | — | — | — | 0.89 |
| 60 | 0.529 | 0.44 | 0.21 | 0.31 | 0.662 | 0.189 |
| 61 | 0.85 | 2.09 | 3.21 | 2.75 | 1.81 | 3.77 |
| 62 | 0.2306 | 0.2898 | 0.0061 | 0.0066 | 0.0577 | 0.007 |
| 63 | 42.90 | 53.30 | 58.50 | 51.10 | 40.00 | 47.60 |
| 64 | 58.20 | 66.50 | 64.70 | 75.20 | 66.20 | 63.20 |
| 65 | 25.00 | 35.50 | 37.90 | 38.40 | 26.50 | 30.10 |
| 66 | 5.00 | 8.33 | 10.00 | 7.00 | 9.00 | 8.00 |
| 67 | 0.79 | 0.58 | 0.73 | 0.83 | 0.86 | 0.50 |

Table 119. Provided are the values of each of the parameters (as described above) measured in tomato accessions 7-12 (line numbers) under all growth conditions. Growth conditions are specified in the experimental procedure section.

TABLE 120
Measured parameters in Tomato accessions (lines 13-18)

| | Line | | | | | |
|---|---|---|---|---|---|---|
| Corr. ID | Line-13 | Line-14 | Line-15 | Line-16 | Line-17 | Line-18 |
| 1 | 581.3 | 807.5 | 784.1 | 351.8 | 255.8 | 1078.1 |
| 2 | 6.77 | 7.42 | 6.71 | 5.87 | 4.16 | 10.29 |
| 3 | 3.80 | 3.74 | 2.98 | 3.22 | 2.09 | 5.91 |
| 4 | 1.42 | 2.03 | 1.39 | 2.27 | 0.45 | 0.42 |
| 5 | 2.64 | 4.67 | 2.17 | 0.49 | 0.34 | 0.75 |
| 6 | 307.9 | 419.4 | 365.8 | 212.9 | 84.9 | 469.9 |
| 7 | 0.0015 | 0.0003 | 0.0004 | 0.0009 | 0.0012 | 0.0003 |
| 8 | 0.0028 | 0.0007 | 0.0009 | 0.0015 | 0.0037 | 0.0006 |
| 9 | 0.0147 | 0.0057 | 0.008 | 0.006 | 0.0076 | 0.0049 |
| 10 | 0.0326 | 0.0399 | 0.0492 | 0.0303 | 0.0724 | 0.0388 |
| 11 | 0.311 | 0.124 | 0.139 | 0.165 | 0.095 | 0.113 |
| 12 | 0.0473 | 0.0455 | 0.0571 | 0.0363 | 0.0799 | 0.0437 |
| 13 | 0.52 | 0.57 | 0.94 | 6.17 | 3.67 | 11.32 |
| 14 | 0.32 | 0.45 | 0.14 | 0.40 | 1.44 | 0.50 |
| 15 | 2.47 | 2.62 | 1.08 | 1.17 | 0.92 | 1.09 |
| 16 | 0.0057 | 0.0475 | 0.3573 | 0.0367 | 0.6265 | — |
| 17 | 0.38 | 1.64 | 0.41 | 1.21 | 4.59 | 1.70 |
| 18 | 1.31 | 1.36 | 0.51 | 0.71 | 0.31 | 0.47 |
| 19 | 47.50 | 45.20 | 39.00 | 45.00 | 65.30 | 51.90 |
| 20 | 100.00 | 57.70 | 90.80 | 68.00 | 59.60 | 72.20 |
| 21 | 47.50 | 26.10 | 35.40 | 30.60 | 39.00 | 37.50 |
| 22 | 0.82 | 0.94 | 0.89 | 0.83 | 1.57 | 0.88 |
| 23 | 1.44 | 1.50 | 1.05 | 0.56 | 1.48 | 0.84 |
| 24 | 1.76 | 1.60 | 1.17 | 0.68 | 0.94 | 0.96 |
| 25 | 8.70 | 9.30 | 12.70 | 6.70 | 9.30 | 8.00 |
| 26 | 0.35 | 0.43 | 0.35 | 0.45 | 0.28 | 0.47 |
| 27 | 1.62 | 1.17 | 1.65 | 0.74 | 0.88 | 0.89 |
| 28 | 0.34 | 0.611 | 0.938 | 0.677 | 0.404 | 1.439 |
| 29 | 0.0068 | 0.0172 | 0.004 | 0.0129 | 0.037 | 0.0132 |
| 30 | 0.0521 | 0.1006 | 0.0307 | 0.0381 | 0.0236 | 0.029 |
| 31 | 0.115 | 0.146 | 0.116 | 0.253 | 0.61 | 0.313 |
| 32 | 0.0589 | 0.1178 | 0.0347 | 0.051 | 0.0606 | 0.0423 |
| 33 | 396 | 236.1 | 174.6 | 441.8 | 489.2 | 707.8 |
| 34 | 6.32 | 5.11 | 4.72 | 6.83 | 7.10 | 8.21 |
| 35 | 3.58 | 2.56 | 2.48 | 3.43 | 3.30 | 3.69 |
| 36 | 0.36 | 0.35 | 0.57 | 4.38 | 2.02 | 8.13 |
| 37 | 160.20 | 90.10 | 161.00 | 379.00 | 531.10 | 650.70 |
| 38 | 0.0008 | 0.0019 | 0.0008 | 0.0009 | 0.0029 | 0.0007 |
| 39 | 0.002 | 0.005 | 0.0009 | 0.001 | 0.0027 | 0.0008 |
| 40 | 62.80 | 70.70 | 55.80 | 75.20 | 63.70 | 62.30 |
| 41 | 1.11 | 1.97 | 0.72 | 0.75 | 1.01 | 0.83 |
| 42 | 18.30 | 12.00 | 20.30 | 12.70 | 12.70 | 11.30 |
| 43 | 8.36 | 0.288 | 0.342 | 0.441 | 0.268 | 0.426 |
| 44 | 3.44 | 1.50 | 2.65 | 1.41 | 1.19 | 1.26 |
| 45 | 2.12 | 1.29 | 1.61 | 1.90 | 1.36 | 1.42 |
| 46 | 8.20 | 0.41 | 0.91 | 0.67 | 0.38 | 1.31 |
| 47 | 24.12 | 0.67 | 0.97 | 0.99 | 0.95 | 0.91 |
| 48 | 0.272 | 0.679 | 0.14 | 0.529 | 0.554 | 0.414 |
| 49 | 2.21 | 3.73 | 0.75 | 1.76 | 0.63 | 1.11 |
| 50 | 0.0045 | 0.0063 | 0.3032 | 0.1376 | 0.0405 | 0.0885 |
| 51 | 0.32 | 2.48 | 0.41 | 1.62 | 1.76 | 1.42 |
| 52 | 0.84 | 1.51 | 0.98 | 1.34 | 0.38 | 0.84 |
| 53 | 1.17 | 1.94 | 0.35 | 1.06 | 0.21 | 0.48 |
| 54 | 0.17 | 0.02 | 10.50 | 27.89 | 11.79 | 9.98 |
| 55 | 130.80 | 557.90 | 176.70 | 791.90 | 517.00 | 832.30 |
| 56 | 3.38 | 7.14 | 5.48 | 8.62 | 6.35 | 6.77 |
| 57 | 2.04 | 4.17 | 3.09 | 4.69 | 3.87 | 2.91 |
| 58 | 0.28 | 0.38 | 0.63 | 2.86 | 1.16 | 4.40 |
| 59 | 0.35 | 0.63 | 2.27 | 7.40 | 2.94 | 11.60 |
| 60 | 0.852 | 0.273 | 0.347 | 0.327 | 0.314 | 0.291 |
| 61 | 1.89 | 1.93 | 2.14 | 1.65 | 3.01 | 2.29 |
| 62 | 0.0264 | 0.2611 | 0.0289 | 0.0049 | 0.0034 | 0.0089 |
| 63 | 57.90 | 48.30 | 43.60 | 54.50 | 41.60 | 59.10 |
| 64 | 56.80 | 36.00 | 77.60 | 100.00 | 63.20 | 75.10 |
| 65 | 32.90 | 17.40 | 33.80 | 54.50 | 26.30 | 44.40 |
| 66 | 5.33 | 8.00 | 7.67 | 9.00 | 10.67 | 9.00 |
| 67 | 1.02 | 0.70 | 0.38 | 0.66 | 0.70 | 0.33 |

Table 120: Provided are the values of each of the parameters (as described above) measured in tomato accessions 13-18 (line numbers) under all growth conditions. Growth conditions are specified in the experimental procedure section.

TABLE 121
Correlation between the expression level of selected genes of some embodiments of
the invention in various tissues and the phenotypic performance under normal and
stress conditions across tomato ecotypes

| Gene | | | Exp. | Corr. | Gene | | | Exp. | Corr. |
|---|---|---|---|---|---|---|---|---|---|
| Name | R | P value | set | ID | Name | R | P value | set | ID |
| LBY499 | 0.79 | 6.63E−03 | 3 | 28 | LBY499 | 0.78 | 8.26E−03 | 10 | 31 |
| LBY499 | 0.73 | 1.69E−02 | 10 | 37 | LBY499 | 0.74 | 1.41E−02 | 9 | 36 |
| LBY499 | 0.72 | 1.89E−02 | 9 | 13 | LBY499 | 0.74 | 2.17E−02 | 4 | 16 |
| LBY499 | 0.76 | 1.09E−02 | 5 | 50 | LBY499 | 0.79 | 6.43E−03 | 5 | 54 |
| LBY500 | 0.85 | 1.81E−03 | 3 | 18 | LBY500 | 0.88 | 8.31E−04 | 3 | 27 |
| LBY500 | 0.88 | 8.37E−04 | 3 | 15 | LBY500 | 0.79 | 6.13E−03 | 3 | 25 |
| LBY500 | 0.83 | 5.94E−03 | 11 | 3 | LBY500 | 0.82 | 6.44E−03 | 11 | 1 |
| LBY500 | 0.75 | 2.01E−02 | 12 | 3 | LBY500 | 0.70 | 3.54E−02 | 12 | 1 |
| LBY500 | 0.78 | 8.01E−03 | 9 | 32 | LBY500 | 0.85 | 1.70E−03 | 9 | 30 |

Table 121. Provided are the correlations (R) between the expression levels yield improving genes and their homologs in various tissues [Expression (Exp) sets, Table 116] and the phenotypic performance [yield, biomass, growth rate and/or vigor components described in Tables 118-120 using the correlation (Corr.) vectors described in Table 117] under normal, low N and drought conditions across tomato ecotypes.
P = p value.

[1142] II. Correlation of Early Vigor Traits Across Collection of Tomato Ecotypes Under Salinity Stress (300 Mm NaCl), Low Nitrogen and Normal Growth Conditions

[1143] Twelve tomato hybrids were grown in 3 repetitive plots, each containing 17 plants, at a net house under semi-hydroponics conditions. Briefly, the growing protocol was as follows: Tomato seeds were sown in trays filled with a mix of vermiculite and peat in a 1:1 ratio. Following germination, the trays were transferred to the high salinity solution (300 mM NaCl in addition to the Full Hoagland solution), low nitrogen solution (the amount of total nitrogen was reduced in a 90% from the full Hoagland solution, final amount of 0.8 mM N), or at Normal growth solution (Full Hoagland containing 8 mM N solution, at 28±2° C.). All the plants were grown at 28±2° C.

[1144] Full Hoagland solution consists of: KNO₃—0.808 grams/liter, MgSO₄—0.12 grams/liter, KH₂PO₄—0.172 grams/liter and 0.01% (volume/volume) of ‘Super coratin’ micro elements (Iron-EDDHA [ethylenediamine-N,N′-bis(2-hydroxyphenylacetic acid)]—40.5 grams/liter; Mn—20.2 grams/liter; Zn 10.1 grams/liter; Co 1.5 grams/liter; and Mo 1.1 grams/liter), solution's pH should be 6.5-6.8.

[1145] Analyzed tomato tissues—Ten selected Tomato varieties were sample per each treatment. Two types of tissues [leaves and roots] were sampled and RNA was extracted as described above. For convenience, each micro-array expression information tissue type has received a Set ID as summarized in Table 122 below.

TABLE 122
Tomato transcriptome expression sets

| Expression Set | Set IDs |
|---|---|
| Leaf, under normal conditions | 1 + 10 |
| Root, under normal conditions | 2 + 9 |
| Leaf, under low nitrogen conditions | 3 + 8 |
| Root, under low nitrogen conditions | 4 + 7 |
| Leaf, under salinity conditions | 5 + 12 |
| Root, under salinity conditions | 6 + 11 |

Table 122. Provided are the tomato transcriptome experimental sets.

[1146] Tomato vigor related parameters—following 5 weeks of growing, plant were harvested and analyzed for leaf number, plant height, chlorophyll levels (SPAD units), different indices of nitrogen use efficiency (NUE) and plant biomass. Next, analyzed data was saved to text files and processed using the JMP statistical analysis software (SAS institute). Data parameters collected are summarized in Table 123, herein below.

[1147] Leaf number—number of opened leaves.

[1148] RGR Leaf Number—was calculated based on Formula 8 (above).

[1149] Shoot/Root ratio—was calculated based on Formula 30 (above).

[1150] NUE total biomass—nitrogen use efficiency (NUE) calculated as total biomass divided by nitrogen concentration.

[1151] NUE root biomass—nitrogen use efficiency (NUE) of root growth calculated as root biomass divided by nitrogen concentration.

[1152] NUE shoot biomass—nitrogen use efficiency (NUE) of shoot growth calculated as shoot biomass divided by nitrogen concentration.

[1153] Percent of reduction of root biomass compared to normal—the difference (reduction in percent) between root biomass under normal and under low nitrogen conditions.

[1154] Percent of reduction of shoot biomass compared to normal—the difference (reduction in percent) between shoot biomass under normal and under low nitrogen conditions.

[1155] Percent of reduction of total biomass compared to normal—the difference (reduction in percent) between total biomass (shoot and root) under normal and under low nitrogen conditions.

[1156] Plant height—Plants were characterized for height during growing period at 5 time points. In each measure, plants were measured for their height using a measuring tape. Height was measured from ground level to top of the longest leaf.

[1157] SPAD [SPAD unit]—Chlorophyll content was determined using a Minolta SPAD 502 chlorophyll meter and measurement was performed 64 days post sowing. SPAD meter readings were done on young fully developed leaf. Three measurements per leaf were taken per plot.

[1158] Root Biomass [DW, gr.]/SPAD—root biomass divided by SPAD results.

[1159] Shoot Biomass [DW, gr.]/SPAD—shoot biomass divided by SPAD results.

[1160] Total Biomass (Root+Shoot) [DW, gr.]/SPAD—total biomass divided by SPAD results.

TABLE 123
Tomato correlated parameters (vectors)

| Correlated parameter with | Correlation ID |
|---|---|
| Plant height [cm], under Low N growth conditions | 1 |
| SPAD [SPAD unit], under Low N growth conditions | 3 |
| Leaf number [ratio] (Low N conditions/Normal conditions) | 4 |
| Plant Height [ratio] (Low N conditions/Normal conditions) | 5 |
| SPAD [ratio] (Low N conditions/Normal conditions) | 6 |
| Leaf number [number] (Low N conditions) | 7 |
| NUE Shoot Biomass DW/SPAD [gr./SPAD unit] (Low N conditions, | 8 |
| Normal conditions and salinity conditions) | |
| NUE Root Biomass DW/SPAD [gr./SPAD unit] (Low N conditions, | 9 |
| Normal conditions and salinity conditions) | |
| NUE Total Biomass (Root + Shoot DW)/SPAD [gr./SPAD unit] (Low N | 10 |
| conditions, Normal conditions and salinity conditions) | |
| N level/Leaf [SPAD unit/leaf] (Low N conditions, Normal conditions and | 11 |
| salinity conditions) | |
| Shoot/Root [ratio] (Low N conditions and Normal conditions) | 12 |
| NUE shoots (shoot Biomass DW/SPAD) [gr./SPAD unit] (Low N | 13 |
| conditions and Normal conditions) | |
| NUE roots (Root Biomass DW/SPAD) [gr./SPAD unit] (Low N growth | 14 |
| conditions and Normal growth conditions) | |
| NUE total biomass (Total Biomass DW/SPAD) [gr./SPAD unit] (Low N | 15 |
| growth conditions and Normal growth conditions) | |
| Leaf number [number], under salinity stress growth conditions | 16 |
| Plant height [cm], under salinity stress growth conditions | 17 |
| Plant biomass [gr.], under salinity stress growth conditions | 18 |
| Leaf number [ratio] (Salinity conditions/Normal conditions) | 19 |
| Leaf number [ratio] (Salinity conditions/Low N conditions) | 20 |
| Plant Height [ratio] (Salinity conditions/Normal conditions) | 21 |
| Plant Height [ratio] (Salinity conditions/Low N conditions) | 22 |
| Percent of reduction of shoot biomass compared to normal [%] [ratio] | 23 |
| (Low N conditions/Normal conditions) | |
| Percent of reduction of root biomass compared to normal [%] [ratio] | 24 |
| (Low N conditions/Normal conditions) | |
| Leaf number [number] under Normal growth conditions | 25 |
| Plant height [cm] under Normal growth conditions | 26 |
| SPAD [SPAD unit] under Normal growth conditions | 27 |

Table 123. Provided are the tomato correlated parameters.
“NUE” = nitrogen use efficiency; “DW” = dry weight; “cm” = centimeter; “num”—number; “SPAD” = chlorophyll levels; “N” = nitrogen; “low N” = low nitrogen growth conditions as described above; “gr.” = gram; “Low N conditions/Normal conditions” = the ratio between the values measured under low N growth conditions to the values measured under normal growth conditions. “Salinity conditions/Normal conditions” = the ratio between the values measured under salinity stress and the values measured under normal growth conditions. “Salinity conditions/Low N conditions” = the ratio between the values measured under salinity stress growth conditions and the values measured under low N growth conditions.

[1161] Experimental Results

[1162] 10 different Tomato varieties were grown and characterized for parameters as described above (Table 123). The average for each of the measured parameters was calculated using the JMP software and values are summarized in Tables 124-129 below. Subsequent correlation analysis was conducted (Table 130). Follow, results were integrated to the database.

TABLE 124
Measured parameters in Tomato accessions under normal conditions
(lines 1-6)

| | Line | | | | | |
|---|---|---|---|---|---|---|
| Corr. ID | Line-1 | Line-2 | Line-3 | Line-4 | Line-5 | Line-6 |
| 8 | 0.0052 | 0.0061 | 0.0052 | — | 0.0144 | 0.0084 |
| 9 | 0.0012 | 0.0005 | 0.0006 | — | 0.0011 | 0.001 |
| 10 | 0.0064 | 0.0066 | 0.0058 | — | 0.0155 | 0.0093 |
| 11 | 9.29 | 10.18 | 8.87 | — | 8.43 | 9.83 |
| 12 | 5.40 | 12.65 | 10.02 | — | 15.42 | 8.83 |
| 13 | 4.69 | 6.17 | 4.37 | — | 13.08 | 7.39 |
| 14 | 1.12 | 0.54 | 0.47 | — | 1.00 | 0.84 |
| 15 | 7.47 | 9.10 | 8.63 | — | 8.85 | 7.22 |
| 25 | 6.56 | — | 6.89 | 7.33 | 6.22 | 6.33 |
| 26 | 45.30 | — | 47.80 | 40.80 | 55.30 | 56.20 |
| 27 | 34.30 | — | 25.30 | 28.10 | 31.40 | 30.20 |

Table 124. Provided are the values of each of the parameters (as described above) measured in Tomato accessions (Line) under normal growth conditions. Growth conditions are specified in the experimental procedure section.

TABLE 125
Measured parameters in Tomato accessions under normal conditions
(lines 7-12)

| | Line | | | | | |
|---|---|---|---|---|---|---|
| Corr. ID | Line-7 | Line-8 | Line-9 | Line-10 | Line-11 | Line-12 |
| 8 | 0.0054 | 0.0174 | 0.0072 | 0.0109 | 0.0117 | 0.0094 |
| 9 | 0.0011 | 0.0014 | 0.001 | 0.001 | 0.0025 | 0.0017 |
| 10 | 0.0065 | 0.0188 | 0.0082 | 0.0119 | 0.0143 | 0.011 |
| 11 | 8.57 | 6.57 | 6.97 | 8.71 | 7.35 | 9.37 |
| 12 | 7.52 | 12.61 | 7.99 | 14.31 | 4.80 | 6.29 |
| 13 | 5.65 | 17.94 | 5.56 | 11.96 | 10.37 | 10.10 |
| 14 | 0.83 | 0.94 | 0.81 | 1.08 | 2.25 | 1.82 |
| 15 | 7.87 | 9.09 | 7.91 | 8.55 | 8.68 | 6.24 |
| 25 | 6.44 | 5.89 | 5.56 | 6.11 | 5.67 | — |
| 26 | 48.70 | 55.80 | 37.40 | 49.60 | 46.30 | — |
| 27 | 32.40 | 32.60 | 28.80 | 30.90 | 29.00 | — |

Table 125. Provided are the values of each of the parameters (as described above) measured in Tomato accessions (Line) under normal growth conditions. Growth conditions are specified in the experimental procedure section.

TABLE 126
Measured parameters in Tomato accessions under low
nitrogen conditions (lines 1-6)

| | Line | | | | | |
|---|---|---|---|---|---|---|
| Corr. ID | Line-1 | Line-2 | Line-3 | Line-4 | Line-5 | Line-6 |
| 1 | 36.80 | — | 39.90 | 34.40 | 47.00 | 46.40 |
| 3 | 34.60 | — | 24.90 | 28.60 | 31.60 | 29.70 |
| 4 | 0.85 | — | 0.90 | 0.98 | 1.09 | 0.88 |
| 5 | 0.81 | — | 0.83 | 0.84 | 0.85 | 0.83 |
| 6 | 1.01 | — | 0.98 | 1.02 | 1.00 | 0.98 |
| 7 | 5.56 | — | 6.22 | 7.22 | 6.78 | 5.56 |
| 8 | 0.0041 | 0.0042 | 0.003 | — | 0.0072 | 0.0049 |
| 9 | 0.0008 | 0.0008 | 0.0003 | — | 0.0008 | 0.0005 |
| 10 | 0.005 | 0.005 | 0.0034 | — | 0.008 | 0.0055 |
| 11 | 10.90 | 11.50 | 11.40 | — | 10.40 | 11.20 |
| 12 | 5.01 | 6.41 | 11.39 | — | 9.49 | 11.60 |
| 13 | 35.40 | 38.40 | 24.10 | — | 65.00 | 46.70 |
| 14 | 6.99 | 7.73 | 2.54 | — | 7.04 | 5.04 |
| 15 | 58.50 | 69.70 | 63.80 | — | 69.30 | 71.10 |
| 23 | 75.40 | 62.20 | 55.10 | — | 49.70 | 63.20 |
| 24 | 62.60 | 143.70 | 54.20 | — | 70.50 | 59.70 |

Table 126. Provided are the values of each of the parameters (as described above) measured in Tomato accessions (Line) under low nitrogen growth conditions. Growth conditions are specified in the experimental procedure section.

TABLE 127
Measured parameters in Tomato accessions under low nitrogen
conditions (lines 7-12)

| | Line | | | | | |
|---|---|---|---|---|---|---|
| Corr. ID | Line-7 | Line-8 | Line-9 | Line-10 | Line-11 | Line-12 |
| 1 | 45.40 | 47.70 | 39.30 | 41.80 | 41.00 | — |
| 3 | 31.80 | 30.30 | 30.30 | 31.30 | 28.80 | — |
| 4 | 1.02 | 0.87 | 1.06 | 0.91 | 1.12 | — |
| 5 | 0.93 | 0.85 | 1.05 | 0.84 | 0.88 | — |
| 6 | 0.98 | 0.93 | 1.05 | 1.01 | 0.99 | — |
| 7 | 6.56 | 5.11 | 5.89 | 5.56 | 6.33 | — |
| 8 | 0.0052 | 0.0115 | 0.0069 | 0.0068 | 0.0067 | 0.0056 |
| 9 | 0.0009 | 0.0014 | 0.001 | 0.0009 | 0.0009 | 0.0015 |
| 10 | 0.006 | 0.0129 | 0.0079 | 0.0077 | 0.0076 | 0.007 |
| 11 | 8.90 | 7.90 | 8.00 | 10.30 | 8.60 | 14.50 |
| 12 | 8.20 | 10.38 | 10.52 | 8.24 | 7.97 | 3.91 |
| 13 | 46.70 | 120.10 | 60.10 | 66.30 | 56.50 | 60.30 |
| 14 | 8.01 | 15.09 | 9.02 | 8.78 | 7.25 | 15.94 |
| 15 | 60.50 | 73.90 | 68.80 | 66.70 | 70.80 | 49.70 |
| 23 | 82.70 | 66.90 | 108.00 | 55.40 | 54.40 | 59.70 |
| 24 | 96.10 | 106.50 | 111.90 | 81.60 | 32.20 | 87.50 |

Table 127. Provided are the values of each of the parameters (as described above) measured in Tomato accessions (Line) under low nitrogen growth conditions. Growth conditions are specified in the experimental procedure section.

TABLE 128
Measured parameters in Tomato accessions under salinity conditions
(lines 1-6)

| | Line | | | | | |
|---|---|---|---|---|---|---|
| Corr. ID | Line-1 | Line-2 | Line-3 | Line-4 | Line-5 | Line-6 |
| 8 | 0.0005 | 0.0007 | 0.0007 | — | 0.0012 | 0.0017 |
| 9 | 0.0001 | 0.0001 | 0.0001 | — | 0.0001 | 0.0001 |
| 10 | 0.0007 | 0.0006 | 0.0008 | — | 0.0014 | 0.0018 |
| 11 | 11.40 | 10.40 | 11.60 | — | 10.80 | 10.80 |
| 16 | 3.56 | — | 3.94 | 5.00 | 4.00 | 3.56 |
| 17 | 5.60 | — | 6.46 | 8.47 | 8.56 | 8.87 |
| 18 | 0.36 | — | 0.44 | 0.26 | 0.71 | 0.46 |
| 19 | 0.54 | — | 0.57 | 0.68 | 0.64 | 0.56 |
| 20 | 0.64 | — | 0.63 | 0.69 | 0.59 | 0.64 |
| 21 | 0.12 | — | 0.14 | 0.21 | 0.15 | 0.16 |
| 22 | 0.15 | — | 0.16 | 0.25 | 0.18 | 0.19 |

Table 128. Provided are the values of each of the parameters (as described above) measured in Tomato accessions (Line) under salinity growth conditions. Growth conditions are specified in the experimental procedure section.

TABLE 129
Measured parameters in Tomato accessions under salinity conditions
(lines 7-12)

| | Line | | | | | |
|---|---|---|---|---|---|---|
| Corr. ID | Line-7 | Line-8 | Line-9 | Line-10 | Line-11 | Line-12 |
| 8 | 0.001 | 0.0012 | 0.0007 | 0.001 | 0.001 | 0.0007 |
| 9 | 0.0001 | 0.0001 | 0.0001 | 0.0001 | — | 0.0001 |
| 10 | 0.0011 | 0.0013 | 0.0008 | 0.0011 | — | 0.0007 |
| 11 | 7.00 | 9.20 | 8.50 | 10.40 | 8.80 | 12.40 |
| 16 | 4.39 | 3.17 | 3.72 | 4.00 | 4.28 | — |
| 17 | 7.56 | 8.64 | 5.57 | 5.82 | 9.36 | — |
| 18 | 0.54 | 0.66 | 0.40 | 0.52 | 0.45 | — |
| 19 | 0.68 | 0.54 | 0.67 | 0.65 | 0.75 | — |
| 20 | 0.67 | 0.62 | 0.63 | 0.72 | 0.68 | — |
| 21 | 0.16 | 0.15 | 0.15 | 0.12 | 0.20 | — |
| 22 | 0.17 | 0.18 | 0.14 | 0.14 | 0.23 | — |

Table 129. Provided are the values of each of the parameters (as described above) measured in Tomato accessions (Line) under salinity growth conditions. Growth conditions are specified in the experimental procedure section.

TABLE 130
Correlation between the expression level of selected genes of some embodiments of
the invention in various tissues and the phenotypic performance under low nitrogen,
normal or salinity stress conditions across Tomato accessions

| Gene | | | Exp. | Corr. | Gene | | | Exp. | Corr. |
|---|---|---|---|---|---|---|---|---|---|
| Name | R | P value | set | ID | Name | R | P value | set | ID |
| LBY499 | 0.73 | 2.59E−02 | 6 | 4 | LBY499 | 0.72 | 4.53E−02 | 6 | 2 |
| LBY500 | 0.79 | 1.94E−02 | 1 | 26 | LBY500 | 0.79 | 1.12E−02 | 4 | 5 |
| LBY500 | 0.78 | 1.29E−02 | 4 | 13 | LBY500 | 0.76 | 1.83E−02 | 4 | 2 |
| LBY500 | 0.75 | 1.97E−02 | 4 | 4 | LBY500 | 0.70 | 3.41E−02 | 4 | 3 |
| LBY500 | 0.84 | 4.28E−03 | 3 | 23 | LBY500 | 0.84 | 4.33E−03 | 8 | 23 |
| LYD1009 | 0.73 | 3.89E−02 | 5 | 2 | | | | | |

Table 130. Provided are the correlations (R) between the genes expression levels in various tissues (Expression set Table 122) and the phenotypic performance (measured in Tables 124-129) according to the correlation (Corr.) vectors (IDs) specified in Table 123.
“R” = Pearson correlation coefficient;
“P” = p value.

### Example 14

### Production of Cotton Transcriptome and High Throughput Correlation Analysis with Yield and ABST Related Parameters Using 60K Cotton Oligonucleotide Micro-Arrays

[1163] In order to produce a high throughput correlation analysis between plant phenotype and gene expression level, the present inventors utilized a cotton oligonucleotide micro-array, produced by Agilent Technologies [chem (dot) agilent (dot) com/Scripts/PDS (dot) asp?1Page=50879]. The array oligonucleotide represents about 60,000 cotton genes and transcripts. In order to define correlations between the levels of RNA expression with abiotic stress tolerance (ABST) and yield and components or vigor related parameters, various plant characteristics of 13 different cotton ecotypes were analyzed and further used for RNA expression analysis. The correlation between the RNA levels and the characterized parameters was analyzed using Pearson correlation test [davidmlane (dot) com/hyperstat/A34739 (dot) html].

[1164] Correlation of Cotton Varieties Across Ecotypes Grown Under Regular and Drought Growth Conditions

[1165] Experimental Procedures

[1166] 13 Cotton ecotypes were grown in 5-11 repetitive plots, in field. Briefly, the growing protocol was as follows:

[1167] Regular growth conditions: cotton plants were grown in the field using commercial fertilization and irrigation protocols (normal growth conditions) which included 623 m³ water per dunam (1000 square meters) per entire growth period, fertilization of 24 units of 12% nitrogen, 12 units of 6% phosphorous and 12 units of 6% potassium per entire growth period. Plot size was of 5 meter long, two rows, 8 plants per meter.

[1168] Drought growth conditions: cotton seeds were sown in soil and grown under normal condition until first squares were visible (40 days from sowing), drought treatment was irrigated with 75% water in comparison to the normal treatment [472 m³ water per dunam (1000 square meters) per entire growth period].

[1169] It should be noted that one unit of phosphorous refers to one kg of P₂O₅ per dunam; and that one unit of potassium refers to one kg of K₂O per dunam;

[1170] Analyzed Cotton tissues—Eight tissues [mature leaf, lower and upper main stem, flower, main mature boll, fruit, fiber (Day) and fiber (Night)] from plants growing under normal conditions were sampled and RNA was extracted as described above. Eight tissues [mature leaf (Day), mature leaf (Night), lower main stem, upper main stem, main flower, main mature boll, fiber (Day) and fiber (night)] from plants growing under drought conditions were sampled and RNA was extracted as described above.

[1171] Each micro-array expression information tissue type has received a Set ID as summarized in Tables 131-133 below.

TABLE 131
Cotton transcriptome expression sets
under normal conditions (normal expression set 1)

| Expression Set | Set ID |
|---|---|
| Fruit at 10 DPA at reproductive stage under normal | 1 |
| growth conditions | |
| Lower main stem at reproductive stage under normal | 2 |
| growth conditions | |
| Main flower at reproductive stage under normal | 3 |
| growth conditions | |
| Main mature boll at reproductive stage under normal | 4 |
| growth conditions | |
| Mature leaf (day) at reproductive stage under normal | 5 |
| conditions | |
| Mature leaf (night) at reproductive stage under | 6 |
| normal conditions | |
| Fiber (day) at reproductive stage under normal | 7 |
| conditions | |
| Fiber (night) at reproductive stage under normal | 8 |
| conditions | |
| Upper main stem at reproductive stage under normal | 9 |
| growth conditions | |

Table 131: Provided are the cotton transcriptome expression sets.
Lower main stem = the main stem adjacent to main mature boll; Upper main stem = the main stem adjacent to the main flower; Main flower = reproductive organ on the third position on the main stem (position 3); Fruit at 10 DPA = reproductive organ ten days after anthesis on the main stem (position 2); Main mature boll = reproductive organ on the first position on the main stem (position 1); Mature leaf = Full expanded leaf in the upper canopy; Fiber = fiber at elongation stage 10 DAP (DAP = days after pollination).

TABLE 132
Additional Cotton transcriptome expression sets
under normal conditions (normal expression set 2)

| Expression Set | Set ID |
|---|---|
| Mature leaf at reproductive stage during day | 1 |
| under normal growth conditions | |
| Fiber at reproductive stage during day under | 2 |
| normal growth conditions | |
| Fiber at reproductive stage during night | 3 |
| under normal growth conditions | |

Table 132: Provided are the cotton transcriptome expression sets.
Mature leaf = Full expanded leaf in the upper canopy; Fiber = fiber at elongation stage 10 DAP (DAP = days after pollination), was sampled either at day or night hours.

TABLE 133
Cotton transcriptome expression sets under drought conditions

| Expression Set | Set ID |
|---|---|
| Lower main stem at reproductive stage under drought | 1 |
| growth conditions | |
| Main flower at reproductive stage under drought growth | 2 |
| conditions | |
| Main mature boll at reproductive stage under drought | 3 |
| growth conditions | |
| Mature leaf during night at reproductive stage under | 4 |
| drought growth conditions | |
| Fiber at reproductive stage during day under drought | 5 |
| growth conditions | |
| Fiber at reproductive stage during night under drought | 6 |
| growth conditions | |
| Upper main stem at reproductive stage under drought | 7 |
| growth conditions | |
| Mature leaf during day at reproductive stage under drought | 8 |
| growth conditions | |

Table 133: Provided are the cotton transcriptome expression sets.
Lower main stem = the main stem adjacent to main mature boll; Main flower = reproductive organ on the third position on the main stem (position 3); Main mature boll = reproductive organ on the first position on the main stem (position 1); Mature leaf = Full expanded leaf in the upper canopy; Fiber = fiber at elongation stage 10 DAP (DAP = days after pollination) was sampled either at day or night hours. Upper main stem = the main stem adjacent to the main flower;

[1172] Cotton yield components and vigor related parameters assessment—13 Cotton ecotypes in 5-11 repetitive plots, each plot containing approximately 80 plants were grown in field. Plants were regularly fertilized and watered during plant growth until harvesting (as recommended for commercial growth). Plants were continuously phenotyped during the growth period and at harvest (Tables 134-136). The image analysis system included a personal desktop computer (Intel P4 3.0 GHz processor) and a public domain program—ImageJ 1.37 (Java based image processing program, which was developed at the U.S. National Institutes of Health and freely available on the internet [rsbweb (dot) nih (dot) gov/]). Next, analyzed data was saved to text files and processed using the JMP statistical analysis software (SAS institute).

[1173] The following parameters were measured and collected:

[1174] Total Bolls yield (RP) [gr.]—Total boll weight (including fiber) per plot.

[1175] Total bolls yield per plant (RP) [gr.]—Total boll weight (including fiber) per plot divided by the number of plants.

[1176] Fiber yield (RP) [gr.]—Total fiber weight per plot.

[1177] Fiber yield per plant (RP) [gr.]—Total fiber weight in plot divided by the number of plants.

[1178] Fiber yield per boll (RP) [gr.]—Total fiber weight in plot divided by the number of bolls.

[1179] Estimated Avr Fiber yield (MB) po 1 (H) [gr.]—Weight of the fiber on the main branch in position 1 at harvest.

[1180] Estimated Avr Fiber yield (MB) po 3 (H) [gr.]—Weight of the fiber on the main branch in position 3 at harvest.

[1181] Estimated Avr Bolls FW (MB) po 1 (H) [gr.]—Weight of the fiber on the main branch in position 1 at harvest.

[1182] Estimated Avr Bolls FW (MB) po 3 (H) [gr.]—Weight of the fiber on the main branch in position 3 at harvest.

[1183] Fiber Length (RP)—Measure Fiber Length in inch from the rest of the plot.

[1184] Fiber Length Position 1 (SP)—Fiber length at position 1 from the selected plants. Measure Fiber Length in inch.

[1185] Fiber Length Position 3 (SP)—Fiber length at position 3 from the selected plants. Measure Fiber Length in inch.

[1186] Fiber Strength (RP)—Fiber Strength from the rest of the plot. Measured in grams per denier.

[1187] Fiber Strength Position 3 (SP)—Fiber strength at position 3 from the selected plants. Measured in grams per denier.

[1188] Micronaire (RP)—fiber fineness and maturity from the rest of the plot. The scale that was used was 3.7-4.2—for Premium; 4.3-4.9—Base Range; above 5—Discount Range.

[1189] Micronaire Position 1 (SP)—fiber fineness and maturity from position 1 from the selected plants. The scale that was used was 3.7-4.2—for Premium; 4.3-4.9—Base Range; above 5—Discount Range.

[1190] Micronaire Position 3 (SP)—fiber fineness and maturity from position 3 from the selected plants. The scale that was used was 3.7-4.2—for Premium; 4.3-4.9—Base Range; above 5—Discount Range.

[1191] Short Fiber Content (RP (%)—short fiber content from the rest of the plot

[1192] Uniformity (RP) (%)—fiber uniformity from the rest of the plot

[1193] Carbon isotope discrimination—(‰)—isotopic ratio of 13C to 12C in plant tissue was compared to the isotopic ratio of 13C to 12C in the atmosphere.

[1194] Leaf temp (V) (° celsius)—leaf temperature was measured at vegetative stage using Fluke IR thermometer 568 device. Measurements were done on 4 plants per plot.

[1195] Leaf temp (10 DPA) (° celsius)—Leaf temperature was measured 10 days post anthesis using Fluke IR thermometer 568 device. Measurements were done on 4 plants per plot.

[1196] Stomatal conductance (10 DPA)—(mmol m⁻² s⁻¹)—plants were evaluated for their stomata conductance using SC-1 Leaf Porometer (Decagon devices) 10 days post anthesis. Stomata conductance readings were done on fully developed leaf, for 2 leaves and 2 plants per plot.

[1197] Stomatal conductance (17 DPA)—(mmol m⁻² s⁻¹)—plants were evaluated for their stomata conductance using SC-1 Leaf Porometer (Decagon devices) 17 days post anthesis. Stomata conductance readings were done on fully developed leaf, for 2 leaves and 2 plants per plot.

[1198] % Canopy coverage (10 DPA) (F)—percent Canopy coverage 10 days post anthesis and at flowering stage. The % Canopy coverage is calculated using Formula 32 above.

[1199] Leaf area (10 DPA) (cm2)—Total green leaves area 10 days post anthesis (DPA).

[1200] PAR_LAI (10 DPA)—Photosynthetically active radiation 10 days post anthesis.

[1201] SPAD (17 DPA) [SPAD unit]—Plants were characterized for SPAD rate 17 days post anthesis.

[1202] Chlorophyll content was determined using a Minolta SPAD 502 chlorophyll meter. Four measurements per leaf were taken per plot.

[1203] SPAD (pre F)—Plants were characterized for SPAD rate during pre-flowering stage. Chlorophyll content was determined using a Minolta SPAD 502 chlorophyll meter. Four measurements per leaf were taken per plot.

[1204] SPAD rate—the relative growth rate (RGR) of SPAD (Formula 4) as described above.

[1205] Leaf mass fraction (10 DPA) [cm²/gr.]—leaf mass fraction 10 days post anthesis. The leaf mass fraction is calculated using Formula 33 above.

[1206] Lower Stem width (H) [mm]—This parameter was measured at harvest. Lower internodes from 8 plants per plot were separated from the plant and the diameter was measured using a caliber. The average internode width per plant was calculated by dividing the total stem width by the number of plants.

[1207] Upper Stem width (H) [mm]—This parameter was measured at harvest. Upper internodes from 8 plants per plot were separated from the plant and the diameter was measured using a caliber. The average internode width per plant was calculated by dividing the total stem width by the number of plants.

[1208] Plant height (H) [cm]—plants were measured for their height at harvest using a measuring tape. Height of main stem was measured from ground to apical mersitem base. Average of eight plants per plot was calculated.

[1209] Plant height growth [cm/day]—the relative growth rate (RGR) of Plant Height (Formula 3 above) as described above.

[1210] Shoot DW (V) [gr.]—Shoot dry weight at vegetative stage after drying at 70° C. in oven for 48 hours. Total weight of 3 plants in a plot.

[1211] Shoot DW (10 DPA) [gr.]—Shoot dry weight at 10 days post anthesis, after drying at 70° C. in oven for 48 hours. Total weight of 3 plants in a plot.

[1212] Bolls num per plant (RP) [num]—Average bolls number per plant from the rest of the plot.

[1213] Reproductive period duration [num]—number of days from flowering to harvest for each plot.

[1214] Closed Bolls num per plant (RP) [num]—Average closed bolls number per plant from the rest of the plot.

[1215] Closed Bolls num per plant (SP) [num]—Average closed bolls number per plant from selected plants.

[1216] Open Bolls num per plant (SP) [num]—Average open bolls number per plant from selected plants. Average of eight plants per plot.

[1217] Num of lateral branches with open bolls (H) [num]—count of number of lateral branches with open bolls at harvest, average of eight plants per plot.

[1218] Num of nodes with open bolls (MS) (H) [num]—count of number of nodes with open bolls on main stem at harvest, average of eight plants per plot.

[1219] Seeds yield per plant (RP) [gr.]—Total weight of seeds in plot divided in plants number. Estimated Avr Seeds yield (MB) po 1 (H) [gr.]—Total weight of seeds in position one per plot divided by plants number.

[1220] Estimated Avr Seeds yield (MB) po 3 (H) [gr.]—Total weight of seeds in position three per plot divided by plants number.

[1221] Estimated Avr Seeds num (MB) po 1 (H) [num]—Total number of seeds in position one per plot divided by plants number.

[1222] Estimated Avr Seeds num (MB) po 3 (H) [num]—Total number of seeds in position three per plot divided by plants number.

[1223] 1000 seeds weight (RP) [gr.]—was calculated based on Formula 14.

[1224] Experimental Results

[1225] 13 different cotton varieties were grown and characterized for different parameters as specified in Tables 134-136. The average for each of the measured parameters was calculated using the JMP software (Tables 137-142) and a subsequent correlation analysis between the various transcriptome sets (Table 131-133) and the average parameters, was conducted (Tables 143-145). Results were then integrated to the database.

TABLE 134
Cotton correlated parameters under normal growth
conditions (vectors) (parameters set 1)

| Correlated parameter with | Correlation ID |
|---|---|
| Total Bolls yield (SP) [gr.] | 1 |
| estimated Avr Bolls FW (MB) po 1 (H) [gr.] | 2 |
| estimated Avr Bolls FW (MB) po 3 (H) [gr.] | 3 |
| estimated Avr Fiber yield (MB) po 1 (H) [gr.] | 4 |
| estimated Avr Fiber yield (MB) po 3 (H) [gr.] | 5 |
| Seeds yield per plant (RP) [gr.] | 6 |
| estimated Avr Seeds yield (MB) po 1 (H) [gr.] | 7 |
| estimated Avr Seeds yield (MB) po 3 (H) [gr.] | 8 |
| 1000 seeds weight (RP) [gr.] | 9 |
| estimated Avr Seeds num (MB) po 1 (H) [num] | 10 |
| estimated Avr Seeds num (MB) po 3 (H) [num] | 11 |
| Fiber yield per boll (RP) [gr.] | 12 |
| Fiber yield per plant (RP) [gr.] | 13 |
| Closed Bolls num per plant (RP) [num] | 14 |
| Closed Bolls num per plant (SP) [num] | 15 |
| Open Bolls num per plant (SP) [num] | 16 |
| Bolls num per plant (RP) [num] | 17 |
| bolls num in position 1 [num] | 18 |
| bolls num in position 3 [num] | 19 |
| Fiber Length (RP) [in] | 20 |
| Fiber Length Position 3 (SP) [in] | 21 |
| Fiber Strength (RP) [in] | 22 |
| Fiber Strength Position 3 (SP) [gr./denier] | 23 |
| Micronaire (RP) [scoring 3.7-5] | 24 |
| Micronaire Position 3 (SP) [scoring 3.7-5] | 25 |
| Num of nodes with open bolls (MS) (H) [num] | 26 |
| Num of lateral branches with open bolls (H) [num] | 27 |
| Reproductive period duration [num] | 28 |
| Plant height (H) [cm] | 29 |
| Plant height growth [cm/day] | 30 |
| Upper Stem width (H) [mm] | 31 |
| Lower Stem width (H) [mm] | 32 |
| Shoot DW (V) [gr.] | 33 |
| Shoot DW (10 DPA) [gr.] | 34 |
| Shoot FW (V) [gr.] | 35 |
| Shoot FW (10 DPA) [gr.] | 36 |
| SPAD rate [SPAD unit/day] | 37 |
| SPAD (pre F) [SPAD unit] | 38 |
| SPAD (17 DPA) [SPAD unit] | 39 |
| PAR_LAI (10 DPA) [μmol m⁻² S⁻²] | 40 |
| Leaf area (10 DPA) [cm²] | 41 |
| % Canopy coverage (10 DPA) [%] | 42 |
| Leaf mass fraction (10 DPA) [cm²/gr.] | 43 |

Table 134. Provided are the Cotton correlated parameters (vectors).
“RP”—Rest of plot; “SP” = selected plants; “gr.” = grams; “H” = Harvest; “in”—inch; “SP”—Selected plants; “SPAD” = chlorophyll levels; “FW” = Plant Fresh weight; “DPA”—Days post anthesis; “mm”—millimeter;“cm”—centimeter; “num”—number; “Avr” = average; “DPA” = days post anthesis; “v” = vegetative stage; “H” = harvest stage;

TABLE 135
Cotton correlated parameters under normal
growth conditions (vectors) (parameters set 2)

| Correlated parameter with | Correlation ID |
|---|---|
| Total Bolls yield (RP) [gr.] | 1 |
| Total Bolls yield per plant (RP) [gr.] | 2 |
| Fiber yield (RP) [gr.] | 3 |
| Fiber yield per plant (RP) [gr.] | 4 |
| Fiber yield per boll (RP) [gr.] | 5 |
| Estimated Avr Fiber yield (MB) po 1 (H) [gr.] | 6 |
| Estimated Avr Fiber yield (MB) po 3 (H) [gr.] | 7 |
| Estimated Avr Bolls FW (MB) po 1 (H) [gr.] | 8 |
| Estimated Avr Bolls FW (MB) po 3 (H) [gr.] | 9 |
| Fiber Length (RP) [in] | 10 |
| Fiber Length Position 1 (SP) [in] | 11 |
| Fiber Length Position 3 (SP) [in] | 12 |
| Fiber Strength (RP) [in] | 13 |
| Fiber Strength Position 3 (SP) [gr/denier] | 14 |
| Micronaire (RP) [scoring 3.7-5] | 15 |
| Micronaire Position 1 (SP) [scoring 3.7-5] | 16 |
| Micronaire Position 3 (SP) [scoring 3.7-5] | 17 |
| Short Fiber Content (RP) [%] | 18 |
| Uniformity (RP) [%] | 19 |
| Carbon isotope discrimination (‰) | 20 |
| Leaf temp (V) [° C.] | 21 |
| Leaf temp (10 DPA) [° C.] | 22 |
| Stomatal conductance (10 DPA) [mmol m⁻² s⁻¹] | 23 |
| Stomatal conductance (17 DPA) [mmol m⁻² s⁻¹] | 24 |
| % Canopy coverage (10 DPA) [%] | 25 |
| Leaf area (10 DPA) [cm²] | 26 |
| PAR_LAI (10 DPA) [μmol m⁻² S⁻²] | 27 |
| SPAD (17 DPA) [SPAD unit] | 28 |
| SPAD (pre F) [SPAD unit] | 29 |
| SPAD rate [SPAD unit/day] | 30 |
| Leaf mass fraction (10 DPA) [cm²/gr.] | 31 |
| Lower Stem width (H) [mm] | 32 |
| Upper Stem width (H) [mm] | 33 |
| Shoot DW (V) [gr.] | 34 |
| Shoot DW (10 DPA) [gr.] | 35 |
| Bolls num per plant (RP) [number] | 36 |
| Reproductive period duration [number] | 37 |
| Closed Bolls num per plant (RP) [number] | 38 |
| Closed Bolls num per plant (SP) [number] | 39 |
| Open Bolls num per plant (SP) [number] | 40 |
| Num of lateral branches with open bolls (H) | 41 |
| [number] | |
| Num of nodes with open bolls (MS) (H) [number] | 42 |
| Seeds yield per plant (RP) [gr.] | 43 |
| Estimated Avr Seeds yield (MB) po 1 (H) [number] | 44 |
| Estimated Avr Seeds yield (MB) po 3 (H) [gr.] | 45 |
| Estimated Avr Seeds num (MB) po 1 (H) [number] | 46 |
| Estimated Avr Seeds num (MB) po 3 (H) [number] | 47 |
| 1000 seeds weight (RP) [gr.] | 48 |
| Plant height (H) [cm] | 49 |
| Plant height growth [cm/day] | 50 |

Table 135. Provided are the Cotton correlated parameters (vectors).
“RP”— Rest of plot; “SP” = selected plants; “gr.” = grams; “H” = Harvest; “in”—inch; “SP”—Selected plants; “SPAD” = chlorophyll levels; “FW” = Plant Fresh weight; “DPA”—Days post anthesis; “mm”—millimeter; “cm”—centimeter; “num”—number; “Avr” = average; “DPA” = days post anthesis; “v” = vegetative stage; “H” = harvest stage;

TABLE 136
Cotton correlated parameters
under drought growth conditions (vectors)

| Correlated parameter with | Correlation ID |
|---|---|
| Total Bolls yield (RP) [gr.] | 1 |
| Total Bolls yield per plant (RP) [gr.] | 2 |
| Fiber yield (RP) [gr.] | 3 |
| Fiber yield per plant (RP) [gr.] | 4 |
| Fiber yield per boll (RP) [gr.] | 5 |
| Estimated Avr Fiber yield (MB) po 1 (H) [gr.] | 6 |
| Estimated Avr Fiber yield (MB) po 3 (H) [gr.] | 7 |
| Estimated Avr Bolls FW (MB) po 1 (H) [gr.] | 8 |
| Estimated Avr Bolls FW (MB) po 3 (H) [gr.] | 9 |
| Fiber Length (RP) [in] | 10 |
| Fiber Length Position 1 (SP) [in] | 11 |
| Fiber Length Position 3 (SP) [in] | 12 |
| Fiber Strength (RP) [in] | 13 |
| Fiber Strength Position 3 (SP) [gr./denier] | 14 |
| Micronaire (RP) [scoring 3.7-5] | 15 |
| Micronaire Position 1 (SP) [scoring 3.7-5] | 16 |
| Micronaire Position 3 (SP) [scoring 3.7-5] | 17 |
| Short Fiber Content (RP) [%] | 18 |
| Uniformity (RP) [%] | 19 |
| Carbon isotope discrimination (‰) | 20 |
| Leaf temp (V) [° C.] | 21 |
| Leaf temp (10 DPA) [° C.] | 22 |
| Stomatal conductance (10 DPA) [mmol m⁻² s⁻¹] | 23 |
| Stomatal conductance (17 DPA) [mmol m⁻² s⁻¹] | 24 |
| % Canopy coverage (10 DPA) [%] | 25 |
| Leaf area (10 DPA) [cm2] | 26 |
| PAR_LAI (10 DPA) [μmol m⁻² S⁻²] | 27 |
| SPAD (17 DPA) [SPAD unit] | 28 |
| SPAD (pre F) [SPAD unit] | 29 |
| SPAD rate [SPAD unit/day] | 30 |
| Leaf mass fraction (10 DPA) [cm²/gr.] | 31 |
| Lower Stem width (H) [mm] | 32 |
| Upper Stem width (H) [mm] | 33 |
| Plant height (H) [cm] | 34 |
| Plant height growth [cm/day] | 35 |
| Shoot DW (V) [gr.] | 36 |
| Shoot DW (10 DPA) [gr.] | 37 |
| Bolls num per plant (RP) [num] | 38 |
| Reproductive period duration [num] | 39 |
| Closed Bolls num per plant (RP) [num] | 40 |
| Closed Bolls num per plant (SP) [num] | 41 |
| Open Bolls num per plant (SP) [num] | 42 |
| Num of lateral branches with open bolls (H) | 43 |
| [num] | |
| Num of nodes with open bolls (MS) (H) [num] | 44 |
| Estimated Avr Seeds yield (MB) po_1 (H) [num] | 45 |
| Estimated Avr Seeds yield (MB) po 3 (H) [gr.] | 46 |
| Estimated Avr Seeds num (MB) po 1 (H) [num] | 47 |
| Estimated Avr Seeds num (MB) po 3 (H) [num] | 48 |
| 1000 seeds weight (RP) [gr.] | 49 |
| Seeds yield per plant (RP) [gr.] | 50 |

Table 136. Provided are the Cotton correlated parameters (vectors).
“RP”—Rest of plot; “SP” = selected plants; “gr.” = grams; “H” = Harvest; “in”—inch; “SP”—Selected plants; “SPAD” = chlorophyll levels; “FW” = Plant Fresh weight; “DPA”—Days post anthesis; “mm”—millimeter; “cm”—centimeter; “num”—number; “Avr” = average; “DPA” = days post anthesis; “v” = vegetative stage; “H” = harvest stage;

TABLE 137
Measured parameters in Cotton accessions (1-7) under normal conditions
(parameters set 1)

| | Line | | | | | | |
|---|---|---|---|---|---|---|---|
| Corr. ID | Line-1 | Line-2 | Line-3 | Line-4 | Line-5 | Line-6 | Line-7 |
| 1 | 505.40 | 564.20 | 544.20 | 585.50 | 536.50 | 317.20 | 488.30 |
| 2 | 6.62 | 4.88 | 7.08 | 5.34 | 4.08 | 3.58 | 5.66 |
| 3 | 6.42 | 2.93 | 5.95 | 4.16 | 2.72 | 2.73 | 5.13 |
| 4 | 2.53 | 1.88 | 2.69 | 2.02 | 1.50 | 0.38 | 2.04 |
| 5 | 2.46 | 1.13 | 2.34 | 1.69 | 1.06 | 0.50 | 1.87 |
| 6 | 32.50 | 34.90 | 32.50 | 35.10 | 36.30 | 26.70 | 33.10 |
| 7 | 3.33 | 2.70 | 3.83 | 2.99 | 2.43 | 3.02 | 3.03 |
| 8 | 3.29 | 1.58 | 3.06 | 2.19 | 1.64 | 2.29 | 2.76 |
| 9 | 105.20 | 113.60 | 98.50 | 84.70 | 111.70 | 82.50 | 91.60 |
| 10 | 31.60 | 24.20 | 36.00 | 31.30 | 20.90 | 32.60 | 30.80 |
| 11 | 31.20 | 15.50 | 33.30 | 26.10 | 14.90 | 31.30 | 32.60 |
| 12 | 2.30 | 1.37 | 2.22 | 1.81 | 1.12 | 0.40 | 1.80 |
| 13 | 25.20 | 26.00 | 25.40 | 27.90 | 25.40 | 4.70 | 24.00 |
| 14 | 4.23 | NA | NA | NA | NA | NA | 4.56 |
| 15 | 5.55 | 2.08 | 3.39 | 2.09 | 3.07 | 2.41 | 5.89 |
| 16 | 12.00 | 22.60 | 11.80 | 18.80 | 27.70 | 16.40 | 15.00 |
| 17 | 11.00 | 19.10 | 11.80 | 15.50 | 22.60 | 11.80 | 13.40 |
| 18 | 5.00 | 5.00 | 5.00 | 5.00 | 5.00 | 5.00 | 5.00 |
| 19 | 5.00 | 5.00 | 5.00 | 5.00 | 5.00 | 5.00 | 5.00 |
| 20 | 1.16 | 1.28 | 1.15 | 1.12 | 1.41 | 1.07 | 0.90 |
| 21 | 1.15 | 1.29 | 1.14 | 1.10 | 1.44 | 0.96 | 0.84 |
| 22 | 28.80 | 34.50 | 25.90 | 29.20 | 39.70 | 22.60 | 22.60 |
| 23 | 29.60 | 36.50 | 26.20 | 29.60 | 39.50 | 20.10 | 21.60 |
| 24 | 4.31 | 3.63 | 3.95 | 4.37 | 4.10 | 6.05 | 5.01 |
| 25 | 4.57 | 3.88 | 3.99 | 4.71 | 4.75 | 5.69 | 5.25 |
| 26 | 8.15 | 10.90 | 9.00 | 11.04 | 10.14 | 7.85 | 8.48 |
| 27 | 1.02 | 1.46 | 0.81 | 0.96 | 1.21 | 1.69 | 1.29 |
| 28 | 121.30 | 108.10 | 108.00 | 103.80 | 102.90 | 108.00 | 126.00 |
| 29 | 112.80 | 110.80 | 100.60 | 115.40 | 103.30 | 98.50 | 121.90 |
| 30 | 1.86 | 2.00 | 1.73 | 1.72 | 1.66 | 1.72 | 2.09 |
| 31 | 3.02 | 3.64 | 3.32 | 3.13 | 3.23 | 2.73 | 2.80 |
| 32 | 12.80 | 13.70 | 11.80 | 12.40 | 13.00 | 10.90 | 13.00 |
| 33 | 39.20 | 64.70 | 44.80 | 38.10 | 46.20 | 36.70 | 48.20 |
| 34 | 169.20 | 183.60 | 171.10 | 172.70 | 190.00 | 149.00 | 193.10 |
| 35 | 168.90 | 256.00 | 194.80 | 155.70 | 154.60 | 172.10 | 193.30 |
| 36 | 842.50 | 792.60 | 804.20 | 767.00 | 745.20 | 725.90 | 922.60 |
| 37 | 0.0402 | −0.0587 | −0.2552 | −0.2192 | 0.1028 | −0.2906 | −0.1422 |
| 38 | 32.10 | 35.30 | 36.00 | 35.80 | 35.00 | 32.90 | 35.90 |
| 39 | 34.30 | 33.50 | 31.40 | 29.70 | 37.10 | 27.40 | 33.40 |
| 40 | 5.67 | 6.87 | 6.45 | 5.86 | 5.61 | 6.59 | 4.09 |
| 41 | 7007.70 | 6622.30 | 5544.70 | 8196.00 | 8573.30 | 8155.30 | 5291.30 |
| 42 | 84.00 | 94.90 | 92.90 | 89.20 | 84.90 | 87.20 | 79.90 |
| 43 | 41.10 | 36.50 | 34.00 | 48.00 | 44.60 | 54.70 | 28.10 |

Table 137. Provided are the values of each of the parameters (as described above) measured in Cotton accessions (ecotype) under normal conditions. Growth conditions are specified in the experimental procedure section.

TABLE 138
Additional measured parameters in Cotton accessions (8-13)
under normal conditions
(parameters set 1)

| | Line | | | | | |
|---|---|---|---|---|---|---|
| Corr. ID | Line-8 | Line-9 | Line-10 | Line-11 | Line-12 | Line-13 |
| 1 | 620.50 | 715.10 | 421.30 | 531.80 | 405.30 | 715.70 |
| 2 | 3.13 | 6.37 | 6.14 | NA | 4.95 | 6.95 |
| 3 | 3.31 | 4.71 | 5.44 | 4.14 | 4.60 | 6.25 |
| 4 | 1.14 | 2.47 | 2.29 | NA | 1.77 | 2.92 |
| 5 | 1.19 | 1.91 | 2.02 | 1.12 | 1.65 | 2.65 |
| 6 | 39.50 | 39.70 | 30.20 | 47.60 | 37.80 | 35.90 |
| 7 | 1.87 | 3.21 | 3.00 | NA | 2.82 | 3.87 |
| 8 | 2.06 | 2.25 | 2.65 | 2.73 | 2.55 | 3.56 |
| 9 | 116.70 | 99.60 | 99.50 | 97.70 | 102.70 | 109.90 |
| 10 | 15.50 | 31.50 | 29.30 | NA | 25.60 | 34.60 |
| 11 | 18.20 | 25.10 | 29.00 | 29.10 | 25.90 | 32.70 |
| 12 | 1.24 | 2.23 | 1.99 | 1.18 | 1.74 | 2.39 |
| 13 | 26.60 | 30.80 | 23.10 | 20.50 | 26.00 | 29.10 |
| 14 | NA | NA | 3.16 | 1.11 | NA | NA |
| 15 | 2.34 | 3.75 | 3.31 | 1.84 | 2.74 | 3.09 |
| 16 | 30.30 | 17.90 | 12.40 | 19.60 | 14.70 | 15.70 |
| 17 | 21.90 | 13.90 | 11.60 | 17.30 | 15.00 | 12.10 |
| 18 | 5.00 | 5.00 | 5.00 | NA | 5.00 | 5.00 |
| 19 | 5.00 | 5.00 | 5.00 | 5.00 | 5.00 | 5.00 |
| 20 | 1.38 | 1.18 | 1.12 | 1.12 | 1.18 | 1.18 |
| 21 | 1.41 | 1.14 | 1.07 | 1.11 | 1.20 | 1.20 |
| 22 | 42.60 | 28.90 | 25.90 | 29.00 | 30.80 | 29.80 |
| 23 | 42.70 | 28.40 | 23.70 | 30.30 | 32.00 | 30.50 |
| 24 | 3.88 | 3.98 | 4.10 | 4.55 | 4.76 | 4.92 |
| 25 | 4.48 | 4.19 | 4.51 | 4.21 | 4.25 | 4.74 |
| 26 | 11.29 | 10.83 | 8.73 | 12.33 | 9.19 | 10.65 |
| 27 | 1.13 | 0.80 | 0.58 | 0.13 | 0.15 | 0.71 |
| 28 | 102.70 | 104.40 | 126.00 | 145.20 | 109.50 | 106.20 |
| 29 | 102.20 | 127.30 | 105.80 | 151.30 | 117.60 | 119.20 |
| 30 | 1.63 | 2.07 | 1.86 | 1.57 | 1.87 | 1.94 |
| 31 | 2.99 | 3.45 | 2.88 | 3.40 | 3.28 | 3.29 |
| 32 | 13.10 | 14.30 | 11.80 | 14.50 | 12.60 | 14.00 |
| 33 | 50.80 | 51.70 | 39.70 | 35.30 | 42.10 | 42.10 |
| 34 | 196.40 | 199.80 | 179.40 | 134.30 | 198.50 | 165.50 |
| 35 | 230.40 | 176.70 | 176.50 | 163.70 | 164.70 | 170.90 |
| 36 | 802.20 | 861.60 | 931.00 | 591.60 | 911.40 | 791.80 |
| 37 | −0.083 | −0.1316 | −0.2426 | −0.5146 | −0.2441 | −0.2368 |
| 38 | 33.60 | 35.30 | 38.10 | 32.80 | 34.40 | 35.30 |
| 39 | 33.80 | 31.90 | 32.90 | 22.10 | 28.10 | 31.10 |
| 40 | 5.63 | 5.62 | 5.33 | 7.41 | 7.54 | 5.51 |
| 41 | 8854.50 | 5650.70 | 6003.30 | 6691.80 | 9005.00 | 7268.00 |
| 42 | 85.20 | 83.60 | 84.50 | 95.90 | 95.90 | 83.90 |
| 43 | 45.40 | 28.10 | 33.50 | 47.90 | 45.90 | 44.00 |

Table 138: Provided are the values of each of the parameters (as described above) measured in Cotton accessions (ecotype) under normal conditions. Growth conditions are specified in the experimental procedure section.

TABLE 139
Measured parameters in Cotton accessions (1-7) under normal conditions
(parameters set 2)

| | Line | | | | | | |
|---|---|---|---|---|---|---|---|
| Corr. ID | Line-1 | Line-2 | Line-3 | Line-4 | Line-5 | Line-6 | Line-7 |
| 1 | 2379.00 | 2148.90 | 2050.20 | 2156.30 | 1934.20 | 1221.20 | 1773.30 |
| 2 | 62.60 | 65.40 | 63.20 | 68.00 | 64.80 | 32.50 | 60.80 |
| 3 | 956.30 | 854.00 | 822.70 | 882.30 | 756.70 | 165.00 | 700.30 |
| 4 | 25.20 | 26.00 | 25.40 | 27.90 | 25.40 | 4.70 | 24.00 |
| 5 | 2.30 | 1.37 | 2.22 | 1.81 | 1.12 | 0.40 | 1.80 |
| 6 | 2.53 | 1.88 | 2.69 | 2.02 | 1.50 | 0.38 | 2.04 |
| 7 | 2.46 | 1.13 | 2.34 | 1.69 | 1.06 | 0.50 | 1.87 |
| 8 | 6.62 | 4.88 | 7.08 | 5.34 | 4.08 | 3.58 | 5.66 |
| 9 | 6.42 | 2.93 | 5.95 | 4.16 | 2.72 | 2.73 | 5.13 |
| 10 | 1.16 | 1.28 | 1.15 | 1.12 | 1.41 | 1.07 | 0.90 |
| 11 | 1.18 | 1.28 | 1.16 | 1.18 | 1.41 | 0.98 | 0.96 |
| 12 | 1.15 | 1.29 | 1.14 | 1.10 | 1.44 | 0.96 | 0.84 |
| 13 | 28.80 | 34.50 | 25.90 | 29.20 | 39.70 | 22.60 | 22.60 |
| 14 | 29.60 | 36.50 | 26.20 | 29.60 | 39.50 | 20.10 | 21.60 |
| 15 | 4.31 | 3.63 | 3.95 | 4.37 | 4.10 | 6.05 | 5.01 |
| 16 | 4.67 | 3.67 | 4.59 | 5.20 | 4.06 | 6.30 | 5.62 |
| 17 | 4.57 | 3.88 | 3.99 | 4.71 | 4.75 | 5.69 | 5.25 |
| 18 | 8.08 | 6.22 | 10.17 | 10.80 | 4.84 | 11.80 | 12.60 |
| 19 | 82.40 | 83.60 | 80.90 | 81.00 | 84.20 | 78.50 | 77.30 |
| 20 | −28.295 | −28.43 | −28.221 | −28.169 | −28.813 | −28.766 | −28.373 |
| 21 | 30.50 | 30.30 | 30.50 | 30.70 | 30.20 | 30.70 | 31.00 |
| 22 | 37.10 | 37.00 | 35.70 | 35.60 | 35.60 | 36.10 | 36.10 |
| 23 | NA | NA | NA | NA | NA | NA | NA |
| 24 | NA | NA | NA | NA | NA | NA | NA |
| 25 | 84.00 | 94.90 | 92.90 | 89.20 | 84.90 | 87.20 | 79.90 |
| 26 | 7007.70 | 6622.30 | 5544.70 | 8196.00 | 8573.30 | 8155.30 | 5291.30 |
| 27 | 5.67 | 6.87 | 6.45 | 5.86 | 5.61 | 6.59 | 4.09 |
| 28 | 34.30 | 33.50 | 31.40 | 29.70 | 37.10 | 27.40 | 33.40 |
| 29 | 32.10 | 35.30 | 36.00 | 35.80 | 35.00 | 32.90 | 35.90 |
| 30 | 0.0402 | −0.0587 | −0.2552 | −0.2192 | 0.1028 | −0.2906 | −0.1422 |
| 31 | 41.10 | 36.50 | 34.00 | 48.00 | 44.60 | 54.70 | 28.10 |
| 32 | 12.80 | 13.70 | 11.80 | 12.40 | 13.00 | 10.90 | 13.00 |
| 33 | 3.02 | 3.64 | 3.32 | 3.13 | 3.23 | 2.73 | 2.80 |
| 34 | 39.20 | 64.70 | 44.80 | 38.10 | 46.20 | 36.70 | 48.20 |
| 35 | 169.20 | 183.60 | 171.10 | 172.70 | 190.00 | 149.00 | 193.10 |
| 36 | 11.00 | 19.10 | 11.80 | 15.50 | 22.60 | 11.80 | 13.40 |
| 37 | 121.30 | 108.10 | 108.00 | 103.80 | 102.90 | 108.00 | 126.00 |
| 38 | 4.23 | NA | NA | NA | NA | NA | 4.56 |
| 39 | 5.55 | 2.08 | 3.39 | 2.09 | 3.07 | 2.41 | 5.89 |
| 40 | 12.00 | 22.60 | 11.80 | 18.80 | 27.70 | 16.40 | 15.00 |
| 41 | 1.02 | 1.46 | 0.81 | 0.96 | 1.21 | 1.69 | 1.29 |
| 42 | 8.15 | 10.90 | 9.00 | 11.04 | 10.14 | 7.85 | 8.48 |
| 43 | 32.50 | 34.90 | 32.50 | 35.10 | 36.30 | 26.70 | 33.10 |
| 44 | 3.33 | 2.70 | 3.83 | 2.99 | 2.43 | 3.02 | 3.03 |
| 45 | 3.29 | 1.58 | 3.06 | 2.19 | 1.64 | 2.29 | 2.76 |
| 46 | 31.6 | 24.2 | 36 | 31.3 | 20.9 | 32.6 | 30.8 |
| 47 | 31.2 | 15.5 | 33.3 | 26.1 | 14.9 | 31.3 | 32.6 |
| 48 | 105.2 | 113.6 | 98.5 | 84.7 | 111.7 | 82.5 | 91.6 |
| 49 | 112.8 | 110.8 | 100.6 | 115.4 | 103.3 | 98.5 | 121.9 |
| 50 | 1.86 | 2 | 1.73 | 1.72 | 1.66 | 1.72 | 2.09 |

Table 139. Provided are the values of each of the parameters (as described above) measured in cotton accessions (Line). Growth conditions are specified in the experimental procedure section.

TABLE 140
Measured parameters in Cotton accessions (8-13)
under normal conditions
(parameters set 2)

| | Line | | | | | |
|---|---|---|---|---|---|---|
| Corr. ID | Line-8 | Line-9 | Line-10 | Line-11 | Line-12 | Line-13 |
| 1 | 1920.00 | 2326.80 | 1794.80 | 2030.70 | 2211.00 | 2239.00 |
| 2 | 68.80 | 80.20 | 59.10 | 70.40 | 68.80 | 75.50 |
| 3 | 772.00 | 918.40 | 700.30 | 592.00 | 834.70 | 864.30 |
| 4 | 26.60 | 30.80 | 23.10 | 20.50 | 26.00 | 29.10 |
| 5 | 1.24 | 2.23 | 1.99 | 1.18 | 1.74 | 2.39 |
| 6 | 1.14 | 2.47 | 2.29 | NA | 1.77 | 2.92 |
| 7 | 1.19 | 1.91 | 2.02 | 1.12 | 1.65 | 2.65 |
| 8 | 3.13 | 6.37 | 6.14 | NA | 4.95 | 6.95 |
| 9 | 3.31 | 4.71 | 5.44 | 4.14 | 4.60 | 6.25 |
| 10 | 1.38 | 1.18 | 1.12 | 1.12 | 1.18 | 1.18 |
| 11 | 1.40 | 1.20 | 1.07 | 1.14 | 1.20 | 1.20 |
| 12 | 1.41 | 1.14 | 1.07 | 1.11 | 1.20 | 1.20 |
| 13 | 42.60 | 28.90 | 25.90 | 29.00 | 30.80 | 29.80 |
| 14 | 42.70 | 28.40 | 23.70 | 30.30 | 32.00 | 30.50 |
| 15 | 3.88 | 3.98 | 4.10 | 4.55 | 4.76 | 4.92 |
| 16 | 4.09 | 4.29 | 4.36 | 4.07 | 4.67 | 4.64 |
| 17 | 4.48 | 4.19 | 4.51 | 4.21 | 4.25 | 4.74 |
| 18 | 4.79 | 9.12 | 11.57 | 8.10 | 7.80 | 8.55 |
| 19 | 84.60 | 82.00 | 80.60 | 82.00 | 82.50 | 82.70 |
| 20 | −29.38 | −28.214 | −28.806 | −28.061 | −28.201 | −28.569 |
| 21 | 30.70 | 30.30 | 29.60 | 30.40 | 29.80 | 30.50 |
| 22 | 35.20 | 36.20 | 36.80 | 35.60 | 35.60 | 36.60 |
| 23 | NA | NA | NA | NA | NA | NA |
| 24 | NA | NA | NA | NA | NA | NA |
| 25 | 85.20 | 83.60 | 84.50 | 95.90 | 95.90 | 83.90 |
| 26 | 8854.50 | 5650.70 | 6003.30 | 6691.80 | 9005.00 | 7268.00 |
| 27 | 5.63 | 5.62 | 5.33 | 7.41 | 7.54 | 5.51 |
| 28 | 33.80 | 31.90 | 32.90 | 22.10 | 28.10 | 31.10 |
| 29 | 33.60 | 35.30 | 38.10 | 32.80 | 34.40 | 35.30 |
| 30 | −0.083 | −0.1316 | −0.2426 | −0.5146 | −0.2441 | −0.2368 |
| 31 | 45.40 | 28.10 | 33.50 | 47.90 | 45.90 | 44.00 |
| 32 | 13.10 | 14.30 | 11.80 | 14.50 | 12.60 | 14.00 |
| 33 | 2.99 | 3.45 | 2.88 | 3.40 | 3.28 | 3.29 |
| 34 | 50.80 | 51.70 | 39.70 | 35.30 | 42.10 | 42.10 |
| 35 | 196.40 | 199.80 | 179.40 | 134.30 | 198.50 | 165.50 |
| 36 | 21.90 | 13.90 | 11.60 | 17.30 | 15.00 | 12.10 |
| 37 | 102.70 | 104.40 | 126.00 | 145.20 | 109.50 | 106.20 |
| 38 | NA | NA | 3.16 | 1.11 | NA | NA |
| 39 | 2.34 | 3.75 | 3.31 | 1.84 | 2.74 | 3.09 |
| 40 | 30.30 | 17.90 | 12.40 | 19.60 | 14.70 | 15.70 |
| 41 | 1.13 | 0.80 | 0.58 | 0.13 | 0.15 | 0.71 |
| 42 | 11.29 | 10.83 | 8.73 | 12.33 | 9.19 | 10.65 |
| 43 | 39.50 | 39.70 | 30.20 | 47.60 | 37.80 | 35.90 |
| 44 | 1.87 | 3.21 | 3.00 | NA | 2.82 | 3.87 |
| 45 | 2.06 | 2.25 | 2.65 | 2.73 | 2.55 | 3.56 |
| 46 | 15.5 | 31.5 | 29.3 | NA | 25.6 | 34.6 |
| 47 | 18.2 | 25.1 | 29 | 29.1 | 25.9 | 32.7 |
| 48 | 116.7 | 99.6 | 99.5 | 97.7 | 102.7 | 109.9 |
| 49 | 102.2 | 127.3 | 105.8 | 151.3 | 117.6 | 119.2 |
| 50 | 1.63 | 2.07 | 1.86 | 1.57 | 1.87 | 1.94 |

Table 140. Provided are the values of each of the parameters (as described above) measured in cotton accessions (Line). Growth conditions are specified in the experimental procedure section.

TABLE 141
Measured parameters in Cotton accessions (1-7) under drought conditions

| | Line | | | | | | |
|---|---|---|---|---|---|---|---|
| Corr. ID | Line-1 | Line-2 | Line-3 | Line-4 | Line-5 | Line-6 | Line-7 |
| 1 | 1573 | 1378.9 | 1634.8 | 1597.2 | 1358.9 | 745 | 1246 |
| 2 | 48.70 | 43.50 | 48.20 | 52.20 | 45.90 | 19.40 | 42.60 |
| 3 | 622.00 | 554.20 | 659.30 | 683.30 | 494.70 | 76.00 | 467.30 |
| 4 | 19.20 | 17.50 | 19.40 | 20.50 | 16.70 | 2.20 | 16.00 |
| 5 | 2.06 | 1.08 | 2.00 | 1.82 | 0.84 | 0.27 | 1.43 |
| 6 | 2.63 | 1.20 | 2.53 | NA | NA | NA | NA |
| 7 | 2.34 | 1.57 | 2.32 | NA | NA | 0.47 | 1.44 |
| 8 | 6.76 | 3.05 | 6.51 | NA | NA | NA | NA |
| 9 | 6.15 | 4.25 | 5.90 | NA | NA | 3.51 | 4.18 |
| 10 | 1.10 | 1.22 | 1.09 | 1.07 | 1.39 | 0.93 | 0.82 |
| 11 | 1.13 | 1.24 | 1.15 | 1.05 | 1.40 | 0.91 | 0.94 |
| 12 | 1.10 | 1.06 | 1.05 | 1.08 | 1.35 | 0.95 | 0.87 |
| 13 | 28.00 | 35.30 | 24.90 | 29.40 | 40.90 | 17.90 | 22.00 |
| 14 | 27.10 | 30.70 | 23.00 | 27.80 | 39.90 | 17.00 | 26.30 |
| 15 | 4.28 | 4.17 | 4.09 | 4.71 | 3.70 | 6.39 | 5.56 |
| 16 | 4.98 | 4.58 | 4.73 | 5.37 | 4.83 | 7.42 | 5.84 |
| 17 | 4.63 | 3.85 | 4.36 | 5.13 | 4.57 | 7.34 | 5.52 |
| 18 | 9.10 | 7.70 | 10.60 | 10.70 | 4.70 | 16.40 | 17.30 |
| 19 | 81.60 | 82.80 | 80.20 | 80.80 | 84.40 | 76.40 | 75.70 |
| 20 | −28.081 | −28.655 | −28.723 | −27.658 | −28.28 | −27.948 | −28.233 |
| 21 | 33.00 | 33.60 | 33.00 | 34.60 | 33.10 | 33.40 | 33.00 |
| 22 | 35.20 | 38.60 | 37.00 | 34.70 | 38.50 | 37.90 | 37.40 |
| 23 | 481.10 | 427.70 | 581.70 | 512.40 | 450.70 | 610.10 | NA |
| 24 | 392.20 | 369.50 | 405.90 | 482.50 | 224.20 | 381.40 | 554.40 |
| 25 | 68.90 | 68.20 | 76.30 | 65.20 | 79.60 | 77.90 | 71.90 |
| 26 | 3928.30 | 5090.00 | 6094.30 | 6011.00 | 5919.00 | 4668.20 | 4397.70 |
| 27 | 3.66 | 2.91 | 3.76 | 3.33 | 4.38 | 4.26 | 2.87 |
| 28 | 47.40 | 46.80 | 48.50 | 49.30 | 53.50 | 46.40 | 48.60 |
| 29 | 36.30 | 38.80 | 39.80 | 40.70 | 39.30 | 37.40 | 39.20 |
| 30 | 0.34 | 0.17 | 0.22 | 0.28 | 0.45 | 0.24 | 0.28 |
| 31 | 28.90 | 37.40 | 33.10 | 41.00 | 39.80 | 33.40 | 27.00 |
| 32 | 11.40 | 11.70 | 10.80 | 10.80 | 11.00 | 9.90 | 11.30 |
| 33 | 2.89 | 3.09 | 3.08 | 3.17 | 3.25 | 2.84 | 2.60 |
| 34 | 92.90 | 87.20 | 79.80 | 85.60 | 71.30 | 77.20 | 99.40 |
| 35 | 0.99 | 0.96 | 0.99 | 0.99 | 0.98 | 0.97 | 1.00 |
| 36 | 37.20 | 51.20 | 46.90 | 45.60 | 40.00 | 28.20 | 41.40 |
| 37 | 140.20 | 140.80 | 184.70 | 147.40 | 149.50 | 116.50 | 161.30 |
| 38 | 9.30 | 14.50 | 9.80 | 12.50 | 19.90 | 8.00 | 10.60 |
| 39 | 100.20 | 99.80 | 99.30 | 96.20 | 92.90 | 99.40 | 127.00 |
| 40 | NA | NA | NA | NA | NA | NA | 4.24 |
| 41 | 3.77 | 3.70 | 3.63 | 2.92 | 2.50 | 3.20 | 4.76 |
| 42 | 9.80 | 14.10 | 10.60 | 12.20 | 23.20 | 10.30 | 11.90 |
| 43 | 1.04 | 0.88 | 1.17 | 1.08 | 1.38 | 1.05 | 1.23 |
| 44 | 6.98 | 7.23 | 7.17 | 7.42 | 8.23 | 5.97 | 7.60 |
| 45 | 3.45 | 1.66 | 3.55 | NA | NA | NA | NA |
| 46 | 3.30 | 2.30 | 3.16 | NA | NA | 2.56 | 2.16 |
| 47 | 32.60 | 15.60 | 33.50 | NA | NA | NA | NA |
| 48 | 33.40 | 21.80 | 34.60 | NA | NA | 32.10 | 27.50 |
| 49 | 99.10 | 105.40 | 94.20 | 80.70 | 109.00 | 80.40 | 92.90 |
| 50 | 24.90 | 24.00 | 25.50 | 27.10 | 27.50 | 16.50 | 24.00 |

Table 141. Provided are the values of each of the parameters (as described above) measured in Barley accessions (Line). Growth conditions are specified in the experimental procedure section.

TABLE 142
Measured parameters in additional Cotton accessions
(8-13) under drought conditions

| | Line | | | | | |
|---|---|---|---|---|---|---|
| Corr. ID | Line-8 | Line-9 | Line-10 | Line-11 | Line-12 | Line-13 |
| 1 | 1583.1 | 1552.1 | 1419.2 | 1533.2 | 1489.2 | 1606.4 |
| 2 | 52.40 | 49.10 | 46.00 | 50.70 | 42.40 | 57.10 |
| 3 | 592.60 | 598.80 | 558.00 | 428.00 | 563.70 | 614.70 |
| 4 | 19.60 | 18.90 | 18.30 | 14.10 | 16.10 | 20.20 |
| 5 | 1.00 | 1.82 | 2.02 | 1.01 | 1.59 | 2.02 |
| 6 | 1.31 | 2.11 | NA | 1.13 | 1.75 | 2.15 |
| 7 | 0.86 | 1.95 | 1.82 | 0.97 | 1.64 | 1.86 |
| 8 | 3.58 | 5.50 | NA | 4.20 | 4.88 | 5.90 |
| 9 | 2.43 | 5.17 | 5.14 | 3.36 | 4.45 | 5.03 |
| 10 | 1.33 | 1.11 | 1.06 | 1.04 | 1.10 | 1.13 |
| 11 | 1.33 | 1.13 | 1.07 | 1.06 | 1.07 | 1.13 |
| 12 | 1.32 | 1.11 | 0.99 | 1.07 | 1.08 | 1.09 |
| 13 | 43.10 | 28.10 | 26.10 | 28.40 | 29.20 | 30.00 |
| 14 | 43.50 | 27.80 | 22.30 | 28.90 | 31.90 | 30.30 |
| 15 | 4.07 | 4.32 | 4.26 | 4.71 | 4.98 | 4.69 |
| 16 | 4.46 | 5.10 | 5.07 | 4.88 | 4.88 | 4.51 |
| 17 | 3.98 | 4.63 | 4.28 | 4.69 | 5.35 | 4.21 |
| 18 | 4.70 | 10.10 | 12.30 | 8.90 | 8.60 | 9.30 |
| 19 | 84.00 | 80.90 | 79.50 | 81.40 | 80.80 | 82.20 |
| 20 | −28.403 | −27.778 | −27.808 | −26.931 | −27.501 | −27.862 |
| 21 | 33.20 | 32.60 | 32.90 | 33.70 | 33.50 | 33.60 |
| 22 | 37.00 | 36.50 | 37.20 | 36.30 | 36.20 | 35.70 |
| 23 | 327.50 | 407.00 | 510.50 | 541.80 | 382.80 | 555.90 |
| 24 | 218.80 | 426.90 | 420.70 | 384.40 | 434.20 | 498.80 |
| 25 | 71.60 | 68.80 | 59.40 | 81.20 | 79.90 | 60.40 |
| 26 | 6847.00 | 4819.70 | 3690.00 | 7521.90 | 6199.30 | 5593.00 |
| 27 | 3.61 | 3.08 | 2.58 | 4.15 | 4.03 | 2.46 |
| 28 | 48.80 | 51.20 | 52.10 | 43.80 | 45.80 | 49.00 |
| 29 | 38.50 | 39.10 | 41.90 | 37.40 | 37.70 | 37.90 |
| 30 | 0.31 | 0.37 | 0.30 | 0.08 | 0.18 | 0.31 |
| 31 | 41.90 | 30.60 | 30.10 | 46.00 | 39.50 | 34.20 |
| 32 | 11.90 | 12.50 | 10.60 | 11.80 | 11.30 | 12.00 |
| 33 | 3.17 | 3.37 | 2.91 | 3.46 | 3.50 | 3.22 |
| 34 | 74.80 | 97.70 | 85.50 | 104.40 | 93.00 | 93.40 |
| 35 | 0.99 | 0.99 | 0.99 | 0.99 | 0.99 | 0.98 |
| 36 | 49.80 | 44.30 | 36.50 | 43.20 | 38.00 | 37.80 |
| 37 | 162.80 | 159.80 | 123.20 | 192.80 | 156.60 | 163.70 |
| 38 | 19.60 | 11.40 | 9.10 | 14.00 | 10.20 | 11.00 |
| 39 | 92.90 | 97.70 | 127.00 | 98.80 | 98.50 | 98.80 |
| 40 | NA | NA | 3.98 | NA | NA | NA |
| 41 | 1.62 | 3.62 | 4.67 | 2.30 | 3.21 | 3.57 |
| 42 | 22.80 | 12.70 | 9.90 | 14.50 | 11.70 | 12.80 |
| 43 | 0.89 | 0.96 | 0.88 | 0.21 | 0.37 | 0.88 |
| 44 | 9.39 | 7.68 | 7.06 | 10.31 | 7.55 | 8.19 |
| 45 | 2.15 | 2.82 | NA | 3.18 | 2.74 | 3.20 |
| 46 | 1.38 | 2.64 | 2.51 | 2.31 | 2.53 | 2.65 |
| 47 | 18.70 | 29.50 | NA | 31.20 | 27.30 | 29.00 |
| 48 | 13.90 | 29.20 | 28.10 | 24.80 | 27.80 | 26.00 |
| 49 | 108.70 | 95.50 | 98.70 | 99.00 | 97.20 | 109.60 |
| 50 | 30.40 | 25.90 | 23.30 | 31.70 | 23.90 | 30.60 |

Table 142. Provided are the values of each of the parameters (as described above) measured in Barley accessions (Line). Growth conditions are specified in the experimental procedure section.

TABLE 143
Correlation between the expression level of selected genes of some
embodiments of the invention in various tissues and the phenotypic
performance under normal conditions (set 1) across Cotton accessions

| Gene | | | Exp. | Corr. | Gene | | | Exp. | Corr. |
|---|---|---|---|---|---|---|---|---|---|
| Name | R | P value | set | ID | Name | R | P value | set | ID |
| LBY468 | 0.74 | 9.51E−02 | 6 | 30 | LBY468 | 0.84 | 3.45E−02 | 6 | 39 |
| LBY468 | 0.78 | 6.50E−02 | 6 | 37 | LBY468 | 0.95 | 3.37E−03 | 6 | 38 |
| LBY468 | 0.82 | 4.73E−02 | 6 | 34 | LBY468 | 0.85 | 3.02E−02 | 6 | 36 |
| LBY468 | 0.75 | 8.36E−02 | 6 | 15 | LBY468 | 0.88 | 1.90E−03 | 1 | 7 |
| LBY468 | 0.81 | 8.74E−03 | 1 | 10 | LBY469 | 0.87 | 1.11E−02 | 2 | 28 |
| LBY469 | 0.81 | 2.56E−02 | 2 | 38 | LBY515 | 0.74 | 9.52E−02 | 8 | 39 |
| LBY515 | 0.84 | 3.46E−02 | 8 | 9 | LBY515 | 0.75 | 8.58E−02 | 8 | 37 |
| LBY515 | 0.74 | 9.34E−02 | 8 | 22 | LBY515 | 0.71 | 1.13E−01 | 8 | 38 |
| LBY515 | 0.77 | 7.42E−02 | 8 | 23 | LBY515 | 0.74 | 9.51E−02 | 8 | 34 |
| LBY515 | 0.71 | 1.12E−01 | 8 | 13 | LBY515 | 0.93 | 7.48E−03 | 8 | 33 |
| LBY515 | 0.75 | 8.73E−02 | 7 | 39 | LBY515 | 0.77 | 7.49E−02 | 7 | 3 |
| LBY515 | 0.83 | 3.95E−02 | 7 | 5 | LBY515 | 0.76 | 7.74E−02 | 7 | 12 |

Table 143. Provided are the correlations (R) between the expression levels of the genes of some embodiments of the invention and their homologues in tissues [mature leaf, lower and upper main stem, flower, main mature boll and fruit; Expression sets (Exp), Table 131] and the phenotypic performance in various yield, biomass, growth rate and/or vigor components [Correlation vector (corr.) according to Table 134] under normal conditions across Cotton accessions.
P = p value.

TABLE 144
Correlation between the expression level of selected genes of some embodiments
of the invention in additional tissues and the phenotypic performance under normal
conditions (set 2) across Cotton accessions

| Gene | | | Exp. | Corr. | Gene | | | Exp. | Corr. |
|---|---|---|---|---|---|---|---|---|---|
| Name | R | P value | set | ID | Name | R | P value | set | ID |
| LBY468 | 0.72 | 8.76E−03 | 2 | 20 | LBY468 | 0.74 | 2.32E−02 | 1 | 6 |
| LBY469 | 0.76 | 1.82E−02 | 1 | 18 | LBY469 | 0.75 | 1.99E−02 | 1 | 29 |

Table 144. Provided are the correlations (R) between the expression levels of the genes of some embodiments of the invention and their homologues in various tissues [“Exp. Set”—Expression set specified in Table 132] and the phenotypic performance in various yield, biomass, growth rate and/or vigor components according to the “Corr. ID” (correlation vectors ID) specified in Table 135.
“R” = Pearson correlation coefficient;
“P” = p value

TABLE 145
Correlation between the expression level of selected genes of some embodiments
of the invention in various tissues and the phenotypic performance under drought
conditions across Cotton accessions

| Gene | | | Exp. | Corr. | Gene | | | Exp. | |
|---|---|---|---|---|---|---|---|---|---|
| Name | R | P value | set | ID | Name | R | P value | set | Corr. ID |
| LBY468 | 0.78 | 4.32E−03 | 4 | 15 | LBY468 | 0.80 | 3.20E−03 | 4 | 17 |
| LBY468 | 0.89 | 2.24E−04 | 4 | 16 | LBY468 | 0.77 | 5.33E−03 | 4 | 18 |
| LBY468 | 0.82 | 3.39E−03 | 4 | 23 | LBY468 | 0.83 | 5.85E−03 | 7 | 31 |
| LBY468 | 0.81 | 2.77E−02 | 1 | 1 | LBY468 | 0.85 | 1.47E−02 | 1 | 31 |
| LBY468 | 0.85 | 1.56E−02 | 1 | 33 | LBY468 | 0.87 | 1.01E−02 | 1 | 10 |
| LBY468 | 0.85 | 1.61E−02 | 1 | 19 | LBY468 | 0.78 | 3.73E−02 | 1 | 11 |
| LBY468 | 0.84 | 1.87E−02 | 1 | 26 | LBY468 | 0.83 | 2.15E−02 | 1 | 12 |
| LBY468 | 0.72 | 6.65E−02 | 1 | 13 | LBY469 | 0.83 | 5.14E−03 | 7 | 26 |
| LBY469 | 0.74 | 2.21E−02 | 7 | 44 | LBY469 | 0.76 | 1.68E−02 | 7 | 14 |
| LBY469 | 0.78 | 7.24E−03 | 3 | 15 | LBY469 | 0.73 | 1.68E−02 | 3 | 17 |
| LBY469 | 0.73 | 6.50E−02 | 1 | 19 | LBY469 | 0.70 | 7.93E−02 | 1 | 27 |
| LBY515 | 0.74 | 8.53E−03 | 4 | 20 | LBY515 | 0.71 | 2.03E−02 | 6 | 5 |
| LBY515 | 0.73 | 1.62E−02 | 6 | 4 | LBY515 | 0.76 | 1.14E−02 | 6 | 29 |
| LBY515 | 0.70 | 2.35E−02 | 6 | 3 | LBY515 | 0.82 | 4.06E−03 | 6 | 28 |
| LBY515 | 0.78 | 8.10E−03 | 3 | 28 | LBY515 | 0.78 | 2.87E−03 | 5 | 1 |
| LBY515 | 0.76 | 4.21E−03 | 5 | 4 | LBY515 | 0.78 | 2.67E−03 | 5 | 2 |
| LBY515 | 0.75 | 4.88E−03 | 5 | 50 | LBY515 | 0.74 | 5.65E−03 | 5 | 3 |
| LBY515 | 0.79 | 2.08E−03 | 5 | 36 | LBY468 | 0.76 | 1.68E−02 | 1 | 22 |

Table 145. Provided are the correlations (R) between the expression levels of the genes of some embodiments of the invention and their homologues in various tissues [“Exp. Set”—Expression set specified in Table 133] and the phenotypic performance in various yield, biomass, growth rate and/or vigor components according to the “Corr. ID” (correlation vectors ID) specified in Table 136.
“R” = Pearson correlation coefficient;
“P” = p value

### Example 15

### Production of Bean Transcriptome and High Throughput Correlation Analysis with Yield Parameters Using 60K Bean (Phaseolus vulgaris L.) Oligonucleotide Micro-Arrays

[1226] In order to produce a high throughput correlation analysis, the present inventors utilized a Bean oligonucleotide micro-array, produced by Agilent Technologies [chem. (dot) agilent (dot) com/Scripts/PDS (dot) asp?1Page=50879]. The array oligonucleotide represents about 60,000 Bean genes and transcripts. In order to define correlations between the levels of RNA expression with yield components or plant architecture related parameters or plant vigor related parameters, various plant characteristics of 40 different commercialized bean varieties were analyzed and further used for RNA expression analysis. The correlation between the RNA levels and the characterized parameters was analyzed using Pearson correlation test [davidmlane (dot) com/hyperstat/A34739 (dot) html].

[1227] Experimental Procedures

[1228] Normal (Standard) growth conditions of Bean plants included 524 m³ water per dunam (1000 square meters) per entire growth period and fertilization of 16 units nitrogen per dunam per entire growth period. The nitrogen can be obtained using URAN® 21% (Nitrogen Fertilizer Solution; PCS Sales, Northbrook, Ill., USA).

[1229] Analyzed Bean Tissues

[1230] Six tissues [leaf, Stem, lateral stem, lateral branch flower bud, lateral branch pod with seeds and meristem] growing under normal conditions [field experiment, normal growth conditions which included irrigation with water 2-3 times a week with 524 m³ water per dunam (1000 square meters) per entire growth period, and fertilization of 16 units nitrogen per dunam given in the first month of the growth period] were sampled and RNA was extracted as described above.

[1231] For convenience, each micro-array expression information tissue type has received a Set ID as summarized in Table 146 below.

TABLE 146
Bean transcriptome expression sets

| Expression Set | Set ID |
|---|---|
| Lateral branch flower bud at flowering stage under | 1 |
| normal growth conditions | |
| Lateral branch pod with seeds at pod setting stage | 2 |
| under normal growth conditions | |
| Lateral stem at pod setting stage under normal | 3 |
| growth conditions | |
| Lateral stem at flowering stage under normal | 4 |
| growth conditions | |
| Leaf at pod setting stage under normal growth | 5 |
| conditions | |
| Leaf at flowering stage under normal growth conditions | 6 |
| Leaf at vegetative stage under normal growth | 7 |
| conditions | |
| Meristem at vegetative stage under normal growth | 8 |
| conditions | |
| stem at vegetative stage under normal growth | 9 |
| conditions | |

Table 146: Provided are the bean transcriptome expression sets.
Lateral branch flower bud = flower bud from vegetative branch; Lateral branch pod with seeds = pod with seeds from vegetative branch; Lateral stem = stem from vegetative branch.

[1232] Bean Yield Components and Vigor Related Parameters Assessment

[1233] 40 Bean varieties were grown in five repetitive plots, in field. Briefly, the growing protocol was as follows: Bean seeds were sown in soil and grown under normal conditions until harvest. Plants were continuously phenotyped during the growth period and at harvest (Table 147). The image analysis system included a personal desktop computer (Intel P4 3.0 GHz processor) and a public domain program—ImageJ 1.37 (Java based image processing program, which was developed at the U.S. National Institutes of Health and freely available on the internet [rsbweb (dot) nih (dot) gov/]. Next, analyzed data was saved to text files and processed using the JMP statistical analysis software (SAS institute).

[1234] The collected data parameters were as follows:

[1235] % Canopy coverage—percent Canopy coverage at grain filling stage, R1 flowering stage and at vegetative stage. The % Canopy coverage is calculated using Formula 32 above.

[1236] 1000 seed weight [gr.]—At the end of the experiment all seeds from all plots were collected and weighted and the weight of 1000 were calculated.

[1237] Days till 50% flowering [days]—number of days till 50% flowering for each plot.

[1238] Avr (average) shoot DW (gr.)—At the end of the experiment, the shoot material was collected, measured and divided by the number of plants.

[1239] Big pods FW per plant (PS) [gr.]—1 meter big pods fresh weight at pod setting divided by the number of plants.

[1240] Big pods number per plant (PS)—number of pods at development stage of R3-4 period above 4 cm per plant at pod setting.

[1241] Small pods FW per plant (PS) [gr.]—1 meter small pods fresh weight at pod setting divided by the number of plants.

[1242] Small pods number per plant (PS)—number of pods at development stage of R3-4 period below 4 cm per plant at pod setting.

[1243] Pod Area [cm²]—At development stage of R3-4 period pods of three plants were weighted, photographed and images were processed using the below described image processing system. The pod area above 4 cm and below 4 cm was measured from those images and was divided by the number of pods.

[1244] Pod Length and Pod width [cm]—At development stage of R3-4 period pods of three plants were weighted, photographed and images were processed using the below described image processing system. The sum of pod lengths /or width (longest axis) was measured from those images and was divided by the number of pods.

[1245] Number of lateral branches per plant [value/plant]—number of lateral branches per plant at vegetative stage (average of two plants per plot) and at harvest (average of three plants per plot).

[1246] Relative growth rate [cm/day]: the relative growth rate (RGR) of Plant Height was calculated using Formula 3 above.

[1247] Leaf area per plant (PS) [cm²]=Total leaf area of 3 plants in a plot at pod setting. Measurement was performed using a Leaf area-meter.

[1248] Specific leaf area (PS) [cm²/gr.]—leaf area per leaf dry weight at pod set.

[1249] Leaf form—Leaf length (cm)/leaf width (cm); average of two plants per plot.

[1250] Leaf number per plant (PS)—Plants were characterized for leaf number during pod setting stage. Plants were measured for their leaf number by counting all the leaves of 3 selected plants per plot.

[1251] Plant height [cm]—Plants were characterized for height during growing period at 3 time points. In each measure, plants were measured for their height using a measuring tape. Height of main stem was measured from first node above ground to last node before apex.

[1252] Seed yield per area (H)[gr.]—1 meter seeds weight at harvest.

[1253] Seed yield per plant (H)[gr.]—Average seeds weight per plant at harvest in 1 meter plot.

[1254] Seeds number per area (H)—1 meter plot seeds number at harvest.

[1255] Total seeds per plant (H)—Seeds number on lateral branch per plant+Seeds number on main branch per plant at harvest, average of three plants per plot.

[1256] Total seeds weight per plant (PS) [gr.]—Seeds weight on lateral branch+Seeds weight on main branch at pod set per plant, average of three plants per plot.

[1257] Small pods FW per plant (PS)—Average small pods (below 4 cm) fresh weight per plant at pod setting per meter.

[1258] Small pods number per plant (PS)—Number of Pods below 4 cm per plant at pod setting, average of two plants per plot.

[1259] SPAD—Plants were characterized for SPAD rate during growing period at grain filling stage and vegetative stage. Chlorophyll content was determined using a Minolta SPAD 502 chlorophyll meter and measurement was performed 64 days post sowing. SPAD meter readings were done on young fully developed leaf. Three measurements per leaf were taken per plot.

[1260] Stem width (R2F)[mm]—width of the stem of the first node at R2 flowering stage, average of two plants per plot.

[1261] Total pods number per plant (H), (PS)—Pods number on lateral branch per plant+Pods number on main branch per plant at pod setting and at harvest, average of three plants per plot.

[1262] Total pods DW per plant (H) [gr.]—Pods dry weight on main branch per plant+Pods dry weight on lateral branch per plant at harvest, average of three plants per plot.

[1263] Total pods FW per plant (PS) [gr.]—Average pods fresh weight on lateral branch+Pods weight on main branch at pod setting.

[1264] Pods weight per plant (RP) (H) [gr.]—Average pods weight per plant at harvest in 1 meter.

[1265] Total seeds per plant (H), (PS)—Seeds number on lateral branch per plant+Seeds number on main branch per plant at pod setting and at harvest, average of three plants per plot.

[1266] Total seeds number per pod (H), (PS)—Total seeds number per plant divided in total pods num per plant, average of three plants per plot.

[1267] Vegetative FW and DW per plant (PS) [gr./plant]—total weight of the vegetative portion above ground (excluding roots and pods) before and after drying at 70° C. in oven for 48 hours at pod set, average of three plants per plot.

[1268] Vigor till flowering [gr./day]—Relative growth rate (RGR) of shoot DW=Regression coefficient of shoot DW along time course (two measurements at vegetative stage and one measurement at flowering stage).

[1269] Vigor post flowering [gr./day]—Relative growth rate (RGR) of shoot DW=Regression coefficient of shoot DW measurements along time course (one measurement at flowering stage and two measurements at grain filling stage).

[1270] Experimental Results

[1271] 40 different bean varieties lines 1-40 were grown and characterized for 49 parameters as specified above. Among the 40 varieties, 16 varieties are “fine” and “extra fine”. The average for each of the measured parameters was calculated using the JMP software and values are summarized in Tables 148-154 below. Subsequent correlation analysis between the various transcriptome sets and the average parameters was conducted (Tables 155-156). Follow, results were integrated to the database. The phenotypic data of all 40 lines is provided in Tables 148-152 below. The correlation data of all 40 lines is provided in Table 155 below. The phenotypic data of “fine” and “extra fine” lines is provided in Tables 153-154 below. The correlation data of “fine” and “extra fine” lines is provided in Table 156 below.

TABLE 147
Bean correlated parameters (vectors)
Provided are the Bean correlated parameters (vectors) “gr.” = grams;
“SPAD” = chlorophyll levels; “PAR” = Photosynthetically active
radiation; “FW” = Plant Fresh weight; “normal” =
standard growth conditions; “GF” = Grain filling;
“RIF” = Flowering in R1 stage; “V” = Vegetative stage;
“EGF” = Early grain filling; “R2F” = Flowering in R2 stage;
“PS” = Pod setting; “RP” = Rest of the plot; “H” =
Harvest; “LGF” = Late grain filling; “V2-V3” =
Vegetative stages 2-3; “V4-V5” = Vegetative stages 4-5.

| Correlated parameter with | Correlation ID |
|---|---|
| % Canopy coverage (GF) | 1 |
| % Canopy coverage (RIF) | 2 |
| % Canopy coverage (V) | 3 |
| SPAD (GF) | 4 |
| SPAD (V) | 5 |
| PAR_LAI (EGF) | 6 |
| PAR_LAI (LGF) | 7 |
| PAR_LAI (RIF) | 8 |
| Leaf area per plant (PS) [cm²] | 9 |
| Leaf form | 10 |
| Leaf Length [cm] | 11 |
| Leaf num per plant (PS) | 12 |
| Leaf Width [cm] | 13 |
| Specific leaf area (PS) [cm²/gr.] | 14 |
| Stem width (R2F) [mm] | 15 |
| Avr shoot DW (EGF) [gr.] | 16 |
| Avr shoot DW (R2F) [gr.] | 17 |
| Avr shoot DW (V) [gr.] | 18 |
| Num of lateral branches per plant (H) | 19 |
| Num of lateral branches per plant (V) | 20 |
| Vegetative DW per plant (PS) [gr.] | 21 |
| Vegetative FW per plant (PS) [gr.] | 22 |
| Height Rate [cm/day] | 23 |
| Plant height (GF) [cm] | 24 |
| Plant height (V2-V3) [cm] | 25 |
| Plant height (V4-V5) [cm] | 26 |
| Vigor till flowering [gr./day] | 27 |
| Vigor post flowering [gr./day] | 28 |
| Mean (Pod Area) | 29 |
| Mean (Pod Average Width) | 30 |
| Mean (Pod Length) | 31 |
| Pods weight per plant (RP) (H) [gr.] | 32 |
| Small pods FW per plant (PS) (RP) [gr.] | 33 |
| Small pods num per plant (PS) | 34 |
| Big pods num per plant (PS) [gr.] | 35 |
| Big pods FW per plant (PS) (RP) [gr.] | 36 |
| Total pods DW per plant (H) [gr.] | 37 |
| Total pods weight per plant (PS) [gr.] | 38 |
| Total pods num per plant (H) | 39 |
| Total pods num per plant (PS) | 40 |
| 1000 seed weight [gr.] | 41 |
| Seed yield per area (H) (RP) [gr.] | 42 |
| Seed yield per plant (RP) (H) [gr.] | 43 |
| Total seeds weight per plant (PS) [gr.] | 44 |
| Seeds num per area (H) (RP) | 45 |
| Total seeds num per pod (H) | 46 |
| Total seeds num per pod (PS) | 47 |
| Total seeds per plant (H) [number] | 48 |
| Total seeds per plant (PS) [number] | 49 |

TABLE 148
Measured parameters in bean varieties (lines 1-8)

| | Line | | | | | | | |
|---|---|---|---|---|---|---|---|---|
| Corr. ID | Line-1 | Line-2 | Line-3 | Line-4 | Line-5 | Line-6 | Line-7 | Line-8 |
| 1 | 88.70 | 87.40 | 78.20 | 91.00 | NA | 80.80 | 76.70 | 90.30 |
| 2 | 89.60 | 82.80 | 66.40 | 78.90 | 79.30 | 72.30 | 82.80 | 90.50 |
| 3 | 70.50 | 61.60 | 56.50 | 58.60 | 65.40 | 39.00 | 70.50 | 83.60 |
| 4 | 40.20 | 38.40 | 34.50 | 36.20 | 38.60 | 37.70 | 40.50 | NA |
| 5 | 36.00 | 40.00 | 30.80 | 39.40 | 33.70 | 31.40 | 35.40 | 40.10 |
| 6 | 8.44 | 6.39 | 4.85 | 7.85 | 6.10 | 5.78 | 7.82 | 7.61 |
| 7 | 6.15 | 4.76 | 3.97 | 5.84 | NA | 4.38 | 4.03 | 4.01 |
| 8 | 3.27 | 3.42 | 2.05 | 3.06 | 3.21 | 1.33 | 4.11 | 5.01 |
| 9 | 211.70 | 242.10 | 183.00 | 307.10 | 306.50 | 133.10 | 253.10 | 308.10 |
| 10 | 1.64 | 1.59 | 1.53 | 1.32 | 1.59 | 1.58 | 1.47 | 1.56 |
| 11 | 13.30 | 12.30 | 11.80 | 11.60 | 12.20 | 11.10 | 13.20 | 13.10 |
| 12 | 4.73 | 4.67 | 4.67 | 6.07 | 5.00 | 4.73 | 5.00 | 6.17 |
| 13 | 8.16 | 7.75 | 7.69 | 8.83 | 7.67 | 7.03 | 8.97 | 8.42 |
| 14 | 226.30 | 226.10 | 211.40 | 222.30 | 207.30 | 213.00 | 201.00 | 207.30 |
| 15 | 5.79 | 5.65 | 6.14 | 5.84 | 6.01 | 5.39 | 6.10 | 5.83 |
| 16 | 16.20 | 28.60 | 14.00 | 18.70 | 23.20 | 19.30 | 18.40 | 27.80 |
| 17 | 7.33 | 10.29 | 7.58 | 8.28 | 9.42 | 6.37 | 11.51 | 11.85 |
| 18 | 0.30 | 0.42 | 0.30 | 0.33 | 0.41 | 0.24 | 0.44 | 0.44 |
| 19 | 7.93 | 6.06 | 7.00 | 6.20 | 7.27 | 7.93 | 6.93 | 7.00 |
| 20 | 4.90 | 5.17 | 5.50 | 4.90 | 5.30 | 5.80 | 6.60 | 6.60 |
| 21 | 16.30 | NA | 14.80 | 13.50 | 11.40 | 18.80 | 16.40 | 12.60 |
| 22 | 91.60 | 62.40 | 81.50 | 65.60 | 64.50 | 61.80 | 85.80 | 71.10 |
| 23 | 0.97 | 0.90 | 0.85 | 0.85 | 0.76 | 0.91 | 1.33 | 0.85 |
| 24 | 36.80 | 32.00 | 30.80 | 34.80 | 34.40 | 31.50 | 51.70 | 37.70 |
| 25 | 4.39 | 5.81 | 4.53 | 4.80 | 5.19 | 3.67 | 6.41 | 5.75 |
| 26 | 11.40 | 10.60 | 8.30 | 11.20 | 14.80 | 7.60 | 17.50 | 16.60 |
| 27 | 0.44 | 0.61 | 0.27 | 0.46 | 0.52 | 0.35 | 1.10 | 1.18 |
| 28 | 0.92 | 1.26 | 1.04 | 2.03 | 1.97 | 1.67 | 0.87 | 0.84 |
| 29 | 6.53 | 7.60 | 9.59 | 4.29 | 5.83 | 3.69 | 8.53 | 8.04 |
| 30 | 0.71 | 0.75 | 0.87 | 0.59 | 0.58 | 0.48 | 0.73 | 0.83 |
| 31 | 11.00 | 10.50 | 13.40 | 7.70 | 9.60 | 8.30 | 13.10 | 11.30 |
| 32 | 11.70 | 20.30 | 15.10 | 15.20 | 20.20 | 16.00 | 14.40 | 23.10 |
| 33 | 0.62 | 2.16 | 1.52 | 2.06 | 0.72 | 1.15 | 0.87 | 0.60 |
| 34 | 0.50 | 3.75 | 0.25 | 6.00 | 4.75 | 9.50 | 1.75 | 1.50 |
| 35 | 24.20 | 36.00 | 25.20 | 35.20 | 19.50 | 65.00 | 28.50 | 26.50 |
| 36 | NA | NA | NA | 67.40 | NA | 38.20 | NA | 76.40 |
| 37 | 12.80 | 15.60 | 15.40 | 20.70 | 16.50 | 13.90 | 19.20 | 30.40 |
| 38 | 33.00 | 122.70 | 60.40 | 105.00 | 40.20 | 61.10 | 50.40 | 33.10 |
| 39 | 27.10 | 19.40 | 17.60 | 24.70 | 17.90 | 46.10 | 18.50 | 38.30 |
| 40 | 33.10 | 24.70 | 29.70 | 33.90 | 16.80 | 31.60 | 27.50 | 20.90 |
| 41 | 94.40 | 151.20 | 145.90 | 117.60 | 154.20 | 69.60 | 142.30 | 123.70 |
| 42 | 342.40 | 243.20 | 284.40 | 457.20 | 493.70 | 196.70 | 457.70 | 430.60 |
| 43 | 6.31 | 4.73 | 8.70 | 8.29 | 9.28 | 4.53 | 8.40 | 9.20 |
| 44 | NA | NA | NA | 3.45 | NA | 0.50 | NA | 0.17 |
| 45 | 3635.2 | 1588.7 | 1958.3 | 3879.6 | 3207.6 | 2875.2 | 3218.2 | 3485.8 |
| 46 | 3.32 | 3.32 | 3.92 | 4.68 | 3.94 | 2.81 | 4.46 | 3.93 |
| 47 | 2.64 | 2.22 | 3.94 | 2.35 | 4.13 | 1.02 | 3.66 | 0.63 |
| 48 | 90.50 | 64.20 | 70.20 | 111.30 | 67.70 | 128.60 | 81.00 | 151.80 |
| 49 | 87.60 | 51.90 | 117.20 | 79.00 | 68.90 | 29.40 | 92.60 | 9.20 |

Table 148. Provided are the values of each of the parameters (as described above) measured in Bean accessions (Line). Growth conditions are specified in the experimental procedure section.

TABLE 149
Measured parameters in bean varieties (lines 9-16)

| | Line | | | | | | | |
|---|---|---|---|---|---|---|---|---|
| Corr. ID | Line-9 | Line-10 | Line-11 | Line-12 | Line-13 | Line-14 | Line-15 | Line-16 |
| 1 | 82.40 | 70.00 | 84.90 | 70.80 | 78.10 | 84.30 | NA | NA |
| 2 | 76.90 | 76.70 | 85.90 | 82.10 | 77.80 | 73.80 | 76.40 | 71.70 |
| 3 | 69.40 | 68.80 | 53.70 | 64.00 | 71.80 | 46.90 | 51.90 | 61.00 |
| 4 | 43.60 | NA | 40.80 | 41.60 | 44.50 | 39.40 | NA | NA |
| 5 | 30.40 | 38.60 | 37.50 | 36.30 | 35.10 | 35.80 | 35.00 | 35.70 |
| 6 | 6.20 | 4.58 | 6.34 | 6.79 | 6.48 | 6.29 | 6.60 | 5.85 |
| 7 | 4.20 | 2.58 | 4.66 | 3.69 | 3.40 | 4.95 | NA | NA |
| 8 | 4.26 | 2.88 | 2.22 | 2.99 | 2.84 | 1.58 | 1.74 | 2.73 |
| 9 | 161.60 | 193.30 | 145.60 | 204.90 | 194.50 | 157.50 | 155.00 | 194.40 |
| 10 | 1.46 | 1.40 | 1.55 | 1.51 | 1.45 | 1.53 | 1.52 | 1.58 |
| 11 | 12.20 | 12.20 | 12.10 | 12.20 | 12.30 | 12.00 | 12.30 | 14.00 |
| 12 | 3.21 | 4.47 | 4.00 | 4.20 | 4.73 | 5.00 | 5.42 | 4.11 |
| 13 | 8.33 | 8.72 | 7.83 | 8.10 | 8.51 | 7.85 | 8.13 | 8.84 |
| 14 | 218.90 | 205.60 | 187.80 | 243.00 | 169.30 | 257.80 | 238.20 | 208.40 |
| 15 | 5.69 | 5.99 | 5.67 | 5.50 | 5.26 | 4.91 | 6.00 | 6.04 |
| 16 | 15.80 | 31.40 | 26.40 | 24.70 | 20.10 | 14.40 | 18.00 | 22.60 |
| 17 | 9.34 | 10.13 | 8.74 | 8.66 | 9.26 | 5.42 | 7.40 | 13.47 |
| 18 | 0.38 | 0.45 | 0.33 | 0.39 | 0.35 | 0.21 | 0.35 | 0.48 |
| 19 | 7.60 | 7.60 | 5.73 | 6.47 | 6.87 | 9.67 | 7.53 | 7.58 |
| 20 | 4.80 | 6.50 | 4.90 | 4.80 | 5.70 | 5.10 | 5.70 | 6.75 |
| 21 | 13.70 | NA | 18.30 | 14.80 | 14.50 | 17.00 | 10.00 | 7.10 |
| 22 | 74.90 | 57.60 | 87.50 | 74.50 | 68.20 | 77.50 | 56.80 | 70.00 |
| 23 | 1.12 | 0.84 | 0.83 | 0.87 | 0.94 | 0.72 | 1.06 | 0.83 |
| 24 | 43.70 | 34.60 | 32.90 | 38.30 | 37.60 | 28.90 | 39.80 | 33.00 |
| 25 | 6.25 | 7.10 | 5.16 | 5.95 | 5.94 | 3.92 | 4.50 | 5.85 |
| 26 | 14.10 | 14.40 | 10.40 | 13.20 | 12.10 | 8.40 | 9.70 | 11.20 |
| 27 | 0.51 | 0.51 | 0.63 | 0.52 | 0.54 | 0.38 | 0.39 | 1.16 |
| 28 | 0.95 | 1.31 | 2.16 | 1.46 | 1.04 | 1.35 | NA | NA |
| 29 | 6.95 | 6.62 | 8.59 | 7.34 | 7.29 | 5.73 | 5.70 | 10.09 |
| 30 | 0.72 | 0.63 | 0.84 | 0.73 | 0.78 | 0.62 | 0.68 | 0.87 |
| 31 | 10.10 | 10.00 | 11.60 | 10.70 | 10.50 | 11.00 | 9.10 | 11.80 |
| 32 | 14.90 | 17.80 | 13.50 | 11.90 | 14.50 | 17.10 | 15.10 | 20.40 |
| 33 | 1.57 | 0.00 | 1.22 | 1.68 | 1.76 | 0.80 | 1.27 | 1.79 |
| 34 | 6.00 | 6.00 | 1.50 | 1.75 | 4.50 | 1.00 | 5.00 | 3.50 |
| 35 | 39.20 | 33.20 | 31.00 | 28.20 | 35.20 | 38.80 | 35.50 | 28.00 |
| 36 | NA | NA | NA | NA | NA | 49.40 | 43.70 | 71.50 |
| 37 | 19.10 | 29.80 | 24.10 | 15.10 | 13.10 | 15.30 | 10.80 | 26.00 |
| 38 | 92.90 | 3.30 | 66.40 | 97.90 | 105.60 | 41.20 | 81.80 | 67.20 |
| 39 | 22.50 | 24.50 | 22.30 | 18.40 | 15.80 | 38.30 | 18.90 | 24.20 |
| 40 | 22.30 | 19.30 | 22.90 | 24.90 | 25.00 | 46.00 | 24.30 | 18.00 |
| 41 | 149.20 | 191.90 | 124.60 | 151.50 | 149.50 | 66.30 | 93.70 | 148.00 |
| 42 | 528.80 | 449.30 | 403.10 | 381.90 | 521.60 | 198.10 | 371.10 | 260.00 |
| 43 | 9.46 | 10.86 | 8.19 | 6.86 | 8.72 | 4.02 | 6.55 | 6.99 |
| 44 | NA | NA | NA | NA | NA | 2.88 | 0.39 | 0.86 |
| 45 | 3534.00 | 2342.20 | 3232.80 | 2522.40 | 3492.60 | 3012.20 | 3953.80 | 1768.20 |
| 46 | 3.54 | 3.85 | 5.33 | 4.00 | 3.91 | 3.09 | 3.77 | 3.78 |
| 47 | 3.58 | 1.45 | 4.82 | 3.54 | 3.50 | 1.61 | 0.81 | 0.74 |
| 48 | 77.40 | 95.90 | 120.80 | 72.50 | 60.40 | 138.20 | 70.50 | 92.20 |
| 49 | 79.80 | 29.20 | 96.70 | 88.40 | 87.90 | 77.90 | 20.00 | 14.00 |

Table 149. Provided are the values of each of the parameters (as described above) measured in Bean accessions (Line). Growth conditions are specified in the experimental procedure section.

TABLE 150
Measured parameters in bean varieties (lines 17-24)

| | Line | | | | | | | |
|---|---|---|---|---|---|---|---|---|
| Corr. ID | Line-17 | Line-18 | Line-19 | Line-20 | Line-21 | Line-22 | Line-23 | Line-24 |
| 1 | 85.40 | NA | 73.90 | 74.30 | 73.40 | 66.50 | 84.40 | 87.00 |
| 2 | 88.80 | 91.50 | 91.60 | 82.00 | 91.80 | 72.90 | 83.10 | 93.00 |
| 3 | 68.90 | 82.90 | 59.80 | 55.80 | 76.90 | 65.30 | 64.10 | 73.50 |
| 4 | 35.20 | NA | NA | 41.70 | 42.10 | 43.00 | 42.30 | 31.10 |
| 5 | 32.50 | 34.70 | 35.80 | 32.80 | 37.20 | 35.10 | 34.20 | 31.90 |
| 6 | 6.51 | 6.70 | 6.74 | 5.91 | 5.56 | 6.77 | 7.02 | 8.15 |
| 7 | 4.89 | NA | 3.73 | 3.69 | 3.58 | 2.88 | 5.16 | 4.49 |
| 8 | 3.82 | 5.59 | 2.25 | 2.40 | 4.79 | 3.34 | 3.63 | 3.43 |
| 9 | 211.60 | 529.10 | 192.00 | 206.40 | 305.90 | 273.50 | 180.70 | 197.20 |
| 10 | 1.49 | 1.35 | 1.63 | 1.53 | 1.45 | 1.58 | 1.70 | 1.57 |
| 11 | 12.60 | 10.70 | 12.60 | 12.30 | 11.10 | 12.00 | 12.80 | 14.00 |
| 12 | 4.40 | 8.33 | 5.87 | 4.83 | 4.27 | 6.13 | 4.13 | 3.80 |
| 13 | 8.47 | 7.92 | 7.78 | 8.04 | 7.69 | 7.61 | 7.52 | 8.93 |
| 14 | 216.30 | 246.70 | 248.20 | 192.00 | 200.60 | 237.70 | 220.60 | 223.70 |
| 15 | 5.39 | 5.98 | 5.29 | 5.24 | 6.13 | 5.54 | 5.54 | 5.76 |
| 16 | 23.50 | 26.60 | 15.60 | 33.60 | 35.10 | 31.00 | 18.70 | 32.50 |
| 17 | 8.30 | 11.98 | 8.02 | 10.31 | 13.50 | 9.34 | 6.97 | 10.69 |
| 18 | 0.39 | 0.93 | 0.24 | 0.34 | 0.59 | 0.38 | 0.36 | 0.51 |
| 19 | 8.87 | 5.73 | 9.20 | 6.87 | 7.60 | 8.87 | 9.00 | 7.53 |
| 20 | 4.20 | 7.40 | 5.50 | 4.62 | 3.89 | 6.00 | 6.00 | 5.00 |
| 21 | 8.30 | 9.80 | 12.30 | 11.50 | 17.90 | 13.70 | NA | 18.30 |
| 22 | 60.40 | 68.00 | 47.70 | 76.10 | 79.70 | 70.80 | 70.90 | 108.70 |
| 23 | 0.83 | 0.90 | 0.81 | 1.00 | 1.06 | 1.07 | 1.18 | 0.71 |
| 24 | 32.30 | 39.70 | 30.40 | 38.70 | 43.10 | 41.30 | 44.60 | 30.00 |
| 25 | 4.28 | 9.29 | 4.67 | 5.55 | 7.06 | 6.16 | 5.54 | 7.22 |
| 26 | 10.50 | 25.30 | 11.20 | 12.70 | 18.30 | 15.30 | 11.70 | 13.30 |
| 27 | 0.41 | 0.65 | 0.45 | 0.65 | 0.85 | 0.58 | 0.35 | 0.73 |
| 28 | 1.22 | 1.37 | 1.52 | NA | 0.54 | 1.39 | 0.84 | 0.87 |
| 29 | 7.45 | 9.97 | 4.15 | 6.94 | 6.86 | 6.87 | 7.37 | 11.11 |
| 30 | 0.73 | 1.02 | 0.47 | 0.70 | 0.68 | 0.70 | 0.72 | 0.96 |
| 31 | 11.00 | 10.50 | 9.10 | 10.10 | 10.00 | 11.40 | 11.40 | 13.40 |
| 32 | 16.40 | 16.40 | 19.50 | 21.20 | 18.00 | 18.90 | 15.90 | 21.30 |
| 33 | 1.57 | 0.87 | 0.00 | 2.40 | 2.68 | 0.73 | 1.23 | 0.84 |
| 34 | 3.00 | 1.50 | 8.75 | 5.00 | 7.00 | 0.50 | 1.75 | 0.50 |
| 35 | 26.20 | 19.00 | 49.80 | 31.00 | 37.80 | 22.20 | 23.20 | 24.20 |
| 36 | NA | NA | NA | 110.00 | NA | 49.90 | 49.10 | NA |
| 37 | 23.60 | 29.90 | 21.90 | 32.00 | 27.10 | 23.50 | 18.90 | 35.40 |
| 38 | 73.40 | 54.00 | 3.00 | 85.80 | 144.80 | 43.00 | 82.60 | 38.90 |
| 39 | 24.40 | 13.80 | 44.10 | 25.70 | 23.40 | 33.90 | 30.00 | 25.50 |
| 40 | 23.70 | 13.80 | 30.30 | 31.70 | 26.60 | 27.30 | 22.20 | 24.80 |
| 41 | 144.60 | 380.80 | 72.80 | 186.30 | 185.60 | 107.40 | 121.30 | 205.40 |
| 42 | 550.80 | 595.40 | 431.50 | 568.40 | 526.20 | 533.60 | 482.20 | 456.90 |
| 43 | 9.63 | 10.35 | 7.92 | 12.65 | 11.08 | 9.62 | 9.05 | 12.66 |
| 44 | NA | NA | NA | 2.76 | NA | 2.30 | 1.53 | NA |
| 45 | 3804.20 | 1569.60 | 5946.60 | 3054.60 | 3368.60 | 4920.20 | 3978.60 | 2220.60 |
| 46 | 4.33 | 3.26 | 3.87 | 3.75 | 4.05 | 3.78 | 3.66 | 4.16 |
| 47 | 0.68 | 2.63 | 1.58 | 1.72 | 3.15 | 3.15 | 2.52 | 2.45 |
| 48 | 108.60 | 45.90 | 168.40 | 101.10 | 94.30 | 128.80 | 98.50 | 107.70 |
| 49 | 18.50 | 34.70 | 50.10 | 71.10 | 79.60 | 84.60 | 58.50 | 75.20 |

Table 150. Provided are the values of each of the parameters (as described above) measured in Bean accessions (Line). Growth conditions are specified in the experimental procedure section.

TABLE 151
Measured parameters in bean varieties (lines 25-32)

| | Line | | | | | | | |
|---|---|---|---|---|---|---|---|---|
| Corr. ID | Line-25 | Line-26 | Line-27 | Line-28 | Line-29 | Line-30 | Line-31 | Line-32 |
| 1 | 78.40 | NA | NA | 83.90 | NA | NA | NA | 83.40 |
| 2 | 62.50 | 80.30 | 86.60 | 82.50 | 80.60 | 85.00 | 83.40 | 84.20 |
| 3 | 34.50 | 53.00 | 90.00 | 62.30 | 77.30 | 70.90 | 63.40 | 61.30 |
| 4 | 40.00 | NA | NA | 34.00 | NA | NA | NA | 37.80 |
| 5 | 35.60 | 35.00 | 34.50 | 30.80 | 41.00 | 35.60 | 38.40 | 37.00 |
| 6 | 4.86 | 6.67 | 7.40 | 6.21 | 5.81 | 6.62 | 6.42 | 8.40 |
| 7 | 3.58 | NA | NA | 4.78 | NA | NA | NA | 4.67 |
| 8 | 1.27 | 2.60 | 6.30 | 3.50 | 4.11 | 4.15 | 3.07 | 2.66 |
| 9 | 175.30 | 216.50 | 324.10 | 175.80 | 296.70 | 394.10 | 242.20 | 200.60 |
| 10 | 1.61 | 1.49 | 1.58 | 1.67 | 1.62 | 1.69 | 1.59 | 1.59 |
| 11 | 12.80 | 12.60 | 12.20 | 10.40 | 12.70 | 12.50 | 11.20 | 13.10 |
| 12 | 4.44 | 4.53 | 7.17 | 7.00 | 5.78 | 7.22 | 6.19 | 5.13 |
| 13 | 7.95 | 8.50 | 7.73 | 6.26 | 7.91 | 7.36 | 7.05 | 8.23 |
| 14 | 199.90 | 211.00 | 250.40 | 236.90 | 211.70 | 257.50 | 203.50 | 211.40 |
| 15 | 6.69 | 6.01 | 6.05 | 5.09 | 5.14 | 5.71 | 5.65 | 6.28 |
| 16 | 29.30 | 25.70 | 21.90 | 21.80 | 38.30 | 39.70 | 17.00 | 18.80 |
| 17 | 10.57 | 9.51 | 11.21 | 6.31 | 11.87 | 10.37 | 11.99 | 10.57 |
| 18 | 0.45 | 0.47 | 0.54 | 0.21 | 0.58 | 0.68 | 0.48 | 0.36 |
| 19 | 5.22 | 7.93 | 6.94 | 8.27 | 6.25 | 7.89 | 6.53 | 8.20 |
| 20 | 4.33 | 4.40 | 6.92 | 7.60 | 5.38 | 9.00 | 6.40 | 8.40 |
| 21 | 17.50 | 7.70 | 8.80 | 11.70 | 13.20 | 15.20 | 12.90 | 18.50 |
| 22 | 105.60 | 57.20 | 66.80 | 61.80 | 75.60 | 82.70 | 69.10 | 86.80 |
| 23 | 0.78 | 1.05 | 1.30 | 0.94 | 1.03 | 1.04 | 0.98 | 0.88 |
| 24 | 29.40 | 41.60 | 53.20 | 34.70 | 41.50 | 44.40 | 37.50 | 35.70 |
| 25 | 4.83 | 4.95 | 6.16 | 4.33 | 6.06 | 7.28 | 6.53 | 4.61 |
| 26 | 9.40 | 16.20 | 23.20 | 7.80 | 17.00 | 21.00 | 19.10 | 10.50 |
| 27 | NA | 0.44 | 0.69 | 0.39 | 0.66 | NA | 0.64 | 0.54 |
| 28 | 0.97 | 1.56 | 1.65 | 0.93 | 1.28 | NA | NA | 0.37 |
| 29 | 7.07 | 8.68 | 7.53 | 5.68 | 7.05 | 13.18 | 7.89 | 6.26 |
| 30 | 0.76 | 0.80 | 0.74 | 0.66 | 0.72 | 1.26 | 0.73 | 0.69 |
| 31 | 10.00 | 11.90 | 11.70 | 8.80 | 9.70 | 11.40 | 12.20 | 10.50 |
| 32 | 21.70 | 19.00 | 17.90 | 11.80 | 17.90 | 19.40 | 17.00 | 11.20 |
| 33 | 2.32 | 1.06 | 1.47 | 1.40 | 0.00 | 1.99 | 0.90 | 0.61 |
| 34 | 3.50 | 0.75 | 2.00 | 6.25 | 6.75 | 0.25 | 2.25 | 0.83 |
| 35 | 43.50 | 19.80 | 28.20 | 32.00 | 29.20 | 21.80 | 32.80 | 34.20 |
| 36 | 82.60 | NA | 76.20 | NA | 44.80 | NA | NA | 61.70 |
| 37 | 26.10 | 21.50 | 13.00 | 18.20 | 25.10 | 19.20 | 18.90 | 9.80 |
| 38 | 109.60 | 71.70 | 91.00 | 85.30 | 4.50 | 69.80 | 62.20 | 36.40 |
| 39 | 38.60 | 23.70 | 22.10 | 25.20 | 17.00 | 11.60 | 24.10 | 23.50 |
| 40 | 30.70 | 18.60 | 23.20 | 25.30 | 19.30 | 17.10 | 24.90 | 32.40 |
| 41 | 154.50 | 158.50 | 120.70 | 96.80 | 207.70 | 307.20 | 116.10 | 94.60 |
| 42 | 243.60 | 611.10 | 290.80 | 426.60 | 701.10 | 487.70 | 501.10 | 102.60 |
| 43 | 7.97 | 10.63 | 5.42 | 7.37 | 11.01 | 12.46 | 8.24 | 1.94 |
| 44 | 6.16 | NA | 1.01 | NA | 3.36 | NA | NA | 3.74 |
| 45 | 1317.00 | 3861.60 | 2416.50 | 4403.00 | 3368.50 | 1595.00 | 4356.20 | 1164.40 |
| 46 | 2.32 | 3.95 | 3.08 | 4.79 | 4.35 | 4.10 | 4.27 | 3.02 |
| 47 | 3.07 | 1.78 | 0.35 | 3.65 | 2.88 | 3.44 | 4.93 | 2.48 |
| 48 | 85.40 | 90.10 | 65.10 | 118.10 | 73.10 | 46.30 | 103.20 | 70.30 |
| 49 | 94.70 | 33.50 | 12.50 | 91.10 | 54.50 | 56.80 | 97.10 | 81.40 |

Table 151. Provided are the values of each of the parameters (as described above) measured in Bean accessions (Line). Growth conditions are specified in the experimental procedure section.

TABLE 152
Measured parameters in bean varieties (lines 33-40)

| | Line | | | | | | | |
|---|---|---|---|---|---|---|---|---|
| Corr. ID | Line-33 | Line-34 | Line-35 | Line-36 | Line-37 | Line-38 | Line-39 | Line-40 |
| 1 | NA | NA | 88.30 | 79.60 | NA | 75.10 | 86.50 | 83.60 |
| 2 | 73.10 | 86.20 | 85.40 | 71.40 | 87.70 | 68.10 | 78.60 | 83.70 |
| 3 | 38.20 | 80.10 | 69.50 | 40.30 | 77.00 | 26.20 | 52.90 | 83.10 |
| 4 | NA | NA | 37.30 | 31.10 | NA | 34.70 | 32.20 | 39.60 |
| 5 | 34.20 | 31.80 | 33.70 | 26.10 | 34.10 | 29.30 | 32.20 | 37.90 |
| 6 | 5.11 | 7.14 | 7.54 | 4.66 | 5.71 | 4.56 | 6.59 | 6.65 |
| 7 | NA | NA | 5.54 | 4.20 | NA | 4.00 | 4.92 | 4.87 |
| 8 | 1.14 | 4.89 | 4.29 | 1.28 | 4.73 | 0.76 | 2.32 | 5.49 |
| 9 | 174.00 | 442.20 | 197.30 | 146.90 | 210.40 | 61.70 | 288.80 | 463.80 |
| 10 | 1.66 | 1.56 | 1.41 | 1.59 | 1.59 | 1.48 | 1.54 | 1.43 |
| 11 | 11.80 | 13.40 | 11.50 | 11.60 | 13.40 | 12.90 | 12.50 | 11.60 |
| 12 | 4.53 | 7.87 | 5.83 | 5.11 | 5.47 | 3.64 | 6.72 | 7.80 |
| 13 | 7.10 | 8.56 | 8.12 | 7.33 | 8.47 | 8.68 | 8.12 | 8.13 |
| 14 | 255.60 | 271.10 | 234.40 | 228.00 | 266.50 | 251.60 | 239.50 | 223.10 |
| 15 | 5.55 | 5.18 | 5.94 | 5.64 | 5.00 | 4.63 | 7.15 | 6.32 |
| 16 | 14.80 | 30.40 | 17.90 | 18.50 | 27.10 | 15.10 | 42.90 | 33.70 |
| 17 | 7.35 | 8.81 | 8.99 | 7.44 | 10.39 | 5.21 | 11.57 | 14.47 |
| 18 | 0.20 | 0.88 | 0.34 | 0.30 | 0.53 | 0.21 | 0.52 | 0.77 |
| 19 | 6.93 | 6.67 | 7.40 | 8.67 | 6.67 | 10.67 | 6.60 | 7.33 |
| 20 | 6.20 | 5.00 | 6.20 | 6.00 | 5.60 | 4.60 | 6.83 | 6.50 |
| 21 | 10.80 | 14.30 | 11.90 | 17.40 | NA | 14.30 | 27.60 | 14.80 |
| 22 | 52.80 | 71.50 | 80.20 | 116.90 | 59.80 | 71.50 | 156.70 | 80.60 |
| 23 | 0.79 | 0.94 | 0.98 | 0.96 | 1.03 | 0.71 | 1.02 | 1.59 |
| 24 | 29.50 | 45.00 | 36.70 | 34.90 | 39.60 | 26.20 | 40.50 | 60.90 |
| 25 | 3.46 | 9.08 | 4.25 | 4.98 | 6.69 | 3.50 | 5.44 | 6.36 |
| 26 | 8.70 | 25.70 | 13.10 | 8.70 | 17.20 | 5.90 | 12.50 | 22.70 |
| 27 | 0.42 | 0.61 | 0.54 | 0.36 | 0.68 | 0.25 | 0.79 | 0.89 |
| 28 | 1.39 | NA | 1.58 | 1.43 | NA | 1.34 | 1.36 | 2.03 |
| 29 | 4.30 | 7.94 | 7.68 | 8.22 | 6.09 | 5.23 | 7.74 | 8.83 |
| 30 | 0.50 | 0.87 | 0.82 | 0.81 | 0.60 | 0.59 | 1.02 | 1.08 |
| 31 | 8.70 | 8.40 | 10.40 | 11.70 | 9.10 | 10.50 | 9.20 | 8.90 |
| 32 | 12.80 | 17.10 | 15.60 | 20.20 | 18.70 | 19.50 | 23.90 | 23.30 |
| 33 | 0.00 | 0.00 | 1.36 | 1.66 | 0.00 | 1.03 | 1.70 | 0.90 |
| 34 | 9.50 | 5.50 | 2.00 | 0.00 | 9.00 | 3.25 | 1.50 | 1.50 |
| 35 | 46.50 | 23.80 | 34.00 | 23.50 | 31.00 | 68.80 | 36.80 | 19.50 |
| 36 | 23.70 | NA | 54.00 | 89.20 | 60.90 | NA | NA | NA |
| 37 | 23.50 | 31.40 | 17.50 | 24.60 | 25.50 | 28.10 | 37.90 | 29.00 |
| 38 | 1.80 | 3.00 | 83.20 | 52.40 | 3.80 | 40.40 | 69.00 | 53.50 |
| 39 | 63.60 | 13.90 | 19.50 | 24.50 | 18.50 | 43.90 | 27.00 | 20.10 |
| 40 | 26.90 | 13.70 | 23.00 | 22.30 | 11.90 | 43.40 | 32.00 | 22.30 |
| 41 | 82.90 | 442.80 | 140.30 | 111.80 | 172.60 | 70.70 | 332.30 | 234.20 |
| 42 | 170.90 | 623.80 | 418.30 | 334.60 | 551.90 | 330.60 | 604.80 | 695.50 |
| 43 | 3.70 | 10.27 | 8.21 | 9.76 | 10.68 | 10.16 | 16.19 | 15.15 |
| 44 | 0.30 | NA | 1.68 | 1.54 | 1.01 | NA | NA | NA |
| 45 | 2036.80 | 1410.20 | 2980.60 | 2987.20 | 3196.80 | 4661.80 | 1823.80 | 3141.00 |
| 46 | 1.82 | 3.39 | 3.76 | 5.30 | 4.92 | 5.12 | 2.89 | 4.23 |
| 47 | 1.12 | 1.79 | 2.47 | 1.83 | 1.28 | 1.42 | 1.91 | 3.05 |
| 48 | 111.90 | 47.90 | 73.20 | 126.70 | 93.20 | 224.00 | 76.30 | 84.70 |
| 49 | 31.70 | 22.90 | 57.10 | 45.40 | 16.50 | 62.30 | 59.30 | 58.80 |

Table 152. Provided are the values of each of the parameters (as described above) measured in Bean accessions (Line). Growth conditions are specified in the experimental procedure section.

TABLE 153
Measured parameters in bean varieties (“fine” and “extra fine”) (lines 1-8)

| | Line | | | | | | | |
|---|---|---|---|---|---|---|---|---|
| Corr. ID | Line-1 | Line-4 | Line-6 | Line-8 | Line-14 | Line-15 | Line-19 | Line-22 |
| 1 | 88.70 | 91.00 | 80.80 | 90.30 | 84.30 | NA | 73.90 | 66.50 |
| 2 | 89.60 | 78.90 | 72.30 | 90.50 | 73.80 | 76.40 | 91.60 | 72.90 |
| 3 | 70.50 | 58.60 | 39.00 | 83.60 | 46.90 | 51.90 | 59.80 | 65.30 |
| 4 | 40.20 | 36.20 | 37.70 | NA | 39.40 | NA | NA | 43.00 |
| 5 | 36.00 | 39.40 | 31.40 | 40.10 | 35.80 | 35.00 | 35.80 | 35.10 |
| 6 | 8.44 | 7.85 | 5.78 | 7.61 | 6.29 | 6.60 | 6.74 | 6.77 |
| 7 | 6.15 | 5.84 | 4.38 | 4.01 | 4.95 | NA | 3.73 | 2.88 |
| 8 | 3.27 | 3.06 | 1.33 | 5.01 | 1.58 | 1.74 | 2.25 | 3.34 |
| 9 | 211.70 | 307.10 | 133.10 | 308.10 | 157.50 | 155.00 | 192.00 | 273.50 |
| 10 | 1.64 | 1.32 | 1.58 | 1.56 | 1.53 | 1.52 | 1.63 | 1.58 |
| 11 | 13.30 | 11.60 | 11.10 | 13.10 | 12.00 | 12.30 | 12.60 | 12.00 |
| 12 | 4.73 | 6.07 | 4.73 | 6.17 | 5.00 | 5.42 | 5.87 | 6.13 |
| 13 | 8.16 | 8.83 | 7.03 | 8.42 | 7.85 | 8.13 | 7.78 | 7.61 |
| 14 | 226.30 | 222.30 | 213.00 | 207.30 | 257.80 | 238.20 | 248.20 | 237.70 |
| 15 | 5.79 | 5.84 | 5.39 | 5.83 | 4.91 | 6.00 | 5.29 | 5.54 |
| 16 | 16.20 | 18.70 | 19.30 | 27.80 | 14.40 | 18.00 | 15.60 | 31.00 |
| 17 | 7.33 | 8.28 | 6.37 | 11.85 | 5.42 | 7.40 | 8.02 | 9.34 |
| 18 | 0.30 | 0.33 | 0.24 | 0.44 | 0.21 | 0.35 | 0.24 | 0.38 |
| 19 | 7.93 | 6.20 | 7.93 | 7.00 | 9.67 | 7.53 | 9.20 | 8.87 |
| 20 | 4.90 | 4.90 | 5.80 | 6.60 | 5.10 | 5.70 | 5.50 | 6.00 |
| 21 | 16.30 | 13.50 | 18.80 | 12.60 | 17.00 | 10.00 | 12.30 | 13.70 |
| 22 | 91.60 | 65.60 | 61.80 | 71.10 | 77.50 | 56.80 | 47.70 | 70.80 |
| 23 | 0.97 | 0.85 | 0.91 | 0.85 | 0.72 | 1.06 | 0.81 | 1.07 |
| 24 | 36.80 | 34.80 | 31.50 | 37.70 | 28.90 | 39.80 | 30.40 | 41.30 |
| 25 | 4.39 | 4.80 | 3.67 | 5.75 | 3.92 | 4.50 | 4.67 | 6.16 |
| 26 | 11.40 | 11.20 | 7.60 | 16.60 | 8.40 | 9.70 | 11.20 | 15.30 |
| 27 | 0.44 | 0.46 | 0.35 | 1.18 | 0.38 | 0.39 | 0.45 | 0.58 |
| 28 | 0.92 | 2.03 | 1.67 | 0.84 | 1.35 | NA | 1.52 | 1.39 |
| 29 | 6.53 | 4.29 | 3.69 | 8.04 | 5.73 | 5.70 | 4.15 | 6.87 |
| 30 | 0.71 | 0.59 | 0.48 | 0.83 | 0.62 | 0.68 | 0.47 | 0.70 |
| 31 | 11.00 | 7.70 | 8.30 | 11.30 | 11.00 | 9.10 | 9.10 | 11.40 |
| 32 | 11.70 | 15.20 | 16.00 | 23.10 | 17.10 | 15.10 | 19.50 | 18.90 |
| 33 | 0.62 | 2.06 | 1.15 | 0.60 | 0.80 | 1.27 | 0.00 | 0.73 |
| 34 | 0.50 | 6.00 | 9.50 | 1.50 | 1.00 | 5.00 | 8.75 | 0.50 |
| 35 | 24.20 | 35.20 | 65.00 | 26.50 | 38.80 | 35.50 | 49.80 | 22.20 |
| 36 | NA | 67.40 | 38.20 | 76.40 | 49.40 | 43.70 | NA | 49.90 |
| 37 | 12.80 | 20.70 | 13.90 | 30.40 | 15.30 | 10.80 | 21.90 | 23.50 |
| 38 | 33.00 | 105.00 | 61.10 | 33.10 | 41.20 | 81.80 | 3.00 | 43.00 |
| 39 | 27.10 | 24.70 | 46.10 | 38.30 | 38.30 | 18.90 | 44.10 | 33.90 |
| 40 | 33.10 | 33.90 | 31.60 | 20.90 | 46.00 | 24.30 | 30.30 | 27.30 |
| 41 | 94.40 | 117.60 | 69.60 | 123.70 | 66.30 | 93.70 | 72.80 | 107.40 |
| 42 | 342.40 | 457.20 | 196.70 | 430.60 | 198.10 | 371.10 | 431.50 | 533.60 |
| 43 | 6.31 | 8.29 | 4.53 | 9.20 | 4.02 | 6.55 | 7.92 | 9.62 |
| 44 | NA | 3.45 | 0.50 | 0.17 | 2.88 | 0.39 | NA | 2.30 |
| 45 | 3635.2 | 3879.6 | 2875.2 | 3485.8 | 3012.2 | 3953.8 | 5946.6 | 4920.2 |
| 46 | 3.32 | 4.68 | 2.81 | 3.93 | 3.09 | 3.77 | 3.87 | 3.78 |
| 47 | 2.64 | 2.35 | 1.02 | 0.63 | 1.61 | 0.81 | 1.58 | 3.15 |
| 48 | 90.50 | 111.30 | 128.60 | 151.80 | 138.20 | 70.50 | 168.40 | 128.80 |
| 49 | 87.60 | 79.00 | 29.40 | 9.20 | 77.90 | 20.00 | 50.10 | 84.60 |

Table 153. Provided are the values of each of the parameters (as described above) measured in Bean accessions (Line). Growth conditions are specified in the experimental procedure section.

TABLE 154
Measured parameters in bean varieties (“fine” and “extra fine”) (lines 9-16)

| | Line | | | | | | | |
|---|---|---|---|---|---|---|---|---|
| Corr. ID | Line-23 | Line-27 | Line-28 | Line-31 | Line-32 | Line-33 | Line-36 | Line-38 |
| 1 | 84.40 | NA | 83.90 | NA | 83.40 | NA | 79.60 | 75.10 |
| 2 | 83.10 | 86.60 | 82.50 | 83.40 | 84.20 | 73.10 | 71.40 | 68.10 |
| 3 | 64.10 | 90.00 | 62.30 | 63.40 | 61.30 | 38.20 | 40.30 | 26.20 |
| 4 | 42.30 | NA | 34.00 | NA | 37.80 | NA | 31.10 | 34.70 |
| 5 | 34.20 | 34.50 | 30.80 | 38.40 | 37.00 | 34.20 | 26.10 | 29.30 |
| 6 | 7.02 | 7.40 | 6.21 | 6.42 | 8.40 | 5.11 | 4.66 | 4.56 |
| 7 | 5.16 | NA | 4.78 | NA | 4.67 | NA | 4.20 | 4.00 |
| 8 | 3.63 | 6.30 | 3.50 | 3.07 | 2.66 | 1.14 | 1.28 | 0.76 |
| 9 | 180.70 | 324.10 | 175.80 | 242.20 | 200.60 | 174.00 | 146.90 | 61.70 |
| 10 | 1.70 | 1.58 | 1.67 | 1.59 | 1.59 | 1.66 | 1.59 | 1.48 |
| 11 | 12.80 | 12.20 | 10.40 | 11.20 | 13.10 | 11.80 | 11.60 | 12.90 |
| 12 | 4.13 | 7.17 | 7.00 | 6.19 | 5.13 | 4.53 | 5.11 | 3.64 |
| 13 | 7.52 | 7.73 | 6.26 | 7.05 | 8.23 | 7.10 | 7.33 | 8.68 |
| 14 | 220.60 | 250.40 | 236.90 | 203.50 | 211.40 | 255.60 | 228.00 | 251.60 |
| 15 | 5.54 | 6.05 | 5.09 | 5.65 | 6.28 | 5.55 | 5.64 | 4.63 |
| 16 | 18.70 | 21.90 | 21.80 | 17.00 | 18.80 | 14.80 | 18.50 | 15.10 |
| 17 | 6.97 | 11.21 | 6.31 | 11.99 | 10.57 | 7.35 | 7.44 | 5.21 |
| 18 | 0.36 | 0.54 | 0.21 | 0.48 | 0.36 | 0.20 | 0.30 | 0.21 |
| 19 | 9.00 | 6.94 | 8.27 | 6.53 | 8.20 | 6.93 | 8.67 | 10.67 |
| 20 | 6.00 | 6.92 | 7.60 | 6.40 | 8.40 | 6.20 | 6.00 | 4.60 |
| 21 | NA | 8.80 | 11.70 | 12.90 | 18.50 | 10.80 | 17.40 | 14.30 |
| 22 | 70.90 | 66.80 | 61.80 | 69.10 | 86.80 | 52.80 | 116.90 | 71.50 |
| 23 | 1.18 | 1.30 | 0.94 | 0.98 | 0.88 | 0.79 | 0.96 | 0.71 |
| 24 | 44.60 | 53.20 | 34.70 | 37.50 | 35.70 | 29.50 | 34.90 | 26.20 |
| 25 | 5.54 | 6.16 | 4.33 | 6.53 | 4.61 | 3.46 | 4.98 | 3.50 |
| 26 | 11.70 | 23.20 | 7.80 | 19.10 | 10.50 | 8.70 | 8.70 | 5.90 |
| 27 | 0.35 | 0.69 | 0.39 | 0.64 | 0.54 | 0.42 | 0.36 | 0.25 |
| 28 | 0.84 | 1.65 | 0.93 | NA | 0.37 | 1.39 | 1.43 | 1.34 |
| 29 | 7.37 | 7.53 | 5.68 | 7.89 | 6.26 | 4.30 | 8.22 | 5.23 |
| 30 | 0.72 | 0.74 | 0.66 | 0.73 | 0.69 | 0.50 | 0.81 | 0.59 |
| 31 | 11.40 | 11.70 | 8.80 | 12.20 | 10.50 | 8.70 | 11.70 | 10.50 |
| 32 | 15.90 | 17.90 | 11.80 | 17.00 | 11.20 | 12.80 | 20.20 | 19.50 |
| 33 | 1.23 | 1.47 | 1.40 | 0.91 | 0.61 | 0.00 | 1.67 | 1.03 |
| 34 | 1.75 | 2.00 | 6.25 | 2.25 | 0.83 | 9.50 | 0.00 | 3.25 |
| 35 | 23.20 | 28.20 | 32.00 | 32.80 | 34.20 | 46.50 | 23.50 | 68.80 |
| 36 | 49.10 | 76.20 | NA | NA | 61.70 | 23.70 | 89.20 | NA |
| 37 | 18.90 | 13.00 | 18.20 | 18.90 | 9.80 | 23.50 | 24.60 | 28.10 |
| 38 | 82.60 | 91.00 | 85.30 | 62.20 | 36.40 | 1.80 | 52.40 | 40.40 |
| 39 | 30.00 | 22.10 | 25.20 | 24.10 | 23.50 | 63.60 | 24.50 | 43.90 |
| 40 | 22.20 | 23.20 | 25.30 | 24.90 | 32.40 | 26.90 | 22.30 | 43.40 |
| 41 | 121.30 | 120.70 | 96.80 | 116.10 | 94.60 | 82.90 | 111.80 | 70.70 |
| 42 | 482.20 | 290.80 | 426.60 | 501.10 | 102.60 | 170.90 | 334.60 | 330.60 |
| 43 | 9.05 | 5.42 | 7.37 | 8.24 | 1.94 | 3.70 | 9.76 | 10.16 |
| 44 | 1.53 | 1.01 | NA | NA | 3.74 | 0.30 | 1.54 | NA |
| 45 | 3978.6 | 2416.5 | 4403 | 4356.2 | 1164.4 | 2036.8 | 2987.2 | 4661.8 |
| 46 | 3.66 | 3.08 | 4.79 | 4.27 | 3.02 | 1.82 | 5.30 | 5.12 |
| 47 | 2.52 | 0.35 | 3.65 | 4.93 | 2.48 | 1.12 | 1.83 | 1.42 |
| 48 | 98.50 | 65.10 | 118.10 | 103.20 | 70.30 | 111.90 | 126.70 | 224.00 |
| 49 | 58.50 | 12.50 | 91.10 | 97.10 | 81.40 | 31.70 | 45.40 | 62.30 |

Table 154. Provided are the values of each of the parameters (as described above) measured in Bean accessions (Line). Growth conditions are specified in the experimental procedure section.

TABLE 155
Correlation between the expression level of selected genes of some embodiments of
the invention in various tissues and the phenotypic performance under normal
conditions across 40 bean varieties

| | | | Exp. | Corr. | Gene | | | Exp. | Corr. |
|---|---|---|---|---|---|---|---|---|---|
| Gene Name | R | P value | set | ID | Name | R | P value | set | ID |
| LBY466 | 0.71 | 1.03E−03 | 2 | 26 | LYD1011 | 0.74 | 1.70E−03 | 2 | 36 |
| LYD1019 | 0.73 | 5.29E−04 | 2 | 5 | LYD1019 | 0.71 | 8.67E−04 | 2 | 9 |

Table 155. Provided are the correlations (R) between the genes expression levels in various tissues [Expression (Exp) sets, Table 146] and the phenotypic performance [yield, biomass, and plant architecture (as described in Tables 148-152 using the (Correlation vectors (Corr.) described in Table 147] under normal conditions across bean varieties.
P = p value.

TABLE 156
Correlation between the expression level of selected genes of some embodiments of
the invention in various tissues and the phenotypic performance under normal
conditions across 16 bean varieties (“fine” and “extra fine”)

| Gene | | | Exp. | Corr. | Gene | | | Exp. | Corr. |
|---|---|---|---|---|---|---|---|---|---|
| Name | R | P value | set | ID | Name | R | P value | set | ID |
| LBY466 | 0.75 | 7.81E−03 | 2 | 31 | LBY466 | 0.76 | 6.78E−03 | 2 | 26 |
| LBY466 | 0.72 | 1.21E−02 | 2 | 6 | LBY466 | 0.76 | 1.11E−02 | 7 | 34 |
| LBY466 | 0.74 | 1.40E−02 | 7 | 12 | LBY466 | 0.81 | 4.17E−03 | 7 | 39 |
| LBY466 | 0.71 | 1.04E−02 | 6 | 8 | LBY466 | 0.73 | 6.63E−03 | 6 | 47 |
| LYD1010 | 0.74 | 6.44E−03 | 9 | 33 | LYD1010 | 0.75 | 5.25E−03 | 9 | 41 |
| LYD1010 | 0.76 | 3.99E−03 | 9 | 38 | LYD1010 | 0.70 | 1.58E−02 | 5 | 43 |
| LYD1010 | 0.79 | 4.00E−03 | 5 | 46 | LYD1010 | 0.77 | 1.45E−02 | 5 | 44 |
| LYD1010 | 0.80 | 5.45E−03 | 7 | 29 | LYD1010 | 0.75 | 1.32E−02 | 7 | 31 |
| LYD1010 | 0.76 | 1.01E−02 | 7 | 30 | LYD1010 | 0.82 | 6.59E−03 | 7 | 36 |
| LYD1010 | 0.71 | 2.12E−02 | 7 | 22 | LYD1010 | 0.74 | 1.37E−02 | 7 | 9 |
| LYD1010 | 0.88 | 1.53E−03 | 3 | 5 | LYD1010 | 0.71 | 3.34E−02 | 3 | 19 |
| LYD1010 | 0.72 | 8.03E−03 | 6 | 48 | LYD1010 | 0.70 | 1.12E−02 | 6 | 37 |
| LYD1011 | 0.82 | 1.79E−03 | 2 | 20 | LYD1011 | 0.76 | 7.15E−03 | 2 | 26 |
| LYD1011 | 0.70 | 1.62E−02 | 2 | 7 | LYD1011 | 0.75 | 8.06E−03 | 2 | 27 |
| LYD1011 | 0.77 | 5.88E−03 | 2 | 6 | LYD1011 | 0.79 | 3.49E−03 | 2 | 1 |
| LYD1011 | 0.73 | 1.69E−02 | 2 | 36 | LYD1011 | 0.74 | 8.99E−03 | 2 | 15 |
| LYD1011 | 0.71 | 2.10E−02 | 7 | 25 | LYD1011 | 0.75 | 1.31E−02 | 7 | 23 |
| LYD1011 | 0.73 | 1.69E−02 | 7 | 47 | LYD1011 | 0.86 | 7.26E−04 | 3 | 39 |
| LYD1011 | 0.75 | 5.30E−03 | 6 | 40 | LYD1017 | 0.73 | 6.65E−03 | 4 | 40 |
| LYD1017 | 0.75 | 7.87E−03 | 2 | 20 | LYD1017 | 0.71 | 1.53E−02 | 2 | 1 |
| LYD1017 | 0.71 | 9.84E−03 | 9 | 25 | LYD1017 | 0.83 | 8.40E−04 | 9 | 41 |
| LYD1017 | 0.76 | 3.89E−03 | 9 | 16 | LYD1017 | 0.86 | 3.22E−04 | 9 | 7 |
| LYD1017 | 0.71 | 9.40E−03 | 9 | 27 | LYD1017 | 0.77 | 3.35E−03 | 9 | 30 |
| LYD1017 | 0.85 | 9.49E−04 | 9 | 36 | LYD1017 | 0.77 | 3.69E−03 | 9 | 15 |
| LYD1017 | 0.74 | 9.15E−03 | 8 | 36 | LYD1017 | 0.75 | 8.26E−04 | 8 | 22 |
| LYD1017 | 0.72 | 7.96E−03 | 6 | 48 | LYD1019 | 0.73 | 6.94E−03 | 4 | 12 |
| LYD1019 | 0.72 | 1.19E−02 | 2 | 20 | LYD1019 | 0.74 | 9.95E−03 | 2 | 4 |
| LYD1019 | 0.85 | 1.01E−03 | 2 | 3 | LYD1019 | 0.78 | 4.36E−03 | 2 | 11 |
| LYD1019 | 0.74 | 8.68E−03 | 2 | 7 | LYD1019 | 0.79 | 4.03E−03 | 2 | 27 |
| LYD1019 | 0.70 | 1.63E−02 | 2 | 1 | LYD1019 | 0.72 | 1.30E−02 | 2 | 15 |
| LYD1019 | 0.76 | 1.73E−02 | 9 | 5 | LYD1019 | 0.73 | 2.65E−02 | 9 | 19 |
| LYD1019 | 0.79 | 6.42E−03 | 7 | 17 | LYD1019 | 0.72 | 1.34E−02 | 3 | 3 |
| LYD1019 | 0.75 | 8.20E−03 | 3 | 11 | LYD1019 | 0.75 | 5.38E−02 | 3 | 2 |
| LYD1019 | 0.73 | 7.51E−03 | 6 | 27 | | | | | |

Table 156. Provided are the correlations (R) between the genes expression levels in various tissues [Expression (Exp) sets, Table 146] and the phenotypic performance [yield, biomass, and plant architecture (as described in Tables 153-154 using the (Correlation vectors (Corr.) described in Table 147 under normal conditions across bean varieties.
P = p value.

### Example 16

### Production of Sorghum Transcriptome and High Throughput Correlation Analysis with Yield, Drought and Low Nitrogen Related Parameters Measured in Fields Using 65K Sorghum Oligonucleotide Micro-Arrays

[1272] In order to produce a high throughput correlation analysis between plant phenotype and gene expression level, the present inventors utilized a Sorghum oligonucleotide micro-array, produced by Agilent Technologies [World Wide Web (dot) chem. (dot) agilent (dot) com/Scripts/PDS (dot) asp?1Page=50879]. The array oligonucleotide represents about 65,000 Sorghum genes and transcripts. In order to define correlations between the levels of RNA expression with ABST, drought tolerance, low N tolerance and yield components or vigor related parameters, various plant characteristics of 36 different Sorghum inbreds and hybrids were analyzed under normal (regular) conditions, 35 Sorghum lines were analyzed under drought conditions and 34 Sorghum lines were analyzed under low N (nitrogen) conditions. All the lines were sent for RNA expression analysis. The correlation between the RNA levels and the characterized parameters was analyzed using Pearson correlation test [World Wide Web (dot) davidmlane (dot) com/hyperstat/A34739 (dot) html].

[1273] Experimental Procedures

[1274] 36 Sorghum varieties were grown in 5 repetitive plots, in field. Briefly, the growing protocol was as follows:

[1275] 1. Regular (normal) growth conditions: Sorghum plants were grown in the field using commercial fertilization and irrigation protocols, which include 549 m³ water per dunam (1000 square meters) per entire growth period and fertilization of 16 units of URAN® 21% (Nitrogen

[1276] Fertilizer Solution; PCS Sales, Northbrook, Ill., USA) (normal growth conditions).

[1277] 2. Drought conditions: Sorghum seeds were sown in soil and grown under normal condition until vegetative stage (49 days from sowing), drought treatment was imposed by irrigating plants with approximately 60% of the water applied for the normal treatment [315 m³ water per dunam (1000 square meters) per entire growth period].

[1278] 3. Low Nitrogen fertilization conditions: Sorghum plants were sown in soil and irrigated with as the normal conditions (549 m³ water per dunam (1000 square meters) per entire growth period). No fertilization of nitrogen was applied, whereas other elements were fertilized as in the normal conditions (Magnesium—405 gr. per dunam for three weeks).

[1279] Analyzed Sorghum tissues—All 36 Sorghum inbreds and hybrids were sample per each of the treatments. Tissues [Flag leaf, root and peduncle] representing different plant characteristics, were sampled and RNA was extracted as described above. Each micro-array expression information tissue type has received a Set ID as summarized in Table 157 below.

TABLE 157
Sorghum transcriptome expression sets in field experiment
Provided are the sorghum transcriptome expression
sets. Flag leaf = the leaf below the flower.

| Expression Set | Set ID |
|---|---|
| Flag leaf at grain filling stage under normal conditions | 1 |
| Peduncle at flowering stage under normal conditions | 2 |
| Root at seedling stage under normal conditions | 3 |
| Flag leaf at grain filling stage under drought conditions | 4 |
| Flag leaf at grain filling stage under low nitrogen conditions | 5 |

[1280] Sorghum yield components and vigor related parameters assessment—Plants were phenotyped as shown in Tables 158-160 below. Some of the following parameters were collected using digital imaging system:

[1281] Grains yield per dunam (kg)—At the end of the growing period all heads were collected (harvest). Heads were separately threshed and grains were weighted (grain yield). Grains yield per dunam was calculated by multiplying grain yield per m² by 1000 (dunam is 1000 m²).

[1282] Grains yield per plant (plot) (gr.)—At the end of the growing period all heads were collected (harvest). Heads were separately threshed and grains were weighted (grain yield). The average grain weight per plant was calculated by dividing the grain yield by the number of plants per plot.

[1283] Grains yield per head (gr.)—At the end of the growing period all heads were collected (harvest). Heads were separately threshed and grains were weighted (grain yield). Grains yield per head was calculated by dividing the grain yield by the number of heads.

[1284] Main head grains yield per plant (gr.)—At the end of the growing period all plants were collected (harvest). Main heads were threshed and grains were weighted. Main head grains yield per plant was calculated by dividing the grain yield of the main heads by the number of plants.

[1285] Secondary heads grains yield per plant (gr.)—At the end of the growing period all plants were collected (harvest). Secondary heads were threshed and grains were weighted. Secondary heads grain yield per plant was calculated by dividing the grain yield of the secondary heads by the number of plants.

[1286] Heads dry weight per dunam (kg)—At the end of the growing period heads of all plants were collected (harvest). Heads were weighted after oven dry (dry weight). Heads dry weight per dunam was calculated by multiplying grain yield per m² by 1000 (dunam is 1000 m²).

[1287] Average heads weight per plant at flowering (gr.)—At flowering stage heads of 4 plants per plot were collected. Heads were weighted after oven dry (dry weight), and divided by the number of plants.

[1288] Leaf carbon isotope discrimination at harvest (%)—isotopic ratio of ¹³C to ¹²C in plant tissue was compared to the isotopic ratio of ¹³C to ¹²C in the atmosphere

[1289] Yield per dunam/water until maturity (kg/lit)—was calculated according to Formula 42 (above).

[1290] Vegetative dry weight per plant/water until maturity (gr/lit)—was calculated according to Formula 42 above.

[1291] Total dry matter per plant at harvest/water until maturity (gr/lit)—was calculated according to Formula 44 above.

[1292] Yield/SPAD at grain filling (kg/SPAD units) was calculated according to Formula 47 above.

[1293] Grains number per dunam (num)—Grains yield per dunam divided by the average 1000 grain weight.

[1294] Grains per plant (num)—Grains yield per plant divided by the average 1000 grain weight.

[1295] Main head grains num per plant (num)—main head grain yield divided by the number of plants.

[1296] Heads weight per plant (gr.)—At the end of the growing period heads of selected plants were collected (harvest stage) from the rest of the plants in the plot. Heads were weighted after oven dry (dry weight), and average head weight per plant was calculated.

[1297] 1000 grain weight (gr.)—was calculated according to Formula 14 above.

[1298] 1000 grain weight filling rate (gr./day)—was calculated based on Formula 36 above.

[1299] Grain area (cm²)—At the end of the growing period the grains were separated from the head (harvest). A sample of ˜200 grains were weighted, photographed and images were processed using the below described image processing system. The grain area was measured from those images and was divided by the number of grains.

[1300] Grain Length and Grain width [cm]—A sample of ˜200 grains was weighted, photographed and images were processed using the below described image processing system. The sum of grain lengths and width (longest axis) was measured from those images and was divided by the number of grains.

[1301] Grain Perimeter [cm]—A sample of ˜200 grains were weighted, photographed and images were processed using the below described image processing system. The sum of grain perimeter was measured from those images and was divided by the number of grains.

[1302] Grain fill duration (num)—Duration of grain filling period was calculated by subtracting the number of days to flowering from the number of days to maturity.

[1303] Grain fill duration (GDD)—Duration of grain filling period according to the growing degree units (GDD) method. The accumulated GDD during the grain filling period was calculated by subtracting the Num days to Anthesis (GDD) from Num days to Maturity (GDD).

[1304] Yield per dunam filling rate (kg/day)—was calculated according to Formula 39 (using grain yield per dunam).

[1305] Yield per plant filling rate (gr./day)—was calculated according to Formula 39 (using grain yield per plant).

[1306] Head area (cm²)—At the end of the growing period (harvest) 6 plants main heads were photographed and images were processed using the below described image processing system. The head area was measured from those images and was divided by the number of plants.

[1307] Head length (cm)—At the end of the growing period (harvest) 6 plants main heads were photographed and images were processed using the below described image processing system. The head length (longest axis) was measured from those images and was divided by the number of plants.

[1308] Head width (cm)—At the end of the growing period (harvest) 6 plants main heads were photographed and images were processed using the below described image processing system. The head width (longest axis) was measured from those images and was divided by the number of plants.

[1309] Number days to flag leaf senescence (num)—the number of days from sowing till 50% of the plot arrives to Flag leaf senescence (above half of the leaves are yellow).

[1310] Number days to flag leaf senescence (GDD)—Number days to flag leaf senescence according to the growing degree units method. The accumulated GDD from sowing until flag leaf senescence.

[1311] % yellow leaves number at flowering (percentage)—At flowering stage, leaves of 4 plants per plot were collected. Yellow and green leaves were separately counted. Percent of yellow leaves at flowering was calculated for each plant by dividing yellow leaves number per plant by the overall number of leaves per plant and multiplying by 100.

[1312] % yellow leaves number at harvest (percentage)—At the end of the growing period (harvest) yellow and green leaves from 6 plants per plot were separately counted. Percent of the yellow leaves was calculated per each plant by dividing yellow leaves number per plant by the overall number of leaves per plant and multiplying by 100.

[1313] Leaf temperature at flowering (° celsius)—Leaf temperature was measured at flowering stage using Fluke IR thermometer 568 device. Measurements were done on 4 plants per plot on an open flag leaf.

[1314] Specific leaf area at flowering (cm²/gr)—was calculated according to Formula 37 above.

[1315] Flag leaf thickness at flowering (mm)—At the flowering stage, flag leaf thickness was measured for 4 plants per plot. Micrometer was used to measure the thickness of a flag leaf at an intermediate position between the border and the midrib.

[1316] Relative water content at flowering (percentage)—was calculated based on Formula 1 above.

[1317] Leaf water content at flowering (percentage)—was calculated based on Formula 49 above.

[1318] Stem water content at flowering (percentage)—was calculated based on Formula 48 above.

[1319] Total heads per dunam at harvest (number)—At the end of the growing period the total number of heads per plot was counted (harvest). Total heads per dunam was calculated by multiplying heads number per m² by 1000 (dunam is 1000 m²).

[1320] Heads per plant (num)—At the end of the growing period total number of heads were counted and divided by the total number plants.

[1321] Tillering per plant (num)—Tillers of 6 plants per plot were counted at harvest stage and divided by the number of plants.

[1322] Harvest index (plot) (ratio)—The harvest index was calculated using Formula 58 above.

[1323] Heads index (ratio)—Heads index was calculated using Formula 46 above.

[1324] Total dry matter per plant at flowering (gr.)—Total dry matter per plant was calculated at flowering. The vegetative portion above ground and all the heads dry weight of 4 plants per plot were summed and divided by the number of plants.

[1325] Total dry matter per plant (kg)—Total dry matter per plant at harvest was calculated by summing the average head dry weight and the average vegetative dry weight of 6 plants per plot.

[1326] Vegetative dry weight per plant at flowering (gr.)—At the flowering stage, vegetative material (excluding roots) of 4 plants per plot were collected and weighted after (dry weight) oven dry. The biomass per plant was calculated by dividing total biomass by the number of plants.

[1327] Vegetative dry weight per plant (kg)—At the harvest stage, all vegetative material (excluding roots) were collected and weighted after (dry weight) oven dry. Vegetative dry weight per plant was calculated by dividing the total biomass by the number of plants.

[1328] Plant height—Plants were characterized for height at harvest. In each measure, plants were measured for their height using a measuring tape. Height was measured from ground level to top of the longest leaf.

[1329] Plant height growth (cm/day)—The relative growth rate (RGR) of plant height was calculated based on Formula 3 above.

[1330] % Canopy coverage at flowering (percentage)—The % Canopy coverage at flowering was calculated based on Formula 32 above.

[1331] PAR_LAI (Photosynthetic active radiance—Leaf area index)—Leaf area index values were determined using an AccuPAR Ceptometer Model LP-80 and measurements were performed at flowering stage with three measurements per plot.

[1332] Leaves area at flowering (cm²)—Green leaves area of 4 plants per plot was measured at flowering stage. Measurement was performed using a Leaf area-meter.

[1333] SPAD at vegetative stage (SPAD unit)—Chlorophyll content was determined using a Minolta SPAD 502 chlorophyll meter and measurement was performed at vegetative stage. SPAD meter readings were done on fully developed leaves of 4 plants per plot by performing three measurements per leaf per plant.

[1334] SPAD at flowering (SPAD unit)—Chlorophyll content was determined using a Minolta SPAD 502 chlorophyll meter and measurement was performed at flowering stage. SPAD meter readings were done on fully developed leaves of 4 plants per plot by performing three measurements per leaf per plant.

[1335] SPAD at grain filling (SPAD unit)—Chlorophyll content was determined using a Minolta SPAD 502 chlorophyll meter and measurement was performed at grain filling stage. SPAD meter readings were done on fully developed leaves of 4 plants per plot by performing three measurements per leaf per plant.

[1336] RUE (Radiation use efficiency) (gr./% canopy coverage)—Total dry matter produced per intercepted PAR at flowering stage was calculated by dividing the average total dry matter per plant at flowering by the percent of canopy coverage.

[1337] Lower stem width at flowering (mm)—Lower stem width was measured at the flowering stage. Lower internodes from 4 plants per plot were separated from the plant and their diameter was measured using a caliber.

[1338] Upper stem width at flowering (mm)—Upper stem width was measured at flowering stage. Upper internodes from 4 plants per plot were separated from the plant and their diameter was measured using a caliber.

[1339] All stem volume at flowering (cm³)—was calculated based on Formula 50 above.

[1340] Number days to heading (num)—Number of days to heading was calculated as the number of days from sowing till 50% of the plot arrive heading.

[1341] Number days to heading (GDD)—Number days to heading according to the growing degree units method. The accumulated GDD from sowing until heading stage.

[1342] Number days to anthesis (num)—Number of days to flowering was calculated as the number of days from sowing till 50% of the plot arrive anthesis.

[1343] Number days to anthesis (GDD)—Number days to anthesis according to the growing degree units method. The accumulated GDD from sowing until anthesis stage.

[1344] Number days to maturity (GDD)—Number days to maturity according to the growing degree units method. The accumulated GDD from sowing until maturity stage.

[1345] N (Nitrogen) use efficiency (kg/kg)—was calculated based on Formula 51 above.

[1346] Total NUtE—was calculated based on Formula 53 above.

[1347] Grain NUtE—was calculated based on Formula 55 above.

[1348] NUpE (kg/kg)—was calculated based on Formula 52 above.

[1349] N (Nitrogen) harvest index (Ratio)—was calculated based on Formula 56 above.

[1350] % N (Nitrogen) in shoot at flowering—% N content of dry matter in the shoot at flowering.

[1351] % N (Nitrogen) in head at flowering—% N content of dry matter in the head at flowering.

[1352] % N in (Nitrogen) shoot at harvest—% N content of dry matter in the shoot at harvest.

[1353] % N (Nitrogen) in grain at harvest—% N content of dry matter in the grain at harvest.

[1354] % N (Nitrogen) in leaf at grain filling—% N content of dry matter in the shoot at grain filling.

[1355] % C (Carbon) in leaf at flowering—% C content of dry matter in the leaf at flowering.

[1356] % C (Carbon) in leaf at grain filling—% C content of dry matter in the leaf at grain filling.

[1357] Data parameters collected are summarized in Tables 158-160 herein below.

TABLE 158
Sorghum correlated parameters under normal conditions (vectors)
Provided are the Sorghum correlated
parameters (vectors). “kg” = kilograms;
“gr.” = grams; “RP” = Rest of plot; “SP” = Selected plants;
“lit” = liter; “ml”-milliliter; “cm” = centimeter;
“num” = number; “GDD”-Growing degree day;
“SPAD” = chlorophyll levels; “FW” = Plant Fresh
weight; “DW” = Plant Dry weight; “GF” = grain filling
growth stage; “F” = flowering stage; “H” = harvest
stage; “N”-Nitrogen; “NupE”-Nitrogen uptake
efficiency; “VDW” = vegetative dry weight; “TDM” =
Total dry matter. “RUE” = radiation use efficiency;
“RWC” = relative water content; “veg” = vegetative stage.

| Correlated parameter with | Correlation ID |
|---|---|
| Grains yield per dunam [kg] | 1 |
| Grains yield per plant (plot) [gr.] | 2 |
| Grains yield per head (RP) [gr.] | 3 |
| Grains number per dunam [num] | 4 |
| Grains per plant (plot) [num] | 5 |
| Main head grains yield per plant [gr.] | 6 |
| Main Heads DW (SP) [gr.] | 7 |
| Main head grains num per plant [num] | 8 |
| Secondary heads grains yield per plant [gr.] | 9 |
| Yield/SPAD (GF) [ratio] | 10 |
| Yield per dunam/water until maturity [kg/ml] | 11 |
| TDM (F)/water until flowering [gr./lit] | 12 |
| TDM (SP)/water until maturity [kg/lit] | 13 |
| VDW (F)/water until flowering [gr./lit] | 14 |
| VDW (SP)/water until maturity [gr./lit] | 15 |
| Head Area [cm²] | 16 |
| Head length [cm] | 17 |
| Head Width [cm] | 18 |
| Heads dry weight per dunam [kg] | 19 |
| Grain area [cm²] | 20 |
| Grain length [cm] | 21 |
| Grain Perimeter [cm] | 22 |
| Grain width [cm] | 23 |
| 1000 grain weight [gr.] | 24 |
| 1000 grain weight filling rate [gr./day] | 25 |
| Yield per dunam filling rate [kg/day] | 26 |
| Yield per plant filling rate [gr./day] | 27 |
| Grain fill duration [num] | 28 |
| Grain fill duration (GDD) | 29 |
| Number days to Anthesis [num] | 30 |
| Number days to Anthesis (GDD) | 31 |
| Number days to Flag leaf senescence [num] | 32 |
| Number days to Flag leaf senescence (GDD) | 33 |
| Number days to Heading (GDD) | 34 |
| Number days to Maturity (GDD) | 35 |
| Num days to Maturity (GDD) | 36 |
| % yellow leaves number (F) [%] | 37 |
| % yellow leaves number (H) [%] | 38 |
| Harvest index (plot) [ratio] | 39 |
| Heads index (SP) [Ratio] | 40 |
| Heads per plant (RP) [num] | 41 |
| Average heads weight per plant (F) [gr.] | 42 |
| Total Heads per dunam (H) [number] | 43 |
| Tillering per plant (SP) [number] | 44 |
| Total dry matter per plant (F) [gr.] | 45 |
| Total dry matter per plant (SP) [kg] | 46 |
| Vegetative DW per plant (F) [gr.] | 47 |
| Vegetative DW per plant (RP) [kg] | 48 |
| % Canopy coverage (F) [%] | 49 |
| Flag Leaf thickness (F) [mm] | 50 |
| Leaf carbon isotope discrimination (H) (%) | 51 |
| Leaf water content (F) [%] | 52 |
| RWC (F) [%] | 53 |
| Leaf temperature (F) [° C.] | 54 |
| Leaves area (F) [cm²] | 55 |
| Specific leaf area (F) [cm²/gr] | 56 |
| SPAD (F) [SPAD unit] | 57 |
| SPAD (GF) [SPAD unit] | 58 |
| PAR_LAI (F) [μmol m⁻² S⁻¹] | 59 |
| RUE [gr./% canopy coverage] | 60 |
| Plant height (H) [cm] | 61 |
| Plant height growth [cm/day] | 62 |
| Lower Stem width (F) [mm] | 63 |
| Upper Stem width (F) [mm] | 64 |
| Stem water content (F) [%] | 65 |
| All stem volume (F) [cm³] | 66 |
| % C in leaf (F) [%] | 67 |
| % C in leaf (GF) [%] | 68 |
| % N in grain (H) [%] | 69 |
| % N in head (F) [%] | 70 |
| % N in leaf (GF) [%] | 71 |
| % N in shoot (F) [%] | 72 |
| % N in shoot (H) [%] | 73 |
| Grain N utilization efficiency [ratio] | 74 |
| Total N utilization efficiency (H) [ratio] | 75 |
| N harvest index [ratio] | 76 |
| N use efficiency [ratio] | 77 |
| NupE (H) [ratio] | 78 |

TABLE 159
Sorghum correlated parameters under low N conditions (vectors)
Provided are the Sorghum correlated parameters
(vectors). “kg” = kilograms; “gr.” =
grams; “RP” = Rest of plot;
“SP” = Selected plants; “lit” = liter; “ml”-
milliliter; “cm” = centimeter; “num” = number;
“GDD”-Growing degree day;
“SPAD” = chlorophyll levels; “FW” = Plant Fresh weight; =
“DW” = Plant Dry weight; “GF” = grain filling growth stage;
“F” = flowering stage; “H” = harvest weight;
stage; “N”-Nitrogen; “NupE”-
Nitrogen uptake efficiency; “VDW” =
vegetative dry weight; “TDM” = Total dry
matter. “RUE” = radiation use efficiency;
“RWC” = relative water content; “veg” = vegetative stage.

| Correlated parameter with | Correlation ID |
|---|---|
| Grains yield per dunam [kg] | 1 |
| Grains yield per plant (plot) [gr.] | 2 |
| Grains yield per head (RP) [gr.] | 3 |
| Main head grains yield per plant [gr.] | 4 |
| Secondary heads grains yield per plant [gr.] | 5 |
| Heads dry weight per dunam [kg] | 6 |
| Average heads weight per plant (F) [gr.] | 7 |
| Leaf carbon isotope discrimination (H) (%) | 8 |
| Yield per dunam/water until maturity [kg/ml] | 9 |
| VDW (SP)/water until maturity [gr./lit] | 10 |
| TDM (SP)/water until maturity [kg/lit] | 11 |
| TDM (F)/water until flowering [gr./lit] | 12 |
| VDW (F)/water until flowering [gr./lit] | 13 |
| Yield/SPAD (GF) [ratio] | 14 |
| Grains number per dunam [num] | 15 |
| Grains per plant (plot) [num] | 16 |
| Main head grains num per plant [num] | 17 |
| 1000 grain weight [gr.] | 18 |
| Grain area [cm²] | 19 |
| Grain fill duration [num] | 20 |
| Grain fill duration (GDD) | 21 |
| Yield per dunam filling rate [kg/day] | 22 |
| Yield per plant filling rate [gr./day] | 23 |
| Head Area [cm²] | 24 |
| Number days to Flag leaf senescence [num] | 25 |
| Number days to Flag leaf senescence (GDD) | 26 |
| % yellow leaves number (F) [%] | 27 |
| % yellow leaves number (H) [%] | 28 |
| Leaf temperature (F) [° C.] | 29 |
| Specific leaf area (F) [cm²/gr.] | 30 |
| Flag Leaf thickness (F) [mm] | 31 |
| RWC (F) [%] | 32 |
| Leaf water content (F) [%] | 33 |
| Stem water content (F) [%] | 34 |
| Total Heads per dunam (H) [number] | 35 |
| Heads per plant (RP) [num] | 36 |
| Tillering per plant (SP) [number] | 37 |
| Harvest index (plot) [ratio] | 38 |
| Heads index (SP) [Ratio] | 39 |
| Total dry matter per plant (F) [gr.] | 40 |
| Total dry matter per plant (SP) [kg] | 41 |
| Vegetative DW per plant (F) [gr.] | 42 |
| Vegetative DW per plant (RP) [kg] | 43 |
| Plant height growth [cm/day] | 44 |
| % Canopy coverage (F) [%] | 45 |
| PAR_LAI (F) [μmol m⁻² S⁻¹] | 46 |
| Leaves area (F) [cm²] | 47 |
| SPAD_(veg) [SPAD unit] | 48 |
| SPAD (F) [SPAD unit] | 49 |
| SPAD (GF) [SPAD unit] | 50 |
| RUE [gr./% canopy coverage] | 51 |
| Lower Stem width (F) [mm] | 52 |
| Upper Stem width (F) [mm] | 53 |
| All stem volume (F) [cm³] | 54 |
| Number days to Heading (GDD) | 55 |
| Number days to Anthesis [num] | 56 |
| Number days to Anthesis (GDD) | 57 |
| Number days to Maturity (GDD) | 58 |
| N use efficiency [ratio] | 59 |
| Total N utilization efficiency (H) [ratio] | 60 |
| Grain N utilization efficiency [ratio] | 61 |
| NupE (H) [ratio] | 62 |
| N harvest index [ratio] | 63 |
| % N in shoot (F) [%] | 64 |
| % N in head (F) [%] | 65 |
| % N in shoot (H) [%] | 66 |
| % N in grain (H) [%] | 67 |

TABLE 160
Sorghum correlated parameters under drought conditions (vectors)
Provided are the Sorghum correlated parameters (vectors).
“kg” = kilograms; “gr.” =grams; “RP” =
Rest of plot; “SP” = Selected plants; “lit” = liter; “ml”-milliliter;
“cm” = centimeter; “num” = number; “GDD”-Growing degree
day; “SPAD” = chlorophyll levels; “FW” = Plant Fresh
weight; “DW” = Plant Dry weight; “GF” = grain filling
growth stage; “F” = flowering stage; “H” = harvest
stage; “N”-Nitrogen; “NupE”-Nitrogen uptake efficiency;
“VDW” = vegetative dry weight; “TDM” =
Total dry matter. “RUE” = radiation use efficiency;
“RWC” = relative water content; “veg” = vegetative stage.

| Correlated parameter with | Correlation ID |
|---|---|
| Grains yield per dunam [kg] | 1 |
| Grains yield per plant (plot) [gr.] | 2 |
| Grains yield per head (RP) [gr.] | 3 |
| Main head grains yield per plant [gr.] | 4 |
| Secondary heads grains yield per plant [gr.] | 5 |
| Heads dry weight per dunam [kg] | 6 |
| Average heads weight per plant (F) [gr.] | 7 |
| Leaf carbon isotope discrimination (H) (%) | 8 |
| Yield per dunam/water until maturity [kg/ml] | 9 |
| VDW (SP)/water until maturity [gr./lit] | 10 |
| TDM (SP)/water until maturity [kg/lit] | 11 |
| TDM (F)/water until flowering [gr./lit] | 12 |
| VDW (F)/water until flowering [gr./lit] | 13 |
| Yield/SPAD (GF) [ratio] | 14 |
| Grains number per dunam [num] | 15 |
| Grains per plant (plot) [num] | 16 |
| Main head grains num per plant [num] | 17 |
| 1000 grain weight [gr.] | 18 |
| Grain area [cm²] | 19 |
| Grain fill duration [num] | 20 |
| Grain fill duration (GDD) | 21 |
| Yield per dunam filling rate [kg/day] | 22 |
| Yield per plant filling rate [gr./day] | 23 |
| Head Area [cm²] | 24 |
| Number days to Flag leaf senescence [num] | 25 |
| Number days to Flag leaf senescence (GDD) | 26 |
| % yellow leaves number (F) [%] | 27 |
| % yellow leaves number (H) [%] | 28 |
| Leaf temperature (F) [° C.] | 29 |
| Specific leaf area (F) [cm²/gr.] | 30 |
| Flag Leaf thickness (F) [mm] | 31 |
| RWC (F) [%] | 32 |
| Leaf water content (F) [%] | 33 |
| Stem water content (F) [%] | 34 |
| Total Heads per dunam (H) [number] | 35 |
| Heads per plant (RP) [num] | 36 |
| Tillering per plant (SP) [number] | 37 |
| Harvest index (plot) [ratio] | 38 |
| Heads index (SP) [Ratio] | 39 |
| Total dry matter per plant (F) [gr.] | 40 |
| Total dry matter per plant (SP) [kg] | 41 |
| Vegetative DW per plant (F) [gr.] | 42 |
| Vegetative DW per plant (RP) [kg] | 43 |
| Plant height growth [cm/day] | 44 |
| % Canopy coverage (F) [%] | 45 |
| PAR_LAI (F) [μmol m⁻² S⁻¹] | 46 |
| Leaves area (F) [cm²] | 47 |
| SPAD_(veg) [SPAD unit] | 48 |
| SPAD (F) [SPAD unit] | 49 |
| SPAD (GF) [SPAD unit] | 50 |
| RUE [gr./% canopy coverage] | 51 |
| Lower Stem width (F) [mm] | 52 |
| Upper Stem width (F) [mm] | 53 |
| All stem volume (F) [cm³] | 54 |
| Number days to Heading (GDD) | 55 |
| Number days to Anthesis [num] | 56 |
| Number days to Anthesis (GDD) | 57 |
| Number days to Maturity (GDD) | 58 |

[1358] Experimental Results

[1359] Thirty-six different Sorghum inbreds and hybrids lines were grown and characterized for different parameters (Tables 158-160). The average for each of the measured parameters was calculated using the JMP software (Tables 161-175) and a subsequent correlation analysis was performed (Tables 176-178). Results were then integrated to the database.

TABLE 161
Measured parameters in Sorghum accessions under normal conditions

| | L | | | | | | |
|---|---|---|---|---|---|---|---|
| Corr. ID | L-1 | L-2 | L-3 | L-4 | L-5 | L-6 | L-7 |
| 1 | 818.90 | 893.20 | 861.80 | 912.80 | 661.80 | 612.20 | 421.0 |
| 2 | 42.40 | 48.60 | 48.50 | 56.20 | 48.10 | 39.50 | 23.50 |
| 3 | 30.30 | 32.80 | 25.40 | 21.40 | 37.30 | 33.20 | 17.00 |
| 4 | 27117640 | 27702000 | 25021020 | 29202780 | 21264980 | 25132460 | 20308520 |
| 5 | 1383.1 | 1685.2 | 1581.1 | 2265.6 | 1732.2 | 1513.9 | 1133.7 |
| 6 | 38.20 | 53.80 | 55.60 | 51.00 | 53.40 | 36.00 | 19.80 |
| 7 | 391.30 | 440.00 | 428.50 | 412.20 | 456.60 | 445.30 | 317.0 |
| 8 | 7933.6 | 10019.6 | 9690.6 | 9745.6 | 10705.8 | 11739.6 | 6052.2 |
| 9 | 2.45 | 7.00 | 2.20 | 30.99 | 5.72 | 2.84 | 2.33 |
| 10 | 24.00 | 33.70 | 34.00 | 48.10 | 38.00 | 28.40 | 23.70 |
| 11 | 1.62 | 1.92 | 1.85 | 1.85 | 1.42 | 1.26 | 0.90 |
| 12 | 0.67 | 0.46 | 0.28 | 0.28 | 0.54 | 0.28 | 0.45 |
| 13 | 0.38 | 0.47 | 0.43 | 0.48 | 0.47 | 0.30 | 0.37 |
| 14 | 0.62 | 0.39 | 0.24 | 0.25 | 0.41 | 0.24 | 0.42 |
| 15 | 0.03 | 0.03 | 0.03 | 0.03 | 0.03 | 0.01 | 0.02 |
| 16 | 134.40 | 96.70 | 112.80 | 101.70 | 106.10 | 84.10 | 105.6 |
| 17 | 29.80 | 19.10 | 23.10 | 19.60 | 18.20 | 23.80 | 19.60 |
| 18 | 5.62 | 6.40 | 6.14 | 6.43 | 7.42 | 4.43 | 6.74 |
| 19 | 1.05 | 1.06 | 0.96 | 1.01 | 0.80 | 0.77 | 0.75 |
| 20 | 0.12 | 0.13 | 0.13 | 0.14 | 0.13 | 0.11 | 0.09 |
| 21 | 0.44 | 0.49 | 0.46 | 0.51 | 0.45 | 0.41 | 0.48 |
| 22 | 1.31 | 1.40 | 1.36 | 1.42 | 1.36 | 1.22 | 1.31 |
| 23 | 0.37 | 0.38 | 0.38 | 0.38 | 0.39 | 0.35 | 0.29 |
| 24 | 29.80 | 32.00 | 33.80 | 31.30 | 30.00 | 24.10 | 18.40 |
| 25 | 0.79 | 0.90 | 1.02 | 0.89 | 1.03 | 0.76 | 0.81 |
| 26 | 23.40 | 27.60 | 27.80 | 28.20 | 23.90 | 20.00 | 17.90 |
| 27 | 1.11 | 1.88 | 1.86 | 2.54 | 2.10 | 1.13 | 0.93 |
| 28 | 35.00 | 32.40 | 31.00 | 32.40 | 27.60 | 32.80 | 23.40 |
| 29 | 459.60 | 407.90 | 396.80 | 423.60 | 358.80 | 414.60 | 305.60 |
| 30 | 89.2 | 83.0 | 85.8 | 88.4 | 88.8 | 84.2 | 93.40 |
| 31 | 777.5 | 709.7 | 740.6 | 768.4 | 773.0 | 725.7 | 831.9 |
| 32 | 141.00 | 119.00 | 125.50 | 139.00 | 117.20 | NA | 126.80 |
| 33 | 1469.5 | 1165.8 | 1254.9 | 1441.2 | 1142.7 | NA | 1272.0 |
| 34 | 85.60 | 75.60 | 83.00 | 84.00 | 88.00 | 76.00 | 88.50 |
| 35 | 739.40 | 625.30 | 709.00 | 721.10 | 763.80 | 629.60 | 769.50 |
| 36 | 1237.2 | 1117.6 | 1137.4 | 1191.9 | 1131.7 | 1137.4 | 1137.4 |
| 37 | 0.14 | 0.24 | 0.08 | 0.13 | 0.27 | 0.13 | 0.10 |
| 38 | 0.27 | 0.16 | 0.32 | 0.39 | 0.32 | 0.10 | 0.14 |
| 39 | 0.23 | 0.27 | 0.28 | 0.34 | 0.27 | 0.31 | 0.13 |
| 40 | 0.35 | 0.40 | 0.39 | 0.45 | 0.38 | 0.54 | 0.34 |
| 41 | 1.12 | 1.31 | 1.71 | 2.28 | 1.14 | 1.15 | 1.29 |
| 42 | 66.00 | 86.50 | 77.20 | 105.90 | 83.00 | 55.80 | 59.90 |
| 43 | 25950.0 | 25250.0 | 31350.0 | 37950.0 | 15917.6 | 16250.0 | 23200.0 |
| 44 | 1.23 | 3.28 | 4.13 | 3.17 | 1.10 | 2.33 | 3.07 |
| 45 | 198.50 | 120.90 | 77.80 | 83.10 | 159.60 | 70.70 | 143.30 |
| 46 | 0.19 | 0.22 | 0.20 | 0.24 | 0.22 | 0.14 | 0.17 |
| 47 | 181.50 | 103.20 | 68.00 | 73.00 | 121.90 | 59.50 | 132.00 |
| 48 | 0.10 | 0.10 | 0.11 | 0.09 | 0.10 | 0.08 | 0.13 |
| 49 | 87.30 | 90.10 | 75.70 | 75.60 | 76.10 | 69.90 | 84.40 |
| 50 | 0.18 | 0.14 | 0.14 | 0.16 | 0.13 | 0.19 | 0.14 |
| 51 | −12.86 | −13.20 | −13.12 | −12.83 | −13.16 | −13.05 | −13.16 |
| 52 | 31.70 | 29.20 | 30.40 | 29.60 | 30.40 | 30.00 | 29.80 |
| 53 | 66.00 | NA | 74.10 | 71.80 | 63.30 | 77.50 | 70.00 |
| 54 | 90.80 | 91.70 | 91.20 | 88.70 | 88.30 | 84.50 | 87.20 |
| 55 | 16514.4 | 12058.4 | 12787.0 | 9932.2 | 11459.3 | 9116.4 | 9023.2 |
| 56 | 137.5 | 148.3 | 164.8 | 175.8 | 162.4 | 150.5 | 110.2 |
| 57 | 56.90 | 52.50 | 49.20 | 55.10 | 48.20 | 53.30 | 48.90 |
| 58 | 56.30 | 56.30 | 53.30 | 59.10 | 52.00 | 54.20 | 47.00 |
| 59 | 5.34 | 5.58 | 4.42 | 3.76 | 3.62 | 4.01 | 4.92 |
| 60 | 2.27 | 1.34 | 1.03 | 1.11 | 2.10 | 1.07 | 1.96 |
| 61 | 119.0 | 158.2 | 149.5 | 185.9 | 296.2 | 107.9 | 285.8 |
| 62 | 1.24 | 2.55 | 2.04 | 2.01 | 2.76 | 1.12 | 2.18 |
| 63 | 20.00 | 15.50 | 14.20 | 18.40 | 16.00 | 16.40 | 15.40 |
| 64 | 11.28 | 9.93 | 8.12 | 10.66 | 9.86 | 9.02 | 8.27 |
| 65 | 53.80 | 77.80 | 79.80 | 78.50 | 67.20 | 78.00 | 71.90 |
| 66 | 23261.2 | 19941.6 | 14878.4 | 31092.4 | 39294.6 | 13029.4 | 33015.4 |
| 67 | NA | NA | NA | NA | NA | NA | 53.00 |
| 68 | NA | NA | NA | NA | NA | NA | 0.35 |
| 69 | 1.91 | NA | 1.62 | 2.09 | NA | 1.59 | NA |
| 70 | 2.32 | NA | 2.72 | 1.84 | NA | 1.97 | NA |
| 71 | NA | NA | NA | NA | NA | NA | 0.35 |
| 72 | 1.73 | NA | 1.41 | 1.30 | NA | 1.60 | NA |
| 73 | 1.08 | NA | 0.56 | 0.72 | NA | 1.11 | NA |
| 74 | 18.51 | NA | 35.87 | 31.06 | NA | 30.94 | NA |
| 75 | 91.30 | NA | 123.20 | 89.00 | NA | 93.70 | NA |
| 76 | 0.35 | NA | 0.58 | 0.65 | NA | 0.49 | NA |
| 77 | 45.50 | 49.60 | 47.90 | 50.70 | 36.80 | 34.00 | 23.40 |
| 78 | 1.91 | NA | 1.33 | 1.56 | NA | 1.10 | NA |

Table 161: Provided are the values of each of the parameters (as described above) measured in Sorghum accessions (“L” = Line) under normal conditions. Growth conditions are specified in the experimental procedure section.

TABLE 162
Measured parameters in additional Sorghum accessions under normal conditions

| | L | | | | | | |
|---|---|---|---|---|---|---|---|
| Corr. ID | L-8 | L-9 | L-10 | L-11 | L-12 | L-13 | L-14 |
| 1 | 154.3 | 663.3 | 457.0 | 473.8 | 257.0 | 664.8 | 297.9 |
| 2 | 9.60 | 43.50 | 31.40 | 44.40 | 14.50 | 39.60 | 25.50 |
| 3 | 8.60 | 27.90 | 30.80 | 39.50 | 9.20 | 29.00 | 15.10 |
| 4 | 6938386 | 26620980 | 23566280 | 16059440 | 10047874 | 24969700 | 15586667 |
| 5 | 442.0 | 1935.1 | 1613.3 | 1605.0 | 783.9 | 1522.3 | 1725.9 |
| 6 | 10.00 | 46.60 | 28.50 | 46.90 | 22.20 | 31.10 | 43.40 |
| 7 | 145.4 | 442.6 | 308.4 | 440.0 | 339.7 | 273.5 | 466.2 |
| 8 | 2700.8 | 11875.0 | 9496.2 | 10407.6 | 5596.8 | 8174.8 | 14343.0 |
| 9 | 0.11 | 4.37 | 0.21 | NA | 2.75 | 1.47 | 0.70 |
| 10 | 7.50 | 36.00 | 33.00 | 29.80 | 20.20 | 26.20 | 42.10 |
| 11 | 0.32 | 1.31 | 0.81 | 0.84 | 0.51 | 1.39 | 0.53 |
| 12 | 0.12 | 0.35 | 0.62 | 0.58 | 0.26 | 0.27 | 0.51 |
| 13 | 0.14 | 0.33 | 0.74 | 0.44 | 0.28 | 0.22 | 0.45 |
| 14 | 0.09 | 0.32 | 0.59 | 0.49 | 0.23 | 0.22 | 0.46 |
| 15 | 0.01 | 0.02 | 0.06 | 0.03 | 0.02 | 0.01 | 0.03 |
| 16 | 226.2 | 156.4 | 120.4 | 210.5 | 121.3 | 74.8 | 244.5 |
| 17 | 25.90 | 28.90 | 25.30 | 35.10 | 25.20 | 17.80 | 30.80 |
| 18 | 11.04 | 6.77 | 6.05 | 7.53 | 5.95 | 5.27 | 9.99 |
| 19 | 0.24 | 0.85 | 0.59 | 0.61 | 0.50 | 0.85 | 0.34 |
| 20 | 0.12 | 0.10 | 0.09 | 0.12 | 0.11 | 0.10 | 0.08 |
| 21 | 0.58 | 0.40 | 0.43 | 0.45 | 0.42 | 0.40 | 0.38 |
| 22 | 1.51 | 1.19 | 1.16 | 1.30 | 1.22 | 1.21 | 1.09 |
| 23 | 0.33 | 0.34 | 0.28 | 0.36 | 0.33 | 0.34 | 0.30 |
| 24 | 22.60 | 23.20 | 17.30 | 27.00 | 24.70 | 22.60 | 16.80 |
| 25 | 0.54 | 0.70 | 0.85 | 0.79 | 0.62 | 0.62 | 0.63 |
| 26 | 4.00 | 20.50 | 21.90 | 13.20 | 6.90 | 19.80 | 10.80 |
| 27 | 0.28 | 1.58 | 1.39 | 1.36 | 0.67 | 0.86 | 1.51 |
| 28 | 37.00 | 32.40 | 20.80 | 35.20 | 37.40 | 41.00 | 29.30 |
| 29 | 433.90 | 425.10 | 285.10 | 479.20 | 478.10 | 528.20 | 401.20 |
| 30 | 77.80 | 90.20 | 119.00 | 107.00 | 83.80 | 84.00 | 113.30 |
| 31 | 650.1 | 790.9 | 1167.9 | 1008.4 | 719.0 | 721.1 | 1091.8 |
| 32 | 112.60 | 148.80 | 149.20 | 152.20 | 148.70 | 121.30 | 152.00 |
| 33 | 1078.8 | 1581.4 | 1588.7 | 1630.5 | 1580.2 | 1198.4 | 1628.1 |
| 34 | 76.00 | 87.20 | NA | 102.00 | 75.20 | 79.00 | 102.00 |
| 35 | 630.50 | 756.10 | NA | 945.20 | 621.20 | 663.50 | 945.20 |
| 36 | 1084.0 | 1216.0 | 1453.0 | 1487.5 | 1197.2 | 1122.6 | 1493.0 |
| 37 | 0.00 | 0.06 | 0.15 | 0.13 | 0.18 | 0.10 | 0.12 |
| 38 | 0.17 | 0.58 | 0.55 | 0.32 | 0.23 | 0.04 | 0.13 |
| 39 | 0.17 | 0.30 | 0.06 | 0.18 | 0.17 | 0.29 | 0.15 |
| 40 | 0.41 | 0.49 | 0.13 | 0.31 | 0.48 | 0.44 | 0.32 |
| 41 | 1.04 | 1.40 | 0.95 | 1.00 | 1.32 | 1.26 | 1.43 |
| 42 | 24.70 | 80.70 | 52.20 | 75.00 | 62.50 | 46.60 | 79.50 |
| 43 | 17500.0 | 22300.0 | 14750.0 | 11450.0 | 24700.0 | 21250.0 | 18694.4 |
| 44 | 1.43 | 2.93 | 1.70 | 2.23 | 3.27 | 2.13 | 1.94 |
| 45 | 26.00 | 108.50 | 292.90 | 232.70 | 72.50 | 68.40 | 233.20 |
| 46 | 0.06 | 0.17 | 0.42 | 0.25 | 0.13 | 0.11 | 0.25 |
| 47 | 19.20 | 96.50 | 278.50 | 197.10 | 63.70 | 58.10 | 209.20 |
| 48 | 0.03 | 0.07 | 0.47 | 0.18 | 0.06 | 0.08 | 0.13 |
| 49 | NA | 89.50 | 95.10 | 92.80 | 67.30 | 80.40 | 72.20 |
| 50 | NA | 0.18 | 0.15 | 0.21 | 0.18 | 0.20 | 0.17 |
| 51 | −13.47 | −12.83 | −12.99 | −13.38 | −12.59 | −13.14 | NA |
| 52 | NA | 29.50 | 31.40 | 28.70 | 29.80 | 29.70 | 29.50 |
| 53 | 70.20 | 73.20 | 71.10 | 69.70 | 80.10 | 75.60 | 70.60 |
| 54 | 91.50 | 84.00 | 85.90 | 89.00 | 85.50 | 88.00 | 89.70 |
| 55 | 3520.4 | 12434.2 | 18050.2 | 16771.2 | 7915.8 | 8866.2 | 18167.7 |
| 56 | 191.1 | 123.3 | 143.9 | 118.6 | 171.9 | 154.9 | 121.1 |
| 57 | NA | 57.60 | 53.60 | 59.80 | 50.90 | 54.50 | 58.90 |
| 58 | 60.10 | 59.90 | 50.50 | 58.60 | 51.90 | 52.70 | 57.10 |
| 59 | NA | 6.04 | 7.09 | 3.90 | 2.94 | 4.60 | 2.36 |
| 60 | NA | 1.21 | 3.13 | 2.50 | 1.09 | 0.85 | 3.22 |
| 61 | 165.5 | 117.5 | 359.6 | 179.8 | 100.9 | 94.4 | 91.9 |
| 62 | 2.84 | 0.82 | 1.49 | 1.20 | 1.11 | 1.20 | 0.62 |
| 63 | 9.30 | 20.50 | 21.90 | 22.60 | 17.90 | 13.70 | 24.70 |
| 64 | 7.78 | 9.95 | 7.34 | 11.88 | 9.94 | 9.19 | 9.46 |
| 65 | 83.40 | 72.30 | 74.50 | 63.20 | 76.20 | 75.90 | 56.00 |
| 66 | 9480.2 | 21372.2 | 57928.1 | 42021.2 | 15340.9 | 10035.2 | 20685.1 |
| 67 | NA | NA | NA | 55.00 | 54.00 | NA | NA |
| 68 | NA | NA | NA | 0.46 | 0.58 | NA | NA |
| 69 | NA | 1.80 | NA | NA | NA | NA | NA |
| 70 | NA | 1.37 | NA | NA | NA | NA | NA |
| 71 | NA | NA | NA | 0.46 | 0.58 | NA | NA |
| 72 | NA | 1.80 | NA | NA | NA | NA | NA |
| 73 | NA | 1.15 | NA | NA | NA | NA | NA |
| 74 | NA | 26.69 | NA | NA | NA | NA | NA |
| 75 | NA | 88.50 | NA | NA | NA | NA | NA |
| 76 | NA | 0.48 | NA | NA | NA | NA | NA |
| 77 | 8.60 | 36.90 | 25.40 | 26.30 | 14.30 | 36.90 | 16.60 |
| 78 | NA | 1.53 | NA | NA | NA | NA | NA |

Table 162: Provided are the values of each of the parameters (as described above) measured in Sorghum accessions (“L” = Line) under normal conditions. Growth conditions are specified in the experimental procedure section.

TABLE 163
Measured parameters in additional Sorghum accessions under normal conditions

| | L | | | | | | |
|---|---|---|---|---|---|---|---|
| Corr. ID | L-15 | L-16 | L-17 | L-18 | L-19 | L-20 | L-21 |
| 1 | 731.80 | 609.80 | 378.10 | 470.80 | 291.50 | 496.60 | 611.00 |
| 2 | 48.60 | 33.60 | 20.60 | 37.80 | 20.40 | 38.10 | 37.60 |
| 3 | 33.00 | 29.50 | 14.90 | 22.20 | 8.10 | 29.60 | 30.10 |
| 4 | 23737260 | 25534520 | 19319316 | 12802788 | 14629600 | 16643442 | 31788060 |
| 5 | 1593.50 | 1652.40 | 1092.10 | 1093.50 | 975.90 | 1365.50 | 1909.30 |
| 6 | 43.20 | 43.20 | 18.00 | 31.80 | 13.00 | 37.80 | 32.50 |
| 7 | 365.0 | 389.7 | 195.3 | 321.2 | 175.8 | 366.9 | 267.5 |
| 8 | 9325.6 | 11705.4 | 5959.4 | 5093.2 | 4119.5 | 7974.0 | 10851.6 |
| 9 | 0.95 | 0.25 | 5.63 | 10.96 | 5.36 | 5.89 | 1.70 |
| 10 | 28.80 | 39.40 | 20.50 | 19.30 | 18.40 | 27.80 | 36.20 |
| 11 | 1.57 | 1.20 | 0.81 | 0.94 | 0.53 | 1.07 | 1.31 |
| 12 | 0.26 | 0.45 | 0.27 | 0.79 | 0.41 | 0.26 | 0.56 |
| 13 | 0.28 | 0.25 | 0.27 | 0.45 | 0.28 | 0.28 | 0.28 |
| 14 | 0.23 | 0.40 | 0.24 | 0.72 | 0.34 | 0.21 | 0.51 |
| 15 | 0.01 | 0.01 | 0.02 | 0.03 | 0.02 | 0.01 | 0.02 |
| 16 | 82.00 | 106.10 | 129.30 | 86.30 | 83.30 | 114.00 | 90.00 |
| 17 | 17.10 | 21.40 | 28.70 | 21.30 | 17.50 | 23.90 | 26.00 |
| 18 | 6.07 | 6.26 | 5.58 | 4.88 | 5.87 | 5.95 | 4.27 |
| 19 | 0.86 | 0.76 | 0.65 | 0.60 | 0.62 | 0.52 | 0.72 |
| 20 | 0.12 | 0.12 | 0.08 | 0.15 | 0.09 | 0.12 | 0.09 |
| 21 | 0.43 | 0.44 | 0.39 | 0.51 | 0.44 | 0.43 | 0.39 |
| 22 | 1.31 | 1.29 | 1.11 | 1.46 | 1.20 | 1.31 | 1.13 |
| 23 | 0.38 | 0.36 | 0.30 | 0.39 | 0.30 | 0.37 | 0.31 |
| 24 | 28.20 | 21.80 | 16.90 | 37.00 | 18.20 | 28.80 | 17.40 |
| 25 | 0.96 | 0.87 | 0.69 | 1.13 | 0.64 | 0.92 | 0.78 |
| 26 | 25.20 | 24.20 | 14.90 | 15.90 | 10.40 | 16.40 | 27.20 |
| 27 | 1.50 | 1.72 | 0.81 | 1.45 | 0.63 | 1.52 | 1.50 |
| 28 | 29.00 | 25.20 | 26.20 | 29.80 | 29.80 | 29.80 | 23.20 |
| 29 | 364.00 | 331.60 | 341.90 | 390.90 | 395.40 | 385.10 | 303.80 |
| 30 | 84.60 | 98.00 | 90.60 | 94.20 | 101.80 | 88.20 | 94.40 |
| 31 | 728.40 | 892.50 | 795.50 | 843.10 | 940.90 | 769.50 | 845.00 |
| 32 | 124.60 | NA | NA | 152.00 | 146.50 | NA | 137.00 |
| 33 | 1242.8 | NA | NA | 1628.1 | 1548.8 | NA | 1412.0 |
| 34 | 82.00 | 95.00 | 84.60 | 87.20 | 98.00 | 78.20 | 88.00 |
| 35 | 697.4 | 853.2 | 728.4 | 755.8 | 892.4 | 655.2 | 763.8 |
| 36 | 1092.4 | 1224.0 | 1137.4 | 1234.0 | 1336.3 | 1154.5 | 1148.8 |
| 37 | 0.19 | 0.23 | 0.25 | 0.04 | 0.17 | 0.02 | 0.15 |
| 38 | 0.14 | 0.21 | 0.27 | 0.24 | 0.30 | 0.14 | 0.04 |
| 39 | 0.32 | 0.32 | 0.19 | 0.18 | 0.11 | 0.35 | 0.26 |
| 40 | 0.47 | 0.52 | 0.30 | 0.33 | 0.28 | 0.51 | 0.35 |
| 41 | 1.09 | 1.00 | 1.24 | 1.53 | 2.06 | 1.03 | 1.12 |
| 42 | 61.10 | 65.20 | 36.50 | 73.30 | 43.40 | 69.60 | 45.40 |
| 43 | 19607.1 | 18300.0 | 23150.0 | 22687.5 | 43348.2 | 14873.5 | 18625.7 |
| 44 | 1.80 | 1.37 | 1.89 | 4.50 | 5.12 | 2.70 | 1.10 |
| 45 | 74.40 | 153.10 | 81.30 | 258.10 | 151.90 | 76.80 | 187.00 |
| 46 | 0.13 | 0.13 | 0.13 | 0.23 | 0.16 | 0.13 | 0.13 |
| 47 | 64.80 | 139.00 | 73.60 | 233.40 | 127.80 | 63.30 | 170.40 |
| 48 | 0.08 | 0.06 | 0.05 | 0.14 | 0.13 | 0.06 | 0.08 |
| 49 | 72.70 | 66.30 | 90.90 | 68.50 | 93.00 | 62.20 | 85.50 |
| 50 | 0.17 | 0.20 | 0.14 | 0.21 | 0.16 | 0.20 | 0.19 |
| 51 | −12.99 | −12.73 | −13.15 | −13.29 | −13.00 | −13.19 | −12.82 |
| 52 | 31.30 | 31.20 | 30.20 | 30.90 | 28.90 | 30.70 | 30.50 |
| 53 | 75.30 | 63.10 | 71.90 | 76.10 | 66.50 | 78.50 | 76.40 |
| 54 | 91.90 | 91.40 | 83.60 | 90.90 | 87.90 | 90.20 | 89.50 |
| 55 | 16019.6 | 20833.0 | 13190.4 | 16299.5 | 12096.8 | 11573.2 | 11655.8 |
| 56 | 179.10 | 183.00 | 159.20 | 157.50 | 111.30 | 163.50 | 142.60 |
| 57 | 52.60 | 49.10 | 53.90 | 61.50 | 51.40 | 51.60 | 47.90 |
| 58 | 54.30 | 49.80 | 54.80 | 61.80 | 54.20 | 55.60 | 51.60 |
| 59 | 3.76 | 3.53 | 6.38 | 3.87 | 3.98 | 3.05 | 4.78 |
| 60 | 1.06 | 2.42 | 0.89 | 3.96 | 1.63 | 1.32 | 2.27 |
| 61 | 110.30 | 74.70 | 122.00 | 113.20 | 166.90 | 74.60 | 86.70 |
| 62 | 1.41 | 0.86 | 0.90 | 1.22 | 1.52 | 0.73 | 0.67 |
| 63 | 16.10 | 20.90 | 16.90 | 22.30 | 16.30 | 19.20 | 19.10 |
| 64 | 8.00 | 11.43 | 7.69 | 12.31 | 6.85 | 10.76 | 7.71 |
| 65 | 82.20 | 54.70 | 76.70 | 48.30 | 62.80 | 81.00 | 29.10 |
| 66 | 12649.4 | 15432.6 | 14500.7 | 26609.8 | 17621.5 | 13556.3 | 12018.1 |
| 67 | 54.00 | NA | NA | NA | NA | 52.00 | 53.00 |
| 68 | 0.49 | NA | NA | NA | NA | 0.81 | 1.10 |
| 69 | NA | NA | NA | NA | NA | NA | NA |
| 70 | NA | NA | NA | NA | NA | NA | NA |
| 71 | 0.49 | NA | NA | NA | NA | 0.81 | 1.10 |
| 72 | NA | NA | NA | NA | NA | NA | NA |
| 73 | NA | NA | NA | NA | NA | NA | NA |
| 74 | NA | NA | NA | NA | NA | NA | NA |
| 75 | NA | NA | NA | NA | NA | NA | NA |
| 76 | NA | NA | NA | NA | NA | NA | NA |
| 77 | 40.70 | 33.90 | 21.00 | 26.20 | 16.20 | 27.60 | 33.90 |
| 78 | NA | NA | NA | NA | NA | NA | NA |

Table 163: Provided are the values of each of the parameters (as described above) measured in Sorghum accessions (“L” = Line) under normal conditions. Growth conditions are specified in the experimental procedure section.

TABLE 164
Measured parameters in additional Sorghum accessions under normal conditions

| | L | | | | | | |
|---|---|---|---|---|---|---|---|
| Corr. ID | L-22 | L-23 | L-24 | L-25 | L-26 | L-27 | L-28 |
| 1 | 307.60 | 221.00 | 685.90 | 792.00 | 449.80 | 626.10 | 497.10 |
| 2 | 25.30 | 15.70 | 45.70 | 72.50 | 29.00 | 49.50 | 38.60 |
| 3 | 13.30 | 8.40 | 37.60 | 48.30 | 25.10 | 31.60 | 30.90 |
| 4 | 13130962 | 6653443 | 23933120 | 24881460 | 19456260 | 19639820 | 21045320 |
| 5 | 1029.3 | 672.3 | 1909.6 | 2673.4 | 1325.1 | 1602.3 | 1551.0 |
| 6 | 16.80 | 17.50 | 62.20 | 89.30 | 30.00 | 46.80 | 33.50 |
| 7 | 141.20 | 216.40 | 606.60 | 840.50 | 314.90 | 366.90 | 432.60 |
| 8 | 4537.2 | 3438.6 | 13794.6 | 18913.2 | 8352.6 | 9475.8 | 8627.8 |
| 9 | 4.10 | 1.83 | NA | 5.05 | 1.25 | NA | NA |
| 10 | 20.60 | 11.50 | 44.00 | 53.30 | 25.10 | 31.30 | 26.60 |
| 11 | 0.66 | 0.39 | 1.22 | 1.62 | 0.96 | 1.25 | 1.07 |
| 12 | 0.24 | 0.72 | 0.63 | 0.46 | 0.25 | NA | 0.28 |
| 13 | 0.15 | 0.44 | 0.53 | 0.49 | 0.25 | 0.35 | 0.27 |
| 14 | 0.20 | 0.65 | 0.59 | 0.41 | 0.20 | NA | 0.21 |
| 15 | 0.01 | 0.04 | 0.04 | 0.02 | 0.01 | 0.02 | 0.01 |
| 16 | 55.00 | 200.50 | 136.50 | 192.10 | 85.90 | 119.30 | 151.30 |
| 17 | 19.50 | 25.70 | 25.30 | 23.70 | 20.50 | 24.80 | 27.10 |
| 18 | 3.47 | 9.32 | 6.83 | 10.25 | 5.17 | 6.12 | 7.02 |
| 19 | 0.36 | 0.42 | 0.98 | 0.90 | 0.64 | 0.75 | 0.83 |
| 20 | 0.10 | 0.13 | 0.12 | 0.13 | 0.10 | 0.13 | 0.11 |
| 21 | 0.43 | 0.48 | 0.46 | 0.47 | 0.41 | 0.44 | 0.44 |
| 22 | 1.23 | 1.40 | 1.31 | 1.37 | 1.22 | 1.34 | 1.27 |
| 23 | 0.33 | 0.38 | 0.34 | 0.38 | 0.34 | 0.38 | 0.35 |
| 24 | 21.40 | 28.00 | 27.00 | 29.00 | 20.90 | 29.40 | 22.50 |
| 25 | 0.53 | 0.84 | 1.05 | 0.94 | 0.64 | 1.42 | 0.75 |
| 26 | 7.60 | 6.50 | 27.80 | 25.60 | 14.00 | 30.60 | 17.40 |
| 27 | 0.51 | 0.58 | 2.50 | 2.90 | 0.92 | 2.42 | 1.17 |
| 28 | 40.60 | 35.20 | 25.00 | 31.60 | 33.00 | 20.40 | 28.60 |
| 29 | 500.30 | 476.60 | 343.10 | 415.10 | 423.70 | 268.10 | 363.80 |
| 30 | 74.40 | 106.00 | 115.20 | 89.60 | 85.40 | 102.00 | 86.20 |
| 31 | 611.90 | 996.10 | 1115.40 | 782.10 | 736.10 | 945.20 | 745.50 |
| 32 | NA | 148.60 | 143.00 | 132.00 | NA | 150.80 | 113.00 |
| 33 | NA | 1579.1 | 1498.6 | 1343.5 | NA | 1610.7 | 1084.0 |
| 34 | 67.80 | 102.00 | 102.00 | 85.80 | 81.60 | 97.00 | 83.00 |
| 35 | 530.20 | 945.20 | 945.20 | 740.60 | 693.30 | 879.20 | 709.00 |
| 36 | 1112.2 | 1472.8 | 1458.5 | 1197.2 | 1159.8 | 1213.4 | 1109.2 |
| 37 | 0.04 | 0.13 | 0.25 | 0.13 | 0.11 | 0.33 | 0.08 |
| 38 | 0.06 | 0.41 | 0.79 | 0.19 | 0.15 | 0.64 | 0.14 |
| 39 | 0.27 | 0.08 | 0.17 | 0.37 | 0.25 | 0.24 | 0.25 |
| 40 | 0.42 | 0.20 | 0.34 | 0.59 | 0.45 | 0.36 | 0.59 |
| 41 | 1.82 | 2.18 | 1.06 | 1.29 | 1.02 | 1.44 | 1.14 |
| 42 | 28.40 | 47.40 | 101.10 | 142.90 | 53.40 | 63.50 | 72.10 |
| 43 | 22218.2 | 27333.3 | 15850.0 | 13892.9 | 16300.0 | 17150.0 | 14650.0 |
| 44 | 3.50 | 4.83 | 1.00 | 1.20 | 2.07 | 1.20 | 1.00 |
| 45 | 49.90 | 292.60 | 293.90 | 134.60 | 70.70 | NA | 81.50 |
| 46 | 0.07 | 0.25 | 0.30 | 0.24 | 0.12 | 0.18 | 0.12 |
| 47 | 41.30 | 265.00 | 276.40 | 119.10 | 55.60 | NA | 61.20 |
| 48 | 0.06 | 0.23 | 0.22 | 0.09 | 0.06 | 0.15 | 0.09 |
| 49 | 76.00 | 92.10 | 88.40 | 62.20 | 54.70 | 94.40 | 57.50 |
| 50 | NA | 0.16 | 0.18 | 0.15 | 0.15 | 0.17 | 0.18 |
| 51 | −12.72 | −13.08 | −12.41 | −13.14 | −12.83 | −12.68 | −13.00 |
| 52 | 28.60 | 29.20 | 28.60 | 30.00 | 31.50 | 31.70 | 31.50 |
| 53 | NA | 67.30 | 70.00 | 68.20 | 72.90 | 67.30 | 76.10 |
| 54 | 94.60 | 88.70 | 89.20 | 89.30 | 90.50 | 91.90 | 91.30 |
| 55 | 6785.6 | 14171.8 | 21989.2 | 13038.2 | 10639.6 | NA | 14682.2 |
| 56 | 166.90 | 108.40 | 139.90 | 164.90 | 164.40 | NA | 156.70 |
| 57 | 52.70 | 54.70 | 52.50 | 57.70 | 53.50 | 50.20 | 54.90 |
| 58 | 47.20 | 56.00 | 52.40 | 57.60 | 56.60 | 52.30 | 54.40 |
| 59 | 3.56 | 4.34 | 3.26 | 2.88 | 2.37 | 7.28 | 2.81 |
| 60 | 0.66 | 3.19 | 3.36 | 2.57 | 1.45 | NA | 1.45 |
| 61 | 79.20 | 187.20 | 241.50 | 134.70 | 54.80 | 135.40 | 85.30 |
| 62 | 0.97 | 1.15 | 1.12 | 1.60 | 0.78 | 0.97 | 0.87 |
| 63 | 15.00 | 20.30 | 21.90 | 18.90 | 18.90 | 23.20 | 22.00 |
| 64 | 8.24 | 8.41 | 11.43 | 10.41 | 9.62 | 11.29 | 11.57 |
| 65 | NA | 57.30 | 68.50 | 53.50 | 79.60 | NA | 84.60 |
| 66 | 8397.1 | 28819.2 | 52862.1 | 23299.4 | 8716.9 | NA | 18934.9 |
| 67 | NA | 52.00 | NA | NA | NA | NA | 52.00 |
| 68 | NA | 1.08 | NA | NA | NA | NA | 0.56 |
| 69 | NA | NA | 1.54 | 1.60 | NA | NA | NA |
| 70 | NA | NA | 1.86 | 1.65 | NA | NA | NA |
| 71 | NA | 1.08 | NA | NA | NA | NA | 0.56 |
| 72 | NA | NA | 0.80 | 1.29 | NA | NA | NA |
| 73 | NA | NA | 0.41 | 0.83 | NA | NA | NA |
| 74 | NA | NA | 35.13 | 39.99 | NA | NA | NA |
| 75 | NA | NA | 169.70 | 105.90 | NA | NA | NA |
| 76 | NA | NA | 0.54 | 0.64 | NA | NA | NA |
| 77 | 17.10 | 12.30 | 38.10 | 44.00 | 25.00 | 34.80 | 27.60 |
| 78 | NA | NA | 1.21 | 1.09 | NA | NA | NA |

Table 164: Provided are the values of each of the parameters (as described above) measured in Sorghum accessions (“L” = Line) under normal conditions. Growth conditions are specified in the experimental procedure section.

TABLE 165
Measured parameters in additional Sorghum accessions under normal conditions

| | L | | | | | | | |
|---|---|---|---|---|---|---|---|---|
| Corr. ID | Line-29 | Line-30 | Line-31 | Line-32 | Line-33 | Line-34 | Line-35 | Line-36 |
| 1 | 693.90 | 663.00 | 668.80 | 861.90 | 904.60 | 757.30 | 874.20 | 653.20 |
| 2 | 45.90 | 43.30 | 39.80 | 69.80 | 64.30 | 56.90 | 56.40 | 45.00 |
| 3 | 35.50 | 35.60 | 30.00 | 56.00 | 52.70 | 46.20 | 48.70 | 27.20 |
| 4 | 25439325 | 22595225 | 23516220 | 35903040 | 35910300 | 30637940 | 37887500 | 22720400 |
| 5 | 1803.8 | 1356.6 | 1506.4 | 2934.8 | 2997.3 | 2366.6 | 2463.5 | 1855.1 |
| 6 | 50.80 | 34.00 | 40.90 | 65.70 | 79.80 | 57.30 | 62.70 | 56.60 |
| 7 | 439.60 | 323.70 | 352.50 | 607.50 | 735.20 | 525.20 | 556.20 | 485.10 |
| 8 | 11785.0 | 7149.5 | 9080.2 | 17551.0 | 15911.0 | 14725.2 | 13484.6 | 12126.6 |
| 9 | 0.55 | 0.41 | 6.98 | 3.44 | 6.65 | 1.21 | NA | 7.50 |
| 10 | 38.00 | 22.00 | 32.70 | 54.30 | 58.90 | 46.10 | 50.50 | 39.90 |
| 11 | 1.49 | 1.42 | 1.44 | 1.74 | 1.81 | 1.52 | 1.77 | 1.29 |
| 12 | 0.33 | 0.27 | 0.29 | 1.23 | 1.10 | 0.81 | 0.48 | 0.75 |
| 13 | 0.30 | 0.24 | 0.27 | 0.51 | 0.46 | 0.40 | 0.40 | 0.79 |
| 14 | 0.26 | 0.21 | 0.24 | 1.14 | 0.97 | 0.76 | 0.41 | 0.67 |
| 15 | 0.01 | 0.01 | 0.01 | 0.03 | 0.02 | 0.02 | 0.02 | 0.06 |
| 16 | 115.10 | 141.70 | 99.00 | 174.10 | 245.30 | 195.00 | 180.40 | 136.00 |
| 17 | 24.10 | 29.90 | 22.90 | 32.20 | 37.50 | 33.00 | 34.30 | 25.10 |
| 18 | 5.96 | 5.97 | 5.43 | 6.68 | 8.27 | 7.74 | 6.56 | 6.78 |
| 19 | 0.82 | 0.81 | 0.85 | 1.03 | 1.01 | 0.97 | 1.14 | 0.79 |
| 20 | 0.11 | 0.12 | 0.11 | 0.10 | 0.11 | 0.11 | 0.10 | 0.12 |
| 21 | 0.42 | 0.45 | 0.43 | 0.41 | 0.43 | 0.42 | 0.41 | 0.45 |
| 22 | 1.25 | 1.32 | 1.26 | 1.21 | 1.27 | 1.25 | 1.22 | 1.30 |
| 23 | 0.35 | 0.36 | 0.35 | 0.34 | 0.36 | 0.36 | 0.34 | 0.35 |
| 24 | 25.90 | 28.40 | 26.80 | 21.80 | 25.40 | 23.50 | 22.60 | 28.30 |
| 25 | 0.59 | 0.63 | 0.63 | 0.82 | 0.70 | 0.75 | 0.71 | 0.79 |
| 26 | 16.30 | 15.60 | 16.50 | 32.20 | 27.40 | 25.10 | 27.80 | 20.00 |
| 27 | 1.20 | 0.80 | 1.12 | 2.50 | 2.40 | 1.92 | 2.01 | 1.84 |
| 28 | 42.50 | 42.50 | 40.20 | 26.80 | 32.50 | 30.00 | 31.40 | 33.40 |
| 29 | 525.90 | 525.90 | 493.60 | 351.90 | 425.10 | 394.90 | 413.20 | 438.20 |
| 30 | 74.0 | 74.0 | 74.0 | 94.0 | 88.5 | 93.0 | 90.0 | 92.0 |
| 31 | 607.2 | 607.2 | 607.2 | 840.0 | 769.5 | 826.6 | 786.8 | 814.0 |
| 32 | NA | NA | NA | 146.20 | NA | NA | NA | 141.30 |
| 33 | NA | NA | NA | 1544.8 | NA | NA | NA | 1473.8 |
| 34 | 69.70 | 68.50 | 70.50 | 88.50 | 83.50 | 87.20 | 87.20 | 88.40 |
| 35 | 563.90 | 537.20 | 591.00 | 769.50 | 715.10 | 756.10 | 756.10 | 768.40 |
| 36 | 1133.1 | 1133.1 | 1100.8 | 1191.9 | 1194.6 | 1221.5 | 1200.0 | 1252.2 |
| 37 | 0.09 | 0.13 | 0.30 | 0.17 | 0.03 | 0.09 | 0.24 | 0.13 |
| 38 | 0.00 | 0.02 | 0.17 | 0.26 | 0.12 | 0.15 | 0.23 | 0.26 |
| 39 | 0.36 | 0.35 | 0.32 | 0.28 | 0.31 | 0.31 | 0.31 | 0.14 |
| 40 | 0.55 | 0.58 | 0.55 | 0.47 | 0.56 | 0.46 | 0.47 | 0.22 |
| 41 | 1.15 | 1.12 | 1.22 | 1.06 | 1.14 | 1.10 | 1.00 | 1.46 |
| 42 | 77.50 | 56.50 | 69.50 | 105.00 | 154.70 | 87.90 | 92.70 | 88.90 |
| 43 | 19875.0 | 17979.2 | 21600.0 | 14064.3 | 16583.3 | 15400.0 | 16500.0 | 21250.0 |
| 44 | 3.58 | 3.54 | 2.89 | 2.17 | 1.00 | 1.07 | 1.13 | 2.73 |
| 45 | 68.20 | 56.00 | 59.00 | 403.10 | 323.40 | 264.50 | 140.90 | 231.10 |
| 46 | 0.14 | 0.11 | 0.13 | 0.25 | 0.23 | 0.20 | 0.20 | 0.40 |
| 47 | 53.30 | 43.80 | 49.10 | 373.50 | 285.50 | 247.50 | 121.90 | 206.50 |
| 48 | 0.06 | 0.06 | 0.07 | 0.13 | 0.07 | 0.08 | 0.08 | 0.28 |
| 49 | 85.80 | 88.80 | 92.60 | 87.30 | 81.60 | 90.10 | 66.20 | 82.30 |
| 50 | NA | NA | NA | 0.21 | 0.19 | 0.17 | 0.17 | 0.16 |
| 51 | −13.36 | −13.00 | −13.07 | −12.85 | NA | −12.56 | −12.79 | −13.14 |
| 52 | 28.60 | 29.00 | 28.00 | 30.10 | 30.50 | 30.10 | 30.00 | 30.00 |
| 53 | NA | NA | NA | 52.60 | 44.30 | 35.40 | 75.10 | 66.00 |
| 54 | 92.40 | 91.80 | 91.40 | 87.20 | 87.90 | 85.70 | 90.90 | 92.50 |
| 55 | 10885.2 | 9702.0 | 12009.2 | 20599.4 | 16039.2 | 17728.8 | 17360.8 | 15975.6 |
| 56 | 173.3 | 151.9 | 167.2 | 104.0 | 82.3 | 66.9 | 172.6 | 131.3 |
| 57 | 53.90 | 60.10 | 51.10 | 49.70 | 57.00 | 55.10 | 53.90 | 53.90 |
| 58 | 51.50 | 54.70 | 50.50 | 54.40 | 55.80 | 53.60 | 52.80 | 55.70 |
| 59 | 4.77 | 4.96 | 5.75 | 6.06 | 5.25 | 6.68 | 3.39 | 4.76 |
| 60 | 0.81 | 0.64 | 0.63 | 4.94 | 4.05 | 3.01 | 2.10 | 2.89 |
| 61 | 97.7 | 91.5 | 114.6 | 139.0 | 90.8 | 108.8 | 120.7 | 244.8 |
| 62 | 1.02 | 0.96 | 0.98 | 0.84 | 1.12 | 0.88 | 0.94 | 1.78 |
| 63 | 17.40 | 16.60 | 15.10 | 21.60 | 20.60 | 19.40 | 15.70 | 20.90 |
| 64 | 10.10 | 8.91 | 8.77 | 10.07 | 11.50 | 8.81 | 8.56 | 10.10 |
| 65 | NA | NA | NA | 20.60 | 38.00 | 37.40 | 70.10 | 66.70 |
| 66 | 14471.9 | 11682.4 | 12897.2 | 27195.9 | 18515.8 | 16533.5 | 14367.4 | 45771.7 |
| 67 | NA | NA | NA | NA | NA | NA | NA | NA |
| 68 | NA | NA | NA | NA | NA | NA | NA | NA |
| 69 | NA | NA | 1.84 | NA | NA | 1.56 | NA | 1.84 |
| 70 | NA | NA | 1.93 | NA | NA | 1.70 | NA | 2.05 |
| 71 | NA | NA | NA | NA | NA | NA | NA | NA |
| 72 | NA | NA | 1.32 | NA | NA | 1.24 | NA | 1.34 |
| 73 | NA | NA | 0.97 | NA | NA | 1.23 | NA | 0.63 |
| 74 | NA | NA | 32.59 | NA | NA | 26.71 | NA | 19.84 |
| 75 | NA | NA | 91.40 | NA | NA | 88.60 | NA | 129.50 |
| 76 | NA | NA | 0.60 | NA | NA | 0.42 | NA | 0.37 |
| 77 | 38.60 | 36.80 | 37.20 | 47.90 | 50.30 | 42.10 | 48.60 | 36.30 |
| 78 | NA | NA | 1.26 | NA | NA | 1.48 | NA | 1.75 |

Table 165: Provided are the values of each of the parameters (as described above) measured in Sorghum accessions (“L” = Line) under normal conditions. Growth conditions are specified in the experimental procedure section.

TABLE 166
Measured parameters in Sorghum accessions under drought conditions

| | Line | | | | | | |
|---|---|---|---|---|---|---|---|
| Corr. ID | Line-1 | Line-2 | Line-3 | Line-4 | Line-5 | Line-6 | Line-7 |
| 1 | 539.6 | 494.0 | 653.6 | 568.3 | 358.4 | 474.7 | 364.6 |
| 2 | 59.20 | 62.70 | 77.50 | 82.60 | 53.30 | 67.10 | 37.90 |
| 3 | 29.00 | 17.00 | 17.30 | 22.30 | 22.50 | 35.40 | 15.80 |
| 4 | 30.40 | 29.00 | 37.90 | 32.90 | 28.80 | 32.30 | 19.80 |
| 5 | 0.04 | 4.85 | 4.64 | 14.19 | 3.06 | 1.15 | 3.18 |
| 6 | 0.71 | 0.62 | 0.72 | 0.63 | 0.49 | 0.55 | 0.57 |
| 7 | 18.00 | 13.80 | 9.50 | 12.50 | 25.50 | 9.70 | 9.90 |
| 8 | −13.41 | −13.02 | −13.38 | −13.46 | −13.87 | −13.37 | −13.37 |
| 9 | 1.94 | 1.92 | 2.48 | 2.11 | 1.39 | 1.85 | 1.37 |
| 10 | 0.04 | 0.04 | 0.04 | 0.03 | 0.03 | 0.02 | 0.04 |
| 11 | 0.06 | 0.06 | 0.06 | 0.05 | 0.05 | 0.04 | 0.06 |
| 12 | 0.94 | 0.63 | 0.53 | 0.50 | 0.85 | 0.37 | 0.58 |
| 13 | 0.83 | 0.54 | 0.47 | 0.42 | 0.70 | 0.31 | 0.53 |
| 14 | 20.60 | 25.60 | 29.80 | 32.10 | 27.30 | 28.40 | 26.70 |
| 15 | 19183840 | 17265920 | 20151620 | 18904060 | 12652968 | 19240800 | 18560870 |
| 16 | 2226.7 | 2367.6 | 2602.6 | 3022.6 | 2051.1 | 2957.7 | 2089.8 |
| 17 | 1096.0 | 998.7 | 1092.3 | 1171.0 | 1082.7 | 1401.9 | 1074.0 |
| 18 | 27.40 | 28.70 | 34.50 | 28.10 | 25.80 | 22.90 | 17.50 |
| 19 | 0.12 | 0.13 | 0.14 | 0.13 | 0.12 | 0.10 | 0.09 |
| 20 | 31.80 | 32.20 | 32.00 | 31.60 | 25.40 | 32.60 | 23.40 |
| 21 | 415.20 | 404.40 | 403.30 | 409.90 | 330.40 | 408.90 | 306.60 |
| 22 | 17.10 | 15.40 | 20.60 | 17.90 | 14.00 | 14.60 | 15.40 |
| 23 | 0.98 | 1.05 | 1.35 | 1.39 | 1.16 | 1.01 | 0.95 |
| 24 | 102.60 | 79.90 | 82.50 | 78.50 | 72.30 | 72.40 | 81.30 |
| 25 | 130.50 | 114.20 | 114.00 | 122.40 | 114.20 | 126.70 | 121.40 |
| 26 | 1325.2 | 1100.8 | 1098.1 | 1213.0 | 1100.8 | 1274.7 | 1199.2 |
| 27 | 0.27 | 0.40 | 0.25 | 0.23 | 0.57 | 0.12 | 0.26 |
| 28 | 0.48 | 0.69 | 0.63 | 0.65 | 0.65 | 0.50 | 0.41 |
| 29 | 31.20 | 32.40 | 33.10 | 31.80 | 30.90 | 30.90 | 30.60 |
| 30 | 126.90 | 146.60 | 158.10 | 160.70 | 116.80 | 135.80 | 83.80 |
| 31 | 0.15 | 0.13 | 0.14 | 0.13 | 0.13 | 0.19 | 0.11 |
| 32 | 83.20 | 84.30 | 86.90 | 81.70 | 82.80 | 89.50 | 77.50 |
| 33 | 62.90 | NA | 70.90 | 69.20 | 52.30 | 76.80 | 60.80 |
| 34 | 42.90 | 75.70 | 75.80 | 77.10 | 66.00 | 75.80 | 71.40 |
| 35 | 17250.0 | 29257.1 | 36000.0 | 23966.7 | 15250.0 | 12687.5 | 21430.0 |
| 36 | 0.99 | 1.90 | 2.07 | 1.70 | 1.08 | 1.01 | 0.98 |
| 37 | 1.11 | 3.20 | 3.43 | 3.30 | 1.00 | 1.10 | 4.38 |
| 38 | 0.21 | 0.22 | 0.27 | 0.31 | 0.19 | 0.36 | 0.13 |
| 39 | 0.34 | 0.34 | 0.38 | 0.45 | 0.33 | 0.56 | 0.32 |
| 40 | 161.60 | 96.10 | 82.70 | 84.20 | 145.30 | 56.00 | 109.10 |
| 41 | 0.16 | 0.16 | 0.15 | 0.15 | 0.13 | 0.09 | 0.16 |
| 42 | 143.60 | 82.30 | 73.30 | 71.70 | 119.80 | 46.30 | 99.20 |
| 43 | 0.08 | 0.09 | 0.08 | 0.08 | 0.09 | 0.05 | 0.10 |
| 44 | 0.88 | 2.07 | 1.57 | 1.33 | 1.87 | 1.13 | 2.07 |
| 45 | 78.40 | 78.00 | 71.00 | 63.40 | 69.90 | 73.10 | 77.70 |
| 46 | 4.03 | 3.97 | 3.79 | 3.05 | 3.04 | 3.92 | 3.84 |
| 47 | 13806.8 | 10419.0 | 10992.0 | 10397.8 | 10516.7 | 6092.0 | 6199.8 |
| 48 | 48.90 | 43.20 | 42.80 | 42.10 | 35.50 | 47.50 | 35.10 |
| 49 | 52.40 | 49.90 | 45.30 | 50.40 | 43.10 | 51.80 | 45.10 |
| 50 | 53.60 | 49.30 | 47.70 | 51.10 | 42.60 | 54.90 | 45.20 |
| 51 | 2.16 | 1.29 | 1.27 | 1.38 | 2.13 | 0.78 | 1.40 |
| 52 | 18.30 | 14.40 | 14.40 | 19.10 | 16.90 | 14.90 | 14.10 |
| 53 | 9.33 | 9.11 | 7.80 | 10.15 | 9.82 | 8.72 | 7.80 |
| 54 | 13008.3 | 13795.3 | 11883.2 | 22788.4 | 31653.3 | 9740.6 | 19460.1 |
| 55 | 748.20 | 634.90 | 654.40 | 723.50 | 754.20 | 624.80 | 779.10 |
| 56 | 89.60 | 82.60 | 83.40 | 87.40 | 90.60 | 82.20 | 95.00 |
| 57 | 784.80 | 704.90 | 714.20 | 757.60 | 795.50 | 700.40 | 853.20 |
| 58 | 1200.0 | 1109.2 | 1117.5 | 1167.5 | 1125.9 | 1109.2 | 1159.8 |

Table 166: Provided are the values of each of the parameters (as described above) measured in Sorghum accessions (“L” = Line) under drought conditions. Growth conditions are specified in the experimental procedure section.

TABLE 167
Measured parameters in additional Sorghum accessions under drought conditions

| | Line | | | | | | |
|---|---|---|---|---|---|---|---|
| Corr. ID | Line-8 | Line-9 | Line-10 | Line-11 | Line-12 | Line-13 | Line-14 |
| 1 | 176.2 | 586.8 | 95.0 | 321.5 | 275.9 | 459.7 | 426.1 |
| 2 | 18.80 | 68.60 | 17.50 | 66.30 | 29.80 | 53.90 | 46.40 |
| 3 | 10.80 | 23.20 | 6.60 | 16.70 | 9.50 | 25.80 | 22.20 |
| 4 | 7.80 | 35.20 | 11.30 | 45.20 | 15.00 | 21.30 | 24.20 |
| 5 | 0.49 | 6.89 | NA | 0.84 | 1.12 | 0.37 | 2.20 |
| 6 | 0.27 | 0.71 | 0.23 | 0.35 | 0.44 | 0.57 | 0.59 |
| 7 | 5.90 | 11.10 | 8.50 | 15.90 | 7.90 | 9.90 | 8.60 |
| 8 | −14.20 | −13.15 | −13.42 | −13.62 | −12.78 | −13.56 | −13.12 |
| 9 | 0.64 | 2.23 | 0.29 | 0.95 | 1.07 | 1.79 | 1.66 |
| 10 | 0.01 | 0.03 | 0.10 | 0.04 | 0.02 | 0.02 | 0.02 |
| 11 | 0.01 | 0.05 | 0.11 | 0.06 | 0.03 | 0.04 | 0.03 |
| 12 | 0.18 | 0.56 | 1.18 | 0.87 | 0.43 | 0.41 | 0.38 |
| 13 | 0.13 | 0.50 | 1.15 | 0.81 | 0.37 | 0.35 | 0.33 |
| 14 | 7.70 | 33.20 | NA | 29.50 | 13.30 | 17.00 | 18.50 |
| 15 | 8106154 | 25074700 | 6470276 | 10728240 | 11082880 | 17810750 | 14047538 |
| 16 | 922.6 | 3192.6 | 1275.3 | 2368.5 | 1297.7 | 2280.5 | 1687.8 |
| 17 | 363.4 | 1590.2 | 817.4 | 1579.0 | 630.3 | 898.3 | 875.4 |
| 18 | 21.70 | 21.80 | 12.30 | 28.30 | 23.80 | 23.50 | 27.70 |
| 19 | 0.11 | 0.10 | 0.07 | 0.12 | 0.11 | 0.11 | 0.12 |
| 20 | 37.00 | 28.20 | 18.20 | 28.80 | 37.20 | 30.60 | 29.80 |
| 21 | 453.50 | 369.20 | 193.90 | 391.70 | 469.10 | 384.20 | 374.60 |
| 22 | 4.40 | 20.90 | 4.70 | 10.40 | 7.40 | 14.80 | 14.60 |
| 23 | 0.16 | 1.32 | 0.53 | 1.56 | 0.41 | 0.69 | 0.84 |
| 24 | 188.40 | 128.80 | 80.80 | 114.90 | 78.80 | 70.50 | 54.30 |
| 25 | 111.80 | 143.20 | 150.00 | 150.60 | 147.20 | 113.00 | 114.00 |
| 26 | 1068.2 | 1501.6 | 1599.4 | 1607.3 | 1558.9 | 1084.0 | 1098.2 |
| 27 | 0.00 | 0.32 | 0.28 | 0.31 | 0.23 | 0.12 | 0.30 |
| 28 | 0.21 | 0.63 | 0.76 | 0.68 | 0.57 | 0.36 | 0.43 |
| 29 | NA | 31.70 | NA | 30.60 | 30.10 | 31.10 | 32.80 |
| 30 | 188.70 | 106.50 | 96.90 | 104.50 | 161.10 | 116.70 | 152.40 |
| 31 | NA | 0.17 | 0.15 | 0.17 | 0.15 | 0.16 | 0.16 |
| 32 | 89.70 | 79.60 | NA | 85.40 | 86.90 | 84.50 | 84.30 |
| 33 | 71.10 | 68.40 | 65.30 | 63.30 | 79.00 | 75.80 | 71.80 |
| 34 | 83.20 | 68.20 | 53.80 | 56.70 | 78.40 | 74.80 | 77.70 |
| 35 | 16700.0 | 23062.5 | 12450.0 | 13300.0 | 29500.0 | 17842.9 | 18812.5 |
| 36 | 1.05 | 1.36 | 0.95 | 1.12 | 1.46 | 1.19 | 1.05 |
| 37 | 1.20 | 2.83 | 1.07 | 1.67 | 3.27 | 2.83 | 2.76 |
| 38 | 0.19 | 0.30 | 0.03 | 0.17 | 0.18 | 0.25 | 0.35 |
| 39 | 0.46 | 0.47 | 0.08 | 0.29 | 0.42 | 0.43 | 0.50 |
| 40 | 22.40 | 96.90 | 398.90 | 209.70 | 61.00 | 63.00 | 61.60 |
| 41 | 0.04 | 0.12 | 0.36 | 0.20 | 0.09 | 0.11 | 0.08 |
| 42 | 16.50 | 85.90 | 390.30 | 193.80 | 53.10 | 53.20 | 53.00 |
| 43 | 0.04 | 0.07 | 0.28 | 0.12 | 0.04 | 0.06 | 0.04 |
| 44 | 2.47 | 0.70 | 1.10 | 1.00 | 0.79 | 1.04 | 0.98 |
| 45 | NA | 91.00 | NA | 81.00 | 70.50 | 79.80 | 75.80 |
| 46 | NA | 6.24 | NA | 3.23 | 3.17 | 4.80 | 3.80 |
| 47 | 2894.0 | 9764.5 | 13474.8 | 14964.6 | 9651.0 | 6615.4 | 10532.6 |
| 48 | 47.10 | 44.60 | 39.30 | 44.20 | 42.00 | 44.40 | 46.40 |
| 49 | NA | 48.80 | NA | 50.90 | 50.80 | 52.00 | 50.60 |
| 50 | 55.50 | 50.80 | NA | 52.80 | 51.50 | 52.90 | 48.40 |
| 51 | NA | 1.06 | NA | 2.55 | 0.93 | 0.80 | 0.82 |
| 52 | 9.00 | 19.90 | 23.10 | 21.70 | 17.50 | 13.40 | 17.20 |
| 53 | 7.24 | 9.32 | 7.96 | 11.01 | 8.58 | 8.32 | 8.27 |
| 54 | 7925.4 | 15390.8 | 46856.1 | 26599.5 | 13234.7 | 8101.3 | 9566.4 |
| 55 | 630.50 | 736.40 | NA | 945.20 | 625.30 | 607.20 | 709.00 |
| 56 | 76.00 | 90.20 | 132.00 | 112.40 | 80.40 | 83.40 | 84.20 |
| 57 | 630.50 | 791.90 | 1343.20 | 1080.70 | 679.60 | 713.90 | 723.50 |
| 58 | 1092.4 | 1161.1 | 1602.8 | 1472.4 | 1148.8 | 1098.1 | 1098.1 |

Table 167: Provided are the values of each of the parameters (as described above) measured in Sorghum accessions (“L” = Line) under drought conditions. Growth conditions are specified in the experimental procedure section.

TABLE 168
Measured parameters in additional Sorghum accessions under drought conditions

| | Line | | | | | | |
|---|---|---|---|---|---|---|---|
| Corr. ID | Line-15 | Line-16 | Line-17 | Line-18 | Line-19 | Line-20 | Line-21 |
| 1 | 267.3 | 312.0 | 289.8 | 124.8 | 507.4 | 430.3 | 254.4 |
| 2 | 39.70 | 34.50 | 56.90 | 15.10 | 73.50 | 52.50 | 48.80 |
| 3 | 18.80 | 14.80 | 12.60 | 4.00 | 34.10 | 23.40 | 13.40 |
| 4 | 23.70 | 16.90 | 31.90 | 7.20 | 36.20 | 27.20 | 19.80 |
| 5 | 2.03 | 2.36 | 2.63 | 1.46 | 4.93 | 0.10 | 1.40 |
| 6 | 0.32 | 0.44 | 0.37 | 0.28 | 0.56 | 0.48 | 0.30 |
| 7 | 12.30 | 9.50 | 37.00 | 10.60 | 12.80 | 20.50 | 7.30 |
| 8 | −13.37 | −13.30 | −13.46 | −13.00 | −13.20 | −13.15 | −13.53 |
| 9 | 0.97 | 1.21 | 1.00 | 0.40 | 1.97 | 1.67 | 0.99 |
| 10 | 0.02 | 0.02 | 0.05 | 0.03 | 0.02 | 0.04 | 0.02 |
| 11 | 0.04 | 0.05 | 0.06 | 0.04 | 0.04 | 0.05 | 0.03 |
| 12 | 0.91 | 0.49 | 1.30 | 0.72 | 0.53 | 1.21 | 0.38 |
| 13 | 0.85 | 0.43 | 1.10 | 0.65 | 0.45 | 1.10 | 0.32 |
| 14 | 21.50 | 18.20 | 16.10 | NA | 27.60 | 30.40 | 18.90 |
| 15 | 10846278 | 15582420 | 8247885 | 6942220 | 18592480 | 21713380 | 10884158 |
| 16 | 1724.4 | 1891.7 | 1683.0 | 927.2 | 2955.1 | 2902.0 | 2221.1 |
| 17 | 1008.7 | 932.2 | 871.4 | 440.9 | 1460.1 | 1489.0 | 836.5 |
| 18 | 23.40 | 17.20 | 36.50 | 15.80 | 24.60 | 17.80 | 21.80 |
| 19 | 0.12 | 0.08 | 0.15 | 0.09 | 0.11 | 0.09 | 0.11 |
| 20 | 23.60 | 28.00 | 30.20 | 23.00 | 32.60 | 22.40 | 40.20 |
| 21 | 309.60 | 365.60 | 397.90 | 311.80 | 413.60 | 291.80 | 493.60 |
| 22 | 11.20 | 11.20 | 9.80 | 6.20 | 15.80 | 19.30 | 6.40 |
| 23 | 1.04 | 0.64 | 1.14 | 0.38 | 1.19 | 1.23 | 0.53 |
| 24 | 65.80 | 120.50 | 84.30 | 59.90 | 117.00 | 73.90 | 60.20 |
| 25 | NA | NA | 143.80 | 148.00 | 131.00 | 114.50 | 116.00 |
| 26 | NA | NA | 1508.4 | 1570.0 | 1332.1 | 1105.0 | 1126.0 |
| 27 | 0.33 | 0.44 | 0.11 | 0.30 | 0.07 | 0.29 | 0.13 |
| 28 | 0.36 | 0.59 | 0.63 | 0.31 | 0.40 | 0.36 | 0.15 |
| 29 | 32.40 | 32.10 | 31.10 | 29.90 | 30.20 | 31.50 | 29.40 |
| 30 | 153.20 | 128.40 | 145.80 | 87.70 | 183.00 | 81.30 | 115.30 |
| 31 | 0.20 | 0.13 | 0.21 | 0.17 | 0.16 | 0.17 | NA |
| 32 | 86.60 | 78.50 | 85.80 | 86.60 | 89.60 | 82.90 | 90.30 |
| 33 | 68.10 | 63.30 | 72.50 | 61.30 | 75.20 | 49.70 | NA |
| 34 | 49.00 | 74.30 | 52.30 | 58.00 | 74.10 | 33.40 | NA |
| 35 | 12750.0 | 19492.9 | 20833.3 | 28978.6 | 14650.0 | 16950.0 | 18229.2 |
| 36 | 0.73 | 1.16 | 1.86 | 1.59 | 1.04 | 1.09 | 1.86 |
| 37 | 2.70 | 1.32 | 4.00 | 3.77 | 2.37 | 1.68 | 4.90 |
| 38 | 0.20 | 0.18 | 0.16 | 0.06 | 0.36 | 0.22 | 0.27 |
| 39 | 0.37 | 0.34 | 0.30 | 0.19 | 0.53 | 0.31 | 0.41 |
| 40 | 179.30 | 82.60 | 240.60 | 171.00 | 81.50 | 219.40 | 47.10 |
| 41 | 0.11 | 0.12 | 0.19 | 0.12 | 0.10 | 0.13 | 0.07 |
| 42 | 167.00 | 73.20 | 203.60 | 152.50 | 68.60 | 198.90 | 39.80 |
| 43 | 0.07 | 0.06 | 0.12 | 0.10 | 0.05 | 0.08 | 0.12 |
| 44 | 0.67 | 0.89 | 0.96 | 1.27 | 0.83 | 0.68 | 0.81 |
| 45 | 63.10 | 82.80 | 61.80 | 91.40 | 69.40 | 78.00 | 73.00 |
| 46 | 2.46 | 4.88 | 2.62 | 3.60 | 3.54 | 4.22 | 3.21 |
| 47 | 15978.1 | 11762.4 | 17356.5 | 13226.2 | 12471.0 | 14010.0 | 4967.2 |
| 48 | 43.80 | 40.10 | 46.70 | 38.40 | 46.00 | 40.70 | 43.00 |
| 49 | 50.10 | 51.10 | 57.50 | 48.80 | 53.70 | 46.70 | 50.20 |
| 50 | 49.10 | 53.90 | 58.40 | NA | 55.60 | 48.50 | 47.70 |
| 51 | 2.78 | 1.01 | 4.23 | 1.88 | 1.18 | 2.79 | 0.64 |
| 52 | 21.80 | 17.40 | 21.60 | 17.50 | 19.10 | 18.90 | 14.30 |
| 53 | 9.99 | 7.64 | 11.80 | 6.58 | 9.75 | 7.26 | 7.54 |
| 54 | 12813.5 | 12286.3 | 19751.0 | 12768.1 | 11089.9 | 9923.7 | 6584.9 |
| 55 | 859.80 | 733.20 | 775.20 | 945.20 | 655.50 | 757.60 | 526.20 |
| 56 | 98.60 | 89.20 | 94.20 | 109.00 | 83.60 | 94.00 | 74.00 |
| 57 | 900.50 | 777.50 | 843.10 | 1032.80 | 715.50 | 840.00 | 607.20 |
| 58 | 1210.0 | 1143.1 | 1241.1 | 1344.5 | 1129.0 | 1131.7 | 1100.8 |

Table 168: Provided are the values of each of the parameters (as described above) measured in Sorghum accessions (“L” = Line) under drought conditions. Growth conditions are specified in the experimental procedure section.

TABLE 169
Measured parameters in additional Sorghum accessions under drought conditions

| | Line | | | | | | |
|---|---|---|---|---|---|---|---|
| Corr. ID | Line-22 | Line-23 | Line-24 | Line-25 | Line-26 | Line-27 | Line-28 |
| 1 | 73.6 | 443.7 | 475.3 | 346.3 | 243.6 | 317.1 | 537.3 |
| 2 | 7.60 | 66.80 | 86.30 | 54.80 | 38.80 | 53.80 | 97.10 |
| 3 | 6.20 | 28.20 | 33.80 | 21.90 | 11.80 | 21.90 | 32.90 |
| 4 | 3.50 | 40.50 | 45.40 | 29.80 | 16.10 | 28.50 | 41.80 |
| 5 | 0.54 | NA | 0.43 | 1.44 | 9.14 | NA | 3.37 |
| 6 | 0.16 | 0.65 | 0.55 | 0.46 | 0.27 | 0.65 | 0.60 |
| 7 | 17.60 | 14.90 | 32.60 | 10.60 | 17.70 | 20.40 | 18.60 |
| 8 | −13.46 | −13.53 | −13.86 | −13.32 | −13.28 | −12.89 | −13.20 |
| 9 | 0.22 | 1.31 | 1.81 | 1.35 | 0.79 | 1.23 | 2.09 |
| 10 | 0.04 | 0.04 | 0.03 | 0.02 | 0.04 | 0.02 | 0.02 |
| 11 | 0.05 | 0.06 | 0.06 | 0.05 | 0.04 | 0.04 | 0.04 |
| 12 | 0.89 | 0.78 | 0.75 | 0.39 | 0.59 | 0.49 | 0.66 |
| 13 | 0.82 | 0.72 | 0.56 | 0.33 | 0.51 | 0.36 | 0.51 |
| 14 | 4.40 | 32.10 | 35.90 | 26.70 | 18.70 | 26.90 | 35.30 |
| 15 | 2607623 | 15608820 | 16427920 | 14660064 | 8494728 | 15105380 | 19961625 |
| 16 | 344.2 | 2572.2 | 3186.7 | 2510.2 | 1468.4 | 2754.9 | 3990.9 |
| 17 | 130.2 | 1545.9 | 1637.5 | 1351.2 | 533.7 | 1425.0 | 1736.1 |
| 18 | 26.50 | 25.80 | 27.60 | 21.80 | 26.80 | 18.40 | 24.20 |
| 19 | 0.12 | 0.11 | 0.13 | 0.11 | 0.12 | 0.10 | 0.11 |
| 20 | 32.40 | 25.40 | 29.20 | 32.80 | 25.00 | 26.60 | 40.20 |
| 21 | 445.70 | 349.80 | 381.10 | 418.80 | 338.10 | 337.30 | 494.40 |
| 22 | 2.50 | 17.90 | 16.30 | 10.80 | 10.60 | 12.10 | 13.20 |
| 23 | 0.13 | 1.63 | 1.55 | 0.94 | 1.02 | 1.08 | 1.05 |
| 24 | 86.00 | 101.80 | 116.90 | 76.00 | 47.60 | 129.10 | 105.90 |
| 25 | 148.00 | 144.80 | 114.00 | 118.00 | 144.00 | 113.00 | 116.00 |
| 26 | 1570.2 | 1524.0 | 1098.2 | 1154.5 | 1512.2 | 1084.0 | 1126.0 |
| 27 | 0.27 | 0.44 | 0.34 | 0.22 | 0.41 | 0.24 | 0.23 |
| 28 | 0.73 | 0.84 | 0.63 | 0.40 | 0.71 | 0.52 | 0.28 |
| 29 | 31.20 | 29.90 | 31.00 | 31.70 | 31.70 | 31.00 | 28.50 |
| 30 | 96.20 | 113.50 | 107.60 | 144.50 | 93.70 | 143.40 | 122.90 |
| 31 | 0.16 | 0.15 | 0.15 | 0.14 | 0.18 | 0.16 | NA |
| 32 | 87.90 | 87.20 | 75.50 | 85.00 | 89.20 | 86.00 | 90.00 |
| 33 | 61.60 | 68.30 | 52.70 | 73.40 | 58.10 | 72.00 | NA |
| 34 | 55.50 | 58.50 | 61.60 | 74.20 | 63.80 | 80.50 | NA |
| 35 | 20283.3 | 13450.0 | 12802.4 | 14000.0 | 18716.7 | 12750.0 | 16564.1 |
| 36 | 1.49 | 0.92 | 1.17 | 1.05 | 1.15 | 1.01 | 1.79 |
| 37 | 3.80 | 1.03 | 1.14 | 2.17 | 2.07 | 1.00 | 2.83 |
| 38 | 0.03 | 0.18 | 0.31 | 0.30 | 0.14 | 0.21 | 0.38 |
| 39 | 0.11 | 0.35 | 0.54 | 0.49 | 0.21 | 0.60 | 0.58 |
| 40 | 222.30 | 203.20 | 126.70 | 64.40 | 137.20 | 80.30 | 82.20 |
| 41 | 0.15 | 0.21 | 0.15 | 0.13 | 0.14 | 0.11 | 0.12 |
| 42 | 204.70 | 188.30 | 94.10 | 53.80 | 119.50 | 59.90 | 63.60 |
| 43 | 0.18 | 0.12 | 0.06 | 0.05 | 0.11 | 0.09 | 0.06 |
| 44 | 0.88 | 0.70 | 1.42 | 0.74 | 0.80 | 0.82 | 1.13 |
| 45 | 90.70 | 89.30 | 63.40 | 58.70 | 90.30 | 69.30 | 78.50 |
| 46 | 3.53 | 3.44 | 2.71 | 2.40 | 4.57 | 3.54 | 4.24 |
| 47 | 14354.0 | 14782.2 | 9583.3 | 9224.8 | 12185.8 | 11844.8 | 10118.5 |
| 48 | 39.20 | 38.30 | 42.20 | 45.30 | 39.60 | 42.40 | 45.90 |
| 49 | 44.00 | 48.60 | 47.40 | 52.50 | 47.10 | 53.80 | 52.00 |
| 50 | 41.90 | 48.00 | 45.90 | 51.20 | 45.90 | 53.50 | 50.00 |
| 51 | 2.44 | 2.29 | 2.05 | 1.12 | 1.53 | 1.20 | 1.04 |
| 52 | 21.30 | 21.50 | 17.60 | 18.70 | 19.60 | 20.50 | 14.40 |
| 53 | 8.07 | 11.18 | 11.87 | 8.76 | 9.33 | 10.74 | 8.70 |
| 54 | 19859.5 | 29904.1 | 18695.2 | 7513.3 | 15652.7 | 14605.7 | 8278.9 |
| 55 | 854.50 | 945.20 | 734.50 | 688.60 | 801.90 | 709.00 | 607.80 |
| 56 | 113.00 | 116.20 | 88.80 | 84.80 | 107.20 | 86.40 | 74.00 |
| 57 | 1086.50 | 1128.60 | 773.00 | 730.00 | 1010.60 | 746.70 | 607.20 |
| 58 | 1532.2 | 1478.4 | 1154.1 | 1148.8 | 1348.8 | 1084.0 | 1101.6 |

Table 169: Provided are the values of each of the parameters (as described above) measured in Sorghum accessions (“L” = Line) under drought conditions. Growth conditions are specified in the experimental procedure section.

TABLE 170
Measured parameters in additional Sorghum accessions under drought conditions

| | Line | | | | | | |
|---|---|---|---|---|---|---|---|
| Corr. ID | Line-29 | Line-30 | Line-31 | Line-32 | Line-33 | Line-34 | Line-35 |
| 1 | 542.9 | 561.3 | 582.8 | 506.8 | 712.9 | 625.0 | 397.3 |
| 2 | 107.40 | 67.20 | 101.60 | 98.30 | 110.30 | 99.80 | 54.30 |
| 3 | 32.20 | 32.30 | 39.80 | 41.70 | 45.30 | 43.90 | 17.40 |
| 4 | 42.40 | 36.10 | 56.00 | 54.90 | 48.30 | 39.80 | 26.80 |
| 5 | 13.56 | 16.26 | 4.59 | 4.24 | 2.97 | 3.42 | 2.67 |
| 6 | 0.65 | 0.69 | 0.69 | 0.65 | 0.80 | 0.75 | 0.46 |
| 7 | 11.00 | 11.50 | 22.20 | 49.00 | 13.30 | 32.10 | 12.30 |
| 8 | −13.11 | −13.30 | −13.17 | NA | −12.93 | −12.77 | −13.64 |
| 9 | 2.11 | 2.18 | 2.27 | 1.84 | 2.50 | 2.35 | 1.29 |
| 10 | 0.02 | 0.02 | 0.04 | 0.03 | 0.03 | 0.03 | 0.07 |
| 11 | 0.05 | 0.05 | 0.08 | 0.06 | 0.05 | 0.06 | 0.09 |
| 12 | 0.47 | 0.48 | 1.29 | 1.82 | 1.75 | 1.03 | 1.11 |
| 13 | 0.39 | 0.39 | 1.16 | 1.53 | 1.68 | 0.84 | 1.05 |
| 14 | 37.70 | 25.90 | 52.10 | 46.00 | 41.30 | 35.70 | 24.20 |
| 15 | 18615532 | 21411860 | 25679300 | 23005825 | 29206300 | 27920025 | 15769504 |
| 16 | 4001.9 | 2671.3 | 4808.2 | 4663.8 | 4845.4 | 4510.1 | 2317.9 |
| 17 | 1588.5 | 1445.4 | 2590.2 | 2483.5 | 2041.6 | 1695.7 | 1071.9 |
| 18 | 25.90 | 24.80 | 21.30 | 21.60 | 23.50 | 24.00 | 25.40 |
| 19 | 0.11 | 0.11 | 0.10 | 0.10 | 0.11 | 0.11 | 0.11 |
| 20 | 39.00 | 39.00 | 23.80 | 30.80 | 26.00 | 29.20 | 35.60 |
| 21 | 476.80 | 476.80 | 311.20 | 403.50 | 341.20 | 383.10 | 470.60 |
| 22 | 13.90 | 14.40 | 24.80 | 16.50 | 27.70 | 21.40 | 11.40 |
| 23 | 1.37 | 0.86 | 2.45 | 1.91 | 1.89 | 1.43 | 0.83 |
| 24 | 147.10 | 102.10 | 142.70 | 141.30 | 157.40 | 113.90 | 80.50 |
| 25 | 115.30 | 113.00 | 136.60 | 134.00 | 136.50 | 139.00 | 143.20 |
| 26 | 1116.3 | 1084.0 | 1406.8 | 1369.0 | 1405.5 | 1442.0 | 1501.9 |
| 27 | 0.16 | 0.45 | 0.35 | 0.22 | 0.23 | 0.41 | 0.42 |
| 28 | 0.36 | 0.60 | 0.63 | 0.36 | 0.37 | 0.56 | 0.59 |
| 29 | 29.00 | 29.20 | 32.10 | 31.50 | 30.40 | 34.50 | 31.70 |
| 30 | 90.90 | 109.20 | 130.90 | 121.20 | 100.90 | 133.70 | 113.60 |
| 31 | NA | NA | 0.17 | 0.18 | 0.18 | 0.16 | 0.15 |
| 32 | 91.80 | 90.90 | 76.20 | 80.90 | NA | 81.20 | 81.20 |
| 33 | NA | NA | 69.90 | 66.00 | 52.70 | 69.00 | 63.00 |
| 34 | NA | NA | 31.20 | 25.10 | 33.70 | 63.20 | 61.90 |
| 35 | 15183.3 | 18905.9 | 13300.0 | 10875.0 | 14777.8 | 14000.0 | 23500.0 |
| 36 | 1.70 | 1.09 | 1.13 | 0.96 | 1.32 | 1.04 | 1.58 |
| 37 | 2.17 | 3.11 | 1.50 | 1.62 | 1.11 | 1.71 | 2.90 |
| 38 | 0.35 | 0.32 | 0.27 | 0.33 | 0.32 | 0.29 | 0.12 |
| 39 | 0.61 | 0.56 | 0.45 | 0.54 | 0.47 | 0.44 | 0.20 |
| 40 | 59.10 | 60.00 | 233.70 | 307.30 | 331.20 | 173.50 | 205.70 |
| 41 | 0.14 | 0.12 | 0.19 | 0.18 | 0.16 | 0.16 | 0.28 |
| 42 | 48.10 | 48.40 | 211.60 | 258.30 | 317.90 | 141.40 | 193.40 |
| 43 | 0.07 | 0.06 | 0.11 | 0.06 | 0.10 | 0.09 | 0.15 |
| 44 | 0.96 | 1.05 | 0.89 | 0.86 | 0.82 | 1.04 | 1.57 |
| 45 | 81.10 | 91.20 | 91.30 | 75.60 | 84.80 | 64.80 | 81.80 |
| 46 | 4.09 | 5.58 | 6.10 | 3.94 | 4.91 | 3.23 | 4.00 |
| 47 | 3717.8 | 7510.6 | 15198.4 | 15660.2 | 26643.7 | 16453.5 | 16261.8 |
| 48 | 52.60 | 44.70 | 43.10 | 46.90 | 47.90 | 44.10 | 43.40 |
| 49 | 58.10 | 50.60 | 48.30 | 55.20 | 52.60 | 52.30 | 51.30 |
| 50 | 51.90 | 50.60 | 50.60 | 56.90 | 51.10 | 50.30 | 50.40 |
| 51 | 0.73 | 0.66 | 2.56 | 4.15 | 3.91 | 2.74 | 2.50 |
| 52 | 15.70 | 15.00 | 21.30 | 18.00 | 21.40 | 18.70 | 18.10 |
| 53 | 8.57 | 8.98 | 8.58 | 9.92 | 8.55 | 9.36 | 9.00 |
| 54 | 8487.4 | 10490.7 | 18823.5 | 11730.4 | 13868.6 | 16143.5 | 25029.7 |
| 55 | 534.20 | 563.90 | 775.30 | 727.20 | 779.10 | 753.60 | 761.20 |
| 56 | 74.00 | 74.00 | 93.40 | 89.50 | 95.00 | 89.50 | 93.40 |
| 57 | 607.20 | 607.20 | 831.90 | 781.00 | 853.20 | 781.00 | 831.80 |
| 58 | 1084.0 | 1084.0 | 1143.1 | 1184.5 | 1194.5 | 1164.1 | 1260.6 |

Table 170: Provided are the values of each of the parameters (as described above) measured in Sorghum accessions (“L” = Line) under drought conditions. Growth conditions are specified in the experimental procedure section.

TABLE 171
Measured parameters in Sorghum accessions under low N conditions

| | Line | | | | | | |
|---|---|---|---|---|---|---|---|
| Corr. ID | Line-1 | Line-2 | Line-3 | Line-4 | Line-5 | Line-6 | Line-7 |
| 1 | 661.80 | 769.50 | 745.20 | 653.30 | 610.10 | 581.20 | 324.50 |
| 2 | 88.10 | 116.00 | 87.40 | 113.00 | 115.00 | 79.50 | 42.20 |
| 3 | 34.20 | 35.10 | 23.10 | 18.80 | 42.80 | 38.90 | 15.00 |
| 4 | 49.90 | 68.30 | 45.80 | 53.90 | 67.00 | 37.50 | 23.10 |
| 5 | 6.43 | 0.79 | 3.96 | 18.90 | 5.83 | 0.14 | 2.18 |
| 6 | 0.87 | 0.88 | 0.82 | 0.74 | 0.69 | 0.67 | 0.51 |
| 7 | 19.60 | 17.30 | 10.00 | 11.70 | 38.70 | 12.40 | 13.70 |
| 8 | −12.78 | −13.11 | −12.99 | −12.83 | −13.05 | −13.44 | −12.96 |
| 9 | 1.28 | 1.65 | 1.60 | 1.33 | 1.31 | 1.25 | 0.70 |
| 10 | 0.02 | 0.03 | 0.03 | 0.03 | 0.03 | 0.02 | 0.03 |
| 11 | 0.04 | 0.05 | 0.05 | 0.05 | 0.06 | 0.03 | 0.04 |
| 12 | 0.55 | 0.36 | 0.33 | 0.31 | 0.64 | 0.24 | 0.41 |
| 13 | 0.48 | 0.30 | 0.29 | 0.27 | 0.52 | 0.20 | 0.37 |
| 14 | 32.70 | 43.50 | 30.90 | 52.10 | 57.20 | 29.50 | 25.50 |
| 15 | 22070840 | 24438020 | 21504340 | 21499680 | 20685020 | 21825800 | 16454200 |
| 16 | 3110.70 | 3929.40 | 2654.60 | 3987.60 | 4127.20 | 3314.90 | 2216.50 |
| 17 | 1700.30 | 2239.10 | 1281.70 | 1754.30 | 2275.70 | 1569.70 | 1123.20 |
| 18 | 29.80 | 30.60 | 35.40 | 30.70 | 29.20 | 23.40 | 20.10 |
| 19 | 0.12 | 0.13 | 0.13 | 0.13 | 0.13 | 0.10 | 0.09 |
| 20 | 33.80 | 29.60 | 35.00 | 28.50 | 26.20 | 33.60 | 21.80 |
| 21 | 444.50 | 380.40 | 439.60 | 373.50 | 273.30 | 428.10 | 285.10 |
| 22 | 20.00 | 26.20 | 21.50 | 21.70 | 22.00 | 16.90 | 14.80 |
| 23 | 1.57 | 2.35 | 1.43 | 2.43 | 2.86 | 1.14 | 1.15 |
| 24 | 135.40 | 108.30 | 102.80 | 108.10 | 134.00 | 94.10 | 97.70 |
| 25 | 139.00 | 117.00 | 122.60 | 133.00 | 115.20 | NA | 126.40 |
| 26 | 1442.00 | 1139.80 | 1215.20 | 1357.90 | 1115.50 | NA | 1266.70 |
| 27 | 0.15 | 0.20 | 0.12 | 0.14 | 0.29 | 0.06 | 0.10 |
| 28 | 0.30 | 0.18 | 0.09 | 0.30 | 0.32 | 0.05 | 0.28 |
| 29 | 30.80 | 29.20 | 30.90 | 30.30 | 29.00 | 30.30 | 29.40 |
| 30 | 155.10 | 162.50 | 161.90 | 181.40 | 148.30 | 144.10 | 100.30 |
| 31 | 0.18 | 0.15 | 0.15 | 0.13 | 0.14 | 0.20 | 0.15 |
| 32 | 91.30 | 90.90 | 91.30 | 87.30 | 89.60 | 87.10 | 84.60 |
| 33 | 70.50 | NA | 71.90 | 71.80 | 61.30 | 76.60 | 65.10 |
| 34 | 49.50 | 81.60 | 76.10 | 78.00 | 60.20 | 79.40 | 72.60 |
| 35 | 19050.00 | 19500.00 | 30600.00 | 29007.10 | 13250.00 | 14125.00 | 19550.00 |
| 36 | 1.15 | 1.35 | 1.64 | 2.16 | 0.99 | 1.13 | 1.15 |
| 37 | 1.14 | 2.23 | 5.03 | 2.20 | 1.10 | 2.79 | 3.00 |
| 38 | 0.24 | 0.28 | 0.25 | 0.29 | 0.27 | 0.30 | 0.13 |
| 39 | 0.42 | 0.41 | 0.36 | 0.41 | 0.39 | 0.45 | 0.31 |
| 40 | 166.00 | 103.70 | 85.70 | 90.80 | 205.70 | 66.70 | 138.30 |
| 41 | 0.20 | 0.23 | 0.21 | 0.24 | 0.26 | 0.13 | 0.18 |
| 42 | 146.50 | 86.40 | 75.70 | 79.10 | 167.00 | 54.20 | 124.60 |
| 43 | 0.11 | 0.11 | 0.10 | 0.08 | 0.10 | 0.09 | 0.13 |
| 44 | 0.90 | 2.18 | 1.92 | 1.48 | 2.09 | 1.37 | 2.05 |
| 45 | 71.00 | 80.80 | 71.10 | 62.90 | 65.10 | 74.30 | 83.10 |
| 46 | 3.95 | 4.10 | 3.36 | 3.02 | 2.14 | 3.82 | 4.35 |
| 47 | 16770.40 | 10615.2 | 9361.4 | 12263.6 | 12503.9 | 7283.2 | 7295.8 |
| 48 | 50.20 | 39.10 | 42.40 | 38.90 | 36.20 | 41.50 | 37.00 |
| 49 | 56.30 | 49.70 | 47.00 | 48.60 | 42.80 | 54.80 | 43.70 |
| 50 | 54.50 | 51.70 | 47.50 | 48.70 | 44.60 | 52.80 | 47.80 |
| 51 | 2.75 | 1.27 | 1.29 | 1.56 | 3.22 | 0.90 | 1.67 |
| 52 | 19.70 | 14.30 | 14.10 | 17.10 | 17.30 | 15.10 | 16.10 |
| 53 | 10.72 | 9.68 | 7.88 | 9.47 | 10.83 | 9.78 | 8.96 |
| 54 | 21835.90 | 19319.40 | 15290.90 | 24497.00 | 44648.60 | 13714.80 | 30943.70 |
| 55 | 762.20 | 669.10 | 675.10 | 757.60 | 757.60 | 649.40 | 823.40 |
| 56 | 92.00 | 86.80 | 81.20 | 89.60 | 89.50 | 84.00 | 95.80 |
| 57 | 814.00 | 751.30 | 689.40 | 782.10 | 781.00 | 720.60 | 863.60 |
| 58 | 1258.50 | 1131.70 | 1129.00 | 1154.50 | 1123.30 | 1148.80 | 1148.80 |
| 59 | 330.90 | 384.80 | 372.60 | 326.60 | 305.10 | 290.60 | 162.20 |
| 60 | 93.30 | NA | 120.50 | 126.60 | NA | 99.80 | NA |
| 61 | 24.77 | NA | 29.66 | 37.89 | NA | 28.94 | NA |
| 62 | 14.71 | NA | 12.00 | 8.51 | NA | 9.04 | NA |
| 63 | 0.50 | NA | 0.49 | 0.57 | NA | 0.45 | NA |
| 64 | 1.22 | NA | 1.01 | 1.42 | NA | 1.67 | NA |
| 65 | 1.62 | NA | 2.31 | 1.38 | NA | 2.06 | NA |
| 66 | 0.93 | NA | 0.67 | 0.58 | NA | 0.99 | NA |
| 67 | 2.01 | NA | 1.64 | 1.49 | NA | 1.57 | NA |

Table 171: Provided are the values of each of the parameters (as described above) measured in Sorghum accessions (Line) under low N conditions. Growth conditions are specified in the experimental procedure section.

TABLE 172
Measured parameters in additional Sorghum accessions under low N conditions

| Corr. | Line | | | | | | |
|---|---|---|---|---|---|---|---|
| ID | Line-8 | Line-9 | Line-10 | Line-11 | Line-12 | Line-13 | Line-14 |
| 1 | 152.00 | 633.40 | 389.10 | 306.50 | 283.00 | 558.30 | 690.40 |
| 2 | 31.10 | 90.20 | 58.70 | 44.10 | 35.70 | 74.70 | 84.10 |
| 3 | 12.90 | 28.00 | 27.70 | 20.90 | 10.00 | 27.60 | 34.10 |
| 4 | 12.30 | 43.70 | 33.00 | 19.10 | 19.80 | 40.80 | 46.40 |
| 5 | 5.20 | 10.09 | NA | 5.25 | 1.45 | 9.66 | NA |
| 6 | 0.20 | 0.76 | 0.51 | 0.47 | 0.50 | 0.63 | 0.78 |
| 7 | 6.70 | 11.00 | 10.20 | 31.70 | 7.70 | 10.10 | 9.50 |
| 8 | −13.62 | −12.69 | −13.11 | −13.17 | −12.59 | −13.13 | −13.00 |
| 9 | 0.32 | 1.25 | 0.69 | 0.54 | 0.57 | 1.20 | 1.48 |
| 10 | 0.01 | 0.03 | 0.06 | 0.04 | 0.01 | 0.01 | 0.02 |
| 11 | 0.02 | 0.04 | 0.07 | 0.05 | 0.03 | 0.03 | 0.04 |
| 12 | 0.12 | 0.38 | 0.48 | 0.44 | 0.20 | 0.23 | 0.23 |
| 13 | 0.09 | 0.35 | 0.46 | 0.37 | 0.17 | 0.20 | 0.20 |
| 14 | 12.00 | 40.60 | 40.90 | 13.30 | 17.50 | 34.90 | 31.90 |
| 15 | 6420783.3 | 26192733.3 | 21156820 | 10734122 | 10820540 | 21581650 | 22437200 |
| 16 | 1326.90 | 4021.60 | 3454.50 | 1697.20 | 1472.70 | 3041.20 | 2942.70 |
| 17 | 520.90 | 1874.60 | 1912.80 | 732.10 | 810.60 | 1593.30 | 1572.20 |
| 18 | 23.70 | 22.80 | 16.50 | 24.80 | 25.60 | 25.20 | 29.50 |
| 19 | 0.12 | 0.10 | 0.08 | 0.11 | 0.11 | 0.11 | 0.12 |
| 20 | 37.00 | 33.30 | 22.00 | 27.80 | 34.80 | 31.60 | 28.60 |
| 21 | 453.50 | 437.00 | 303.10 | 381.10 | 448.50 | 400.90 | 366.10 |
| 22 | 4.00 | 18.90 | 18.00 | 11.90 | 8.20 | 17.20 | 24.30 |
| 23 | 0.49 | 1.51 | 1.52 | 0.75 | 0.61 | 1.42 | 1.63 |
| 24 | 235.30 | 156.90 | 136.70 | 190.30 | 117.00 | 75.90 | 79.00 |
| 25 | 112.00 | 147.00 | 145.50 | 154.20 | 148.00 | 137.00 | 119.00 |
| 26 | 1070.90 | 1554.50 | 1534.20 | 1659.70 | 1570.20 | 1412.00 | 1165.80 |
| 27 | 0.00 | 0.11 | 0.20 | 0.04 | 0.24 | 0.17 | 0.24 |
| 28 | 0.20 | 0.42 | 0.59 | 0.34 | 0.19 | 0.03 | 0.21 |
| 29 | NA | 30.00 | 32.50 | 32.50 | 29.50 | 29.30 | 30.90 |
| 30 | 189.50 | 125.50 | 140.60 | 160.00 | 159.60 | 178.50 | 157.80 |
| 31 | NA | 0.17 | 0.13 | 0.18 | 0.17 | 0.19 | 0.18 |
| 32 | 92.30 | 87.20 | 86.70 | 88.10 | 86.90 | 85.90 | 91.50 |
| 33 | 71.90 | 69.20 | 68.60 | 69.30 | 79.70 | 76.70 | 73.60 |
| 34 | 84.10 | 67.70 | 73.10 | 71.70 | 82.50 | 74.40 | 80.00 |
| 35 | 12833.30 | 20833.30 | 13166.70 | 14150.00 | 25900.00 | 18950.00 | 18250.00 |
| 36 | 1.07 | 1.41 | 0.95 | 1.13 | 1.46 | 1.26 | 1.11 |
| 37 | 1.83 | 2.47 | 1.20 | 2.27 | 2.53 | 3.83 | 1.54 |
| 38 | 0.19 | 0.23 | 0.07 | 0.09 | 0.17 | 0.36 | 0.30 |
| 39 | 0.36 | 0.36 | 0.12 | 0.18 | 0.47 | 0.51 | 0.46 |
| 40 | 26.20 | 120.00 | 241.00 | 200.80 | 55.30 | 64.60 | 68.00 |
| 41 | 0.08 | 0.22 | 0.42 | 0.29 | 0.12 | 0.13 | 0.17 |
| 42 | 19.40 | 109.00 | 230.80 | 169.10 | 47.60 | 54.50 | 58.50 |
| 43 | 0.05 | 0.12 | 0.47 | 0.19 | 0.06 | 0.05 | 0.07 |
| 44 | 2.50 | 0.65 | 1.15 | 0.96 | 0.71 | 1.00 | 1.12 |
| 45 | NA | 87.40 | 85.50 | 93.10 | 55.40 | 74.10 | 67.40 |
| 46 | NA | 5.22 | 4.97 | 6.28 | 2.15 | 4.02 | 2.83 |
| 47 | 3501.0 | 12503.7 | 15699.7 | 22712.4 | 8595.4 | 8279.6 | 14579.4 |
| 48 | 41.90 | 40.10 | 36.00 | 39.40 | 36.30 | 40.40 | 45.40 |
| 49 | NA | 51.20 | 46.20 | 57.40 | 49.60 | 53.60 | 48.50 |
| 50 | 50.10 | 53.10 | 42.80 | 56.90 | 49.10 | 50.50 | 48.80 |
| 51 | NA | 1.35 | 2.88 | 2.15 | 1.06 | 0.88 | 1.05 |
| 52 | 9.00 | 19.40 | 20.60 | 22.70 | 18.00 | 13.90 | 17.00 |
| 53 | 7.89 | 9.50 | 6.88 | 11.01 | 9.43 | 8.68 | 8.36 |
| 54 | 8654.40 | 22138.70 | 48187.80 | 46278.30 | 15264.70 | 9784.80 | 13167.00 |
| 55 | 630.50 | 734.90 | NA | 945.20 | 661.90 | 670.00 | 717.10 |
| 56 | 76.00 | 91.00 | 120.60 | 113.80 | 85.80 | 84.40 | 86.80 |
| 57 | 630.50 | 802.20 | 1189.10 | 1097.00 | 740.60 | 725.10 | 751.50 |
| 58 | 1084.00 | 1239.20 | 1492.20 | 1478.10 | 1189.10 | 1126.00 | 1117.60 |
| 59 | 76.00 | 316.70 | 194.50 | 153.20 | 141.50 | 279.20 | 345.20 |
| 60 | NA | 104.40 | NA | NA | NA | NA | NA |
| 61 | NA | 22.90 | NA | NA | NA | NA | NA |
| 62 | NA | 11.61 | NA | NA | NA | NA | NA |
| 63 | NA | 0.40 | NA | NA | NA | NA | NA |
| 64 | NA | 1.31 | NA | NA | NA | NA | NA |
| 65 | NA | 1.16 | NA | NA | NA | NA | NA |
| 66 | NA | 0.89 | NA | NA | NA | NA | NA |
| 67 | NA | 1.76 | NA | NA | NA | NA | NA |

Table 172: Provided are the values of each of the parameters (as described above) measured in Sorghum accessions (Line) under low N conditions. Growth conditions are specified in the experimental procedure section.

TABLE 173
Measured parameters in additional Sorghum accessions under low N conditions

| | Line | | | | | | |
|---|---|---|---|---|---|---|---|
| Corr. ID | Line-15 | Line-16 | Line-17 | Line-18 | Line-19 | Line-20 | Line-21 |
| 1 | 605.10 | 366.70 | 423.10 | 280.20 | 590.60 | 454.70 | 263.70 |
| 2 | 85.50 | 44.30 | 66.90 | 23.60 | 95.70 | 68.20 | 43.30 |
| 3 | 37.10 | 17.60 | 16.10 | 5.70 | 36.40 | 28.10 | 13.20 |
| 4 | 46.20 | 24.50 | 31.90 | 7.70 | 40.60 | 35.60 | 14.20 |
| 5 | 0.85 | 0.50 | 6.54 | 3.62 | 4.04 | 0.62 | 11.12 |
| 6 | 0.69 | 0.58 | 0.47 | 0.58 | 0.68 | 0.51 | 0.26 |
| 7 | 9.90 | 11.40 | 19.70 | 16.10 | 17.30 | 13.90 | 8.30 |
| 8 | −12.96 | −13.07 | −12.94 | −12.77 | −13.35 | −12.60 | −12.83 |
| 9 | 1.18 | 0.73 | 0.79 | 0.50 | 1.23 | 0.93 | 0.57 |
| 10 | 0.01 | 0.02 | 0.04 | 0.03 | 0.01 | 0.02 | 0.01 |
| 11 | 0.03 | 0.03 | 0.05 | 0.03 | 0.02 | 0.03 | 0.02 |
| 12 | 0.41 | 0.28 | 0.69 | 0.32 | 0.32 | 0.41 | 0.23 |
| 13 | 0.39 | 0.24 | 0.63 | 0.28 | 0.26 | 0.37 | 0.19 |
| 14 | 44.00 | 26.30 | 19.70 | 12.00 | 31.10 | 41.70 | 25.80 |
| 15 | 25344720 | 20035920 | 11582823 | 14659840 | 20818740 | 23299560 | 11431484 |
| 16 | 3864.40 | 2620.70 | 1944.00 | 1369.30 | 3561.90 | 3839.10 | 1999.40 |
| 17 | 2037.50 | 1422.10 | 854.80 | 449.60 | 1466.90 | 1989.80 | 659.50 |
| 18 | 22.70 | 16.50 | 37.00 | 16.80 | 26.60 | 17.80 | 21.10 |
| 19 | 0.12 | 0.08 | 0.14 | 0.09 | 0.11 | 0.09 | 0.10 |
| 20 | 22.20 | 29.20 | 29.50 | 30.00 | 35.40 | 24.60 | 42.60 |
| 21 | 293.60 | 384.40 | 389.20 | 405.60 | 454.60 | 323.10 | 527.50 |
| 22 | 27.30 | 13.00 | 14.80 | 9.30 | 16.70 | 18.50 | 6.20 |
| 23 | 2.11 | 0.88 | 1.35 | 0.37 | 1.25 | 1.46 | 0.59 |
| 24 | 107.00 | 176.30 | 83.00 | 66.70 | 117.50 | 98.10 | 47.50 |
| 25 | 143.00 | NA | 149.00 | 148.40 | 144.00 | 137.00 | NA |
| 26 | 1498.30 | NA | 1584.50 | 1576.20 | 1512.80 | 1412.00 | NA |
| 27 | 0.28 | 0.11 | 0.14 | 0.20 | 0.04 | 0.18 | 0.01 |
| 28 | 0.28 | 0.22 | 0.08 | 0.23 | 0.03 | 0.15 | 0.06 |
| 29 | 29.70 | 30.30 | 30.70 | 32.60 | 29.90 | 29.90 | 27.90 |
| 30 | 153.20 | 149.90 | 148.20 | 123.30 | 147.80 | 130.50 | 150.10 |
| 31 | 0.18 | 0.17 | 0.20 | 0.16 | 0.18 | 0.19 | NA |
| 32 | 91.40 | 84.50 | 92.50 | 85.10 | 88.20 | 87.00 | 92.40 |
| 33 | 68.70 | 70.90 | 73.20 | 65.30 | 75.60 | 63.00 | NA |
| 34 | 47.50 | 78.80 | 48.80 | 65.80 | 74.60 | 43.80 | NA |
| 35 | 15050.00 | 18650.00 | 26500.00 | 47771.40 | 15378.60 | 14791.30 | 23437.30 |
| 36 | 1.06 | 1.11 | 1.78 | 2.30 | 1.15 | 1.22 | 2.54 |
| 37 | 1.24 | 1.30 | 4.79 | 4.27 | 2.37 | 1.43 | 4.93 |
| 38 | 0.33 | 0.20 | 0.15 | 0.07 | 0.35 | 0.26 | 0.29 |
| 39 | 0.49 | 0.35 | 0.26 | 0.20 | 0.53 | 0.39 | 0.37 |
| 40 | 159.40 | 90.70 | 240.20 | 133.70 | 88.70 | 138.10 | 48.10 |
| 41 | 0.14 | 0.13 | 0.27 | 0.19 | 0.12 | 0.13 | 0.09 |
| 42 | 149.50 | 79.30 | 220.50 | 117.60 | 71.40 | 123.40 | 39.80 |
| 43 | 0.07 | 0.06 | 0.15 | 0.11 | 0.07 | 0.09 | 0.09 |
| 44 | 0.77 | 0.77 | 1.07 | 1.26 | 0.69 | 0.64 | 0.88 |
| 45 | 71.20 | 87.70 | 66.60 | 88.70 | 69.20 | 83.00 | 61.30 |
| 46 | 3.57 | 5.91 | 3.22 | 6.07 | 3.70 | 4.37 | 2.22 |
| 47 | 16710.3 | 13218.2 | 14464.5 | 11759.2 | 8621.8 | 13816.8 | 6363.6 |
| 48 | 39.90 | 39.10 | 42.00 | 42.00 | 44.50 | 39.40 | 38.20 |
| 49 | 46.30 | 50.00 | 56.20 | 49.70 | 51.30 | 48.10 | 52.50 |
| 50 | 47.40 | 55.90 | 55.50 | 49.90 | 51.20 | 48.10 | 44.40 |
| 51 | 2.35 | 1.03 | 3.93 | 1.50 | 1.32 | 1.68 | 0.78 |
| 52 | 21.00 | 20.00 | 21.50 | 17.70 | 18.50 | 20.70 | 14.80 |
| 53 | 9.78 | 8.57 | 12.73 | 7.75 | 10.95 | 7.75 | 7.52 |
| 54 | 14934.20 | 18163.10 | 28962.40 | 18746.50 | 12235.20 | 15453.20 | 7723.90 |
| 55 | 892.60 | 769.50 | 814.20 | 905.80 | 641.50 | 773.00 | 534.20 |
| 56 | 103.80 | 94.00 | 97.80 | 107.40 | 84.60 | 95.80 | 74.00 |
| 57 | 967.40 | 840.00 | 889.20 | 1013.40 | 726.80 | 863.50 | 607.20 |
| 58 | 1261.00 | 1224.30 | 1278.50 | 1419.00 | 1181.30 | 1186.60 | 1134.70 |
| 59 | 302.50 | 183.30 | 211.60 | 140.10 | 295.30 | 227.30 | 131.80 |
| 60 | NA | NA | NA | NA | NA | NA | NA |
| 61 | NA | NA | NA | NA | NA | NA | NA |
| 62 | NA | NA | NA | NA | NA | NA | NA |
| 63 | NA | NA | NA | NA | NA | NA | NA |
| 64 | NA | NA | NA | NA | NA | NA | NA |
| 65 | NA | NA | NA | NA | NA | NA | NA |
| 66 | NA | NA | NA | NA | NA | NA | NA |
| 67 | NA | NA | NA | NA | NA | NA | NA |

Table 173: Provided are the values of each of the parameters (as described above) measured in Sorghum accessions (Line) under low N conditions. Growth conditions are specified in the experimental procedure section.

TABLE 174
Measured parameters in additional Sorghum accessions under low N conditions

| | Line | | | | | | |
|---|---|---|---|---|---|---|---|
| Corr. ID | Line-22 | Line-23 | Line-24 | Line-25 | Line-26 | Line-27 | Line-28 |
| 1 | 145.50 | 282.20 | 605.50 | 378.00 | 581.10 | 291.80 | 671.50 |
| 2 | 17.50 | 43.20 | 111.30 | 59.10 | 109.30 | 52.90 | 93.90 |
| 3 | 9.50 | 19.10 | 36.40 | 22.00 | 36.60 | 19.10 | 33.90 |
| 4 | 4.80 | 24.80 | 66.90 | 27.10 | 58.60 | 30.30 | 42.60 |
| 5 | 1.76 | NA | 3.74 | 10.92 | 36.79 | 0.50 | 6.36 |
| 6 | 0.35 | 0.49 | 0.71 | 0.50 | 0.72 | 0.64 | 0.77 |
| 7 | 20.40 | 19.80 | 37.00 | 11.00 | NA | 18.20 | 14.50 |
| 8 | −12.90 | −12.36 | −13.10 | −13.06 | −12.75 | −12.90 | −13.03 |
| 9 | 0.33 | 0.50 | 1.27 | 0.80 | 1.13 | 0.63 | 1.41 |
| 10 | 0.03 | 0.03 | 0.02 | 0.02 | 0.03 | 0.02 | 0.01 |
| 11 | 0.03 | 0.04 | 0.04 | 0.03 | 0.05 | 0.03 | 0.03 |
| 12 | 0.63 | 0.80 | 0.61 | 0.19 | NA | 0.27 | 0.34 |
| 13 | 0.59 | 0.76 | 0.49 | 0.15 | NA | 0.21 | 0.27 |
| 14 | 5.00 | 23.20 | 44.90 | 30.10 | 36.30 | 25.40 | 33.80 |
| 15 | 4496747 | 11541518 | 18740650 | 16305080 | 20382340 | 12164286 | 23557125 |
| 16 | 592.60 | 1907.30 | 3702.60 | 2806.60 | 3624.30 | 2363.90 | 3599.60 |
| 17 | 161.40 | 1071.80 | 2162.90 | 1311.70 | 1900.60 | 1326.50 | 1619.00 |
| 18 | 26.70 | 22.70 | 31.60 | 20.30 | 31.20 | 21.50 | 26.00 |
| 19 | 0.13 | 0.11 | 0.14 | 0.10 | 0.13 | 0.11 | 0.11 |
| 20 | 29.00 | 29.20 | 32.80 | 31.80 | 22.40 | 29.40 | 42.20 |
| 21 | 395.40 | 404.20 | 428.20 | 411.50 | 295.70 | 380.90 | 522.00 |
| 22 | 7.60 | 9.90 | 19.80 | 12.10 | 25.90 | 10.00 | 15.90 |
| 23 | 0.39 | 0.87 | 2.19 | 1.01 | 2.44 | 1.05 | 1.13 |
| 24 | 178.30 | 124.00 | 150.20 | 82.50 | 123.70 | 113.70 | 108.20 |
| 25 | 148.30 | 149.20 | 125.20 | 134.00 | 152.20 | NA | NA |
| 26 | 1575.20 | 1586.70 | 1250.80 | 1369.00 | 1631.00 | NA | NA |
| 27 | 0.19 | 0.21 | 0.15 | 0.15 | NA | 0.07 | 0.01 |
| 28 | 0.41 | 0.69 | 0.23 | 0.28 | 0.47 | 0.18 | 0.05 |
| 29 | 28.40 | 28.60 | 30.20 | 30.90 | 30.90 | 30.50 | 28.20 |
| 30 | 96.90 | 165.90 | 153.40 | 165.20 | NA | 153.10 | 143.30 |
| 31 | 0.16 | 0.16 | 0.18 | 0.15 | NA | 0.19 | NA |
| 32 | 88.60 | 88.90 | 89.90 | 93.10 | 90.60 | 92.40 | 93.30 |
| 33 | 60.40 | 72.80 | 66.80 | 73.90 | NA | 76.30 | NA |
| 34 | 52.30 | 62.90 | 56.20 | 78.70 | NA | 81.80 | NA |
| 35 | 26033.30 | 13200.00 | 14404.80 | 13600.00 | 15500.00 | 13466.70 | 20520.80 |
| 36 | 1.69 | 0.98 | 1.34 | 1.02 | 1.53 | 1.16 | 1.43 |
| 37 | 5.33 | 1.00 | 1.43 | 1.83 | 1.40 | 1.07 | 3.50 |
| 38 | 0.05 | 0.09 | 0.31 | 0.24 | 0.22 | 0.21 | 0.36 |
| 39 | 0.16 | 0.24 | 0.52 | 0.44 | 0.34 | 0.43 | 0.52 |
| 40 | 306.10 | 385.00 | 180.80 | 53.30 | NA | 80.80 | 70.30 |
| 41 | 0.20 | 0.25 | 0.21 | 0.13 | 0.27 | 0.14 | 0.13 |
| 42 | 285.70 | 365.30 | 143.90 | 42.30 | NA | 62.60 | 55.80 |
| 43 | 0.24 | 0.27 | 0.08 | 0.07 | 0.19 | 0.06 | 0.06 |
| 44 | 0.84 | 0.85 | 1.55 | 0.82 | 0.83 | 0.57 | 0.74 |
| 45 | 90.30 | 85.70 | 71.20 | 60.10 | 94.80 | 60.60 | 81.10 |
| 46 | 4.00 | 2.98 | 2.92 | 2.88 | 6.85 | 2.32 | 3.89 |
| 47 | 16953.3 | 26482.6 | 15781.4 | 8543.0 | NA | 15080.6 | 9350.7 |
| 48 | 35.90 | 38.50 | 40.50 | 48.40 | 40.60 | 41.10 | 44.60 |
| 49 | 47.80 | 47.10 | 54.90 | 50.30 | 43.20 | 50.70 | 55.10 |
| 50 | 49.00 | 41.00 | 49.20 | 49.60 | 48.70 | 52.50 | 52.90 |
| 51 | 3.40 | 4.56 | 2.64 | 0.91 | NA | 1.35 | 0.85 |
| 52 | 20.90 | 24.40 | 18.20 | 16.90 | NA | 21.50 | 16.80 |
| 53 | 9.43 | 11.94 | 12.75 | 9.97 | NA | 10.98 | 9.12 |
| 54 | 32879.70 | 62130.20 | 28010.30 | 8132.70 | NA | 18761.80 | 13549.20 |
| 55 | 912.20 | NA | 751.50 | 677.80 | 901.20 | 727.20 | 574.80 |
| 56 | 111.00 | 118.00 | 88.60 | 86.60 | 102.80 | 87.80 | 74.00 |
| 57 | 1060.40 | 1153.70 | 771.50 | 748.30 | 955.10 | 762.20 | 607.20 |
| 58 | 1483.80 | 1558.00 | 1199.70 | 1159.80 | 1250.80 | 1143.10 | 1129.20 |
| 59 | 72.70 | 141.10 | 302.80 | 189.00 | 290.50 | 145.90 | 335.80 |
| 60 | NA | 194.90 | 128.50 | NA | NA | NA | NA |
| 61 | NA | 18.14 | 40.26 | NA | NA | NA | NA |
| 62 | NA | 8.79 | 7.16 | NA | NA | NA | NA |
| 63 | NA | 0.27 | 0.57 | NA | NA | NA | NA |
| 64 | NA | 0.70 | 0.99 | NA | NA | NA | NA |
| 65 | NA | 1.98 | 1.64 | NA | NA | NA | NA |
| 66 | NA | 0.49 | 0.70 | NA | NA | NA | NA |
| 67 | NA | 1.47 | 1.41 | NA | NA | NA | NA |

Table 174: Provided are the values of each of the parameters (as described above) measured in Sorghum accessions (Line) under low N conditions. Growth conditions are specified in the experimental procedure section.

TABLE 175
Measured parameters in additional Sorghum accessions under low N conditions

| Corr. | Line | | | | | |
|---|---|---|---|---|---|---|
| ID | Line-29 | Line-30 | Line-31 | Line-32 | Line-33 | Line-34 |
| 1 | 510.90 | 774.60 | 816.40 | 922.40 | 828.40 | 485.50 |
| 2 | 68.20 | 95.30 | 127.80 | 139.40 | 101.20 | 76.10 |
| 3 | 27.90 | 40.00 | 57.50 | 50.80 | 48.70 | 26.40 |
| 4 | 36.00 | 48.80 | 69.20 | 79.20 | 49.60 | 36.40 |
| 5 | 5.12 | 1.57 | NA | 12.83 | 0.77 | 5.67 |
| 6 | 0.64 | 0.93 | 0.97 | 1.00 | 1.04 | 0.59 |
| 7 | 10.90 | 11.10 | 16.00 | 22.60 | 19.80 | 14.70 |
| 8 | −13.02 | −12.98 | −13.03 | −12.84 | −12.64 | −13.03 |
| 9 | 1.10 | 1.66 | 1.63 | 1.74 | 1.69 | 0.96 |
| 10 | 0.01 | 0.01 | 0.03 | 0.02 | 0.02 | 0.07 |
| 11 | 0.02 | 0.03 | 0.05 | 0.04 | 0.03 | 0.08 |
| 12 | 0.22 | 0.28 | 0.87 | 0.81 | 0.39 | 1.11 |
| 13 | 0.17 | 0.23 | 0.82 | 0.75 | 0.32 | 1.06 |
| 14 | 26.90 | 35.30 | 69.80 | 61.60 | 45.60 | 31.90 |
| 15 | 16479475 | 25747580 | 36116975 | 36860650 | 33562075 | 18000140 |
| 16 | 2406.10 | 3436.20 | 6082.50 | 5855.70 | 4395.80 | 3020.80 |
| 17 | 1259.40 | 1724.00 | 3230.20 | 3170.30 | 2099.20 | 1383.30 |
| 18 | 27.90 | 28.40 | 20.90 | 24.40 | 23.50 | 26.10 |
| 19 | 0.12 | 0.12 | 0.10 | 0.11 | 0.10 | 0.11 |
| 20 | 42.20 | 42.00 | 26.20 | 31.20 | 29.80 | 33.20 |
| 21 | 522.50 | 518.80 | 344.90 | 412.30 | 391.00 | 436.90 |
| 22 | 12.20 | 18.40 | 31.90 | 29.90 | 27.80 | 14.90 |
| 23 | 0.91 | 1.18 | 2.67 | 2.66 | 1.67 | 1.32 |
| 24 | 138.60 | 112.20 | 185.60 | 222.30 | 140.80 | 115.60 |
| 25 | NA | 125.00 | 145.00 | NA | 136.50 | 135.50 |
| 26 | NA | 1247.50 | 1528.00 | NA | 1405.50 | 1392.60 |
| 27 | 0.08 | 0.25 | 0.09 | 0.12 | 0.22 | 0.21 |
| 28 | 0.09 | 0.07 | 0.18 | 0.14 | 0.33 | 0.40 |
| 29 | 27.80 | 28.00 | 30.50 | 29.70 | 32.50 | 29.50 |
| 30 | 151.10 | 142.90 | 152.40 | 133.10 | 159.40 | 139.70 |
| 31 | NA | NA | 0.20 | 0.18 | 0.16 | 0.16 |
| 32 | 93.50 | 94.20 | 85.90 | 87.60 | 92.20 | 92.00 |
| 33 | NA | NA | 67.30 | 68.60 | 71.70 | 69.00 |
| 34 | NA | NA | 30.30 | 39.90 | 72.50 | 50.50 |
| 35 | 16495.80 | 17950.00 | 12910.70 | 15812.50 | 15567.90 | 18400.00 |
| 36 | 1.08 | 1.16 | 1.02 | 1.14 | 1.06 | 1.28 |
| 37 | 3.46 | 3.40 | 2.25 | 1.00 | 1.08 | 2.83 |
| 38 | 0.34 | 0.33 | 0.26 | 0.37 | 0.30 | 0.11 |
| 39 | 0.61 | 0.53 | 0.43 | 0.54 | 0.49 | 0.18 |
| 40 | 45.40 | 58.60 | 293.90 | 275.50 | 124.40 | 344.00 |
| 41 | 0.11 | 0.15 | 0.26 | 0.21 | 0.16 | 0.41 |
| 42 | 34.50 | 47.50 | 277.90 | 252.90 | 104.50 | 329.20 |
| 43 | 0.05 | 0.08 | 0.15 | 0.09 | 0.08 | 0.22 |
| 44 | 0.85 | 1.17 | 0.82 | 0.77 | 0.91 | 1.54 |
| 45 | 74.00 | 88.20 | 94.30 | 84.50 | 68.60 | 84.00 |
| 46 | 3.18 | 5.37 | 6.86 | 4.96 | 3.39 | 4.38 |
| 47 | 5454.0 | 9065.6 | 20008.0 | 21922.8 | 15977.0 | 18430.4 |
| 48 | 46.90 | 41.40 | 39.90 | 41.80 | 39.50 | 38.30 |
| 49 | 55.50 | 49.80 | 45.80 | 51.00 | 45.00 | 50.60 |
| 50 | 52.20 | 49.90 | 47.30 | 53.80 | 45.90 | 50.90 |
| 51 | 0.60 | 0.65 | 3.13 | 3.28 | 1.84 | 4.08 |
| 52 | 15.40 | 15.40 | 21.20 | 20.80 | 17.50 | 20.50 |
| 53 | 8.63 | 8.78 | 9.05 | 9.40 | 9.41 | 9.06 |
| 54 | 9492.30 | 14554.40 | 27230.60 | 18260.10 | 18322.30 | 42073.40 |
| 55 | 574.80 | 607.20 | 814.20 | 749.10 | 769.50 | 773.00 |
| 56 | 74.00 | 74.00 | 96.50 | 96.00 | 92.50 | 92.00 |
| 57 | 607.20 | 607.20 | 872.80 | 866.20 | 820.00 | 813.40 |
| 58 | 1129.80 | 1126.00 | 1217.60 | 1278.60 | 1211.00 | 1250.30 |
| 59 | 255.40 | 387.30 | 408.20 | 461.20 | 414.20 | 242.80 |
| 60 | NA | 102.20 | NA | 112.40 | NA | 154.20 |
| 61 | NA | 35.16 | NA | 43.48 | NA | 15.48 |
| 62 | NA | 11.09 | NA | 10.96 | NA | 13.24 |
| 63 | NA | 0.59 | NA | 0.58 | NA | 0.31 |
| 64 | NA | 1.38 | NA | 1.14 | NA | 1.58 |
| 65 | NA | 1.53 | NA | 1.48 | NA | 1.70 |
| 66 | NA | 0.86 | NA | 0.81 | NA | 0.54 |
| 67 | NA | 1.68 | NA | 1.33 | NA | 2.02 |

Table 175: Provided are the values of each of the parameters (as described above) measured in Sorghum accessions (Line) under low N conditions. Growth conditions are specified in the experimental procedure section.

TABLE 176
Correlation between the expression level of selected genes of some embodiments
of the invention in various tissues and the phenotypic performance
under normal conditions across Sorghum accessions

| Gene | | | Exp. | Corr. | Gene | | | Exp. | Corr. |
|---|---|---|---|---|---|---|---|---|---|
| Name | R | P value | set | ID | Name | R | P value | set | ID |
| LBY489 | 0.76 | 1.69E−02 | 3 | 73 | LBY531 | 0.81 | 5.13E−02 | 4 | 70 |
| LYD1002 | 0.75 | 5.24E−04 | 4 | 54 | | | | | |

Table 176. Provided are the correlations (R) between the expression levels of the genes of some embodiments of the invention in various tissues (expression set, Table 157) and the phenotypic performance (Tables 161-165) according to the correlation vectors (Corr. ID) specified in Table 158.
“R” = Pearson correlation coefficient;
“P” = p value.

TABLE 177
Correlation between the expression level of selected
genes of some embodiments of the invention in
various tissues and the phenotypic performance under
drought stress conditions across Sorghum accessions
Provided are the correlations (R)
between the expression levels of the genes of some
embodiments of the invention in various
tissues (expression set, Table 157) and the phenotypic
performance (Tables 166-170) according to the
correlation vectors (Corr. ID) specified in Table 160. “R” =
Pearson correlation coefficient; “P” = p value

| Gene Name | R | P value | Exp. set | Corr. ID |
|---|---|---|---|---|
| LBY531 | 0.70 | 7.35E−06 | 1 | 35 |

TABLE 178
Correlation between the expression level
of selected genes of some embodiments of the invention in
various tissues and the phenotypic performance under
Low N growth stress conditions across Sorghum
accessions
(Tables 171-175) according to the
correlation vectors (Con. ID)
specified in Table 159.
“R” = Pearson correlation coefficient; “P” = p value
Provided are the correlations (R) between the
expression levels of the genes of some
embodiments of the invention in various tissues
(expression set, Table 157) and the phenotypic
performance

| Gene Name | R | P value | Exp. set | Corr. ID |
|---|---|---|---|---|
| LBY531 | 0.77 | 1.54E−02 | 1 | 60 |

### Example 17

### Plant Fiber Development in Cotton Production of Cotton Transcriptome and High Throughput Correlation Analysis Using Cotton Oligonucleotide Microarray

[1360] In order to conduct high throughput gene expression correlation analysis, the present inventors used cotton oligonucleotide microarray, designed and produced by “Comparative Evolutionary Genomics of Cotton” [cottonevolution (dot) info/]. This Cotton Oligonucleotide Microarray is composed of 12,006 Integrated DNA Technologies (IDT) oligonucleotides derived from an assembly of more than 180,000 Gossypium ESTs sequenced from 30 cDNA libraries. For additional details see PCT/IL2005/000627 and PCT/IL2007/001590 which are fully incorporated herein by reference.

TABLE 179
Cotton transcriptome experimental sets
Provided are the cotton transcriptome expression sets.
“5 d” = 5 days post anthesis; “10 d” = 10 days post anthesis;
“15 d” = 15 days post anthesis. “DPA” = days-post-anthesis.

| Expression Set | Set ID |
|---|---|
| cotton fiber 5d | 1 |
| cotton fiber 15d | 2 |
| cotton fiber 10d | 3 |

[1361] In order to define correlations between the levels of RNA expression and fiber length, fibers from 8 different cotton lines were analyzed. These fibers were selected showing very good fiber quality and high lint index (Pima types, originating from other cotton species, namely G. barbadense), different levels of quality and lint indexes from various G. hirsutum lines: good quality and high lint index (Acala type), and poor quality and short lint index (Tamcot type, and old varieties). A summary of the fiber length of the different lines is provided in Table 180.

[1362] Experimental Procedures

[1363] RNA extraction—Fiber development stages, representing different fiber characteristics, at 5, 10 and 15 DPA were sampled and RNA was extracted as described above.

[1364] Fiber length assessment—Fiber length of the selected cotton lines was measured using fibrograph. The fibrograph system was used to compute length in terms of “Upper Half Mean” length. The upper half mean (UHM) is the average length of longer half of the fiber distribution. The fibrograph measures length in span lengths at a given percentage point World Wide Web (dot) cottoninc (dot) com/ClassificationofCotton/?Pg=4#Length].

[1365] Experimental Results

[1366] Eight different cotton lines were grown, and their fiber length was measured. The fibers UHM values are summarized in Table 180 herein below. The R square was calculated (Table 181).

TABLE 180
Summary of the fiber length of the 8 different cotton lines
Presented are the fiber length means of 8 different cotton lines.

| Line/Correlation ID | Fiber Length (UHM) |
|---|---|
| Line-1 | 1.21 |
| Line-2 | 1.10 |
| Line-3 | 1.36 |
| Line-4 | 1.26 |
| Line-5 | 0.89 |
| Line-6 | 1.01 |
| Line-7 | 1.06 |
| Line-8 | 1.15 |

TABLE 181
Correlation between the expression level of selected genes
of some embodiments of the invention in various tissues and
the phenotypic performance under normal conditions in cotton

| Gene | | | Exp. | Corr. | Gene | | | Exp. | Corr. |
|---|---|---|---|---|---|---|---|---|---|
| Name | R | P value | set | ID | Name | R | P value | set | ID |
| LBY515 | 0.80 | 1.63E−02 | 1 | 1 | LBY515 | 0.84 | 1.93E−02 | 3 | 1 |

Table 181. Correlations (R) between the genes expression levels in various tissues and the phenotypic performance.
“Corr.” = correlation;
“Correlation ID 1” = fiber length.
“Exp. Set”—Expression set (according to Table 179).
“R” = Pearson correlation coefficient;
“P” = p value.

### Example 18

### Production of Foxtail Millet Transcriptome and High Throughput Correlation Analysis Using 60K Foxtail Millet Oligonucleotide Micro-Array

[1367] In order to produce a high throughput correlation analysis comparing between plant phenotype and gene expression level, the present inventors utilized a foxtail millet oligonucleotide micro-array, produced by Agilent Technologies [chem. (dot) agilent (dot) com/Scripts/PDS (dot) asp?1Page=50879]. The array oligonucleotide represents about 60K foxtail millet genes and transcripts. In order to define correlations between the levels of RNA expression and yield or vigor related parameters, various plant characteristics of 14 different foxtail millet accessions were analyzed. Among them, 11 accessions encompassing the observed variance were selected for RNA expression analysis. The correlation between the RNA levels and the characterized parameters was analyzed using Pearson correlation test [davidmlane (dot) com/hyperstat/A34739 (dot) html].

[1368] Experimental Procedures

[1369] Fourteen Foxtail millet accessions in 5 repetitive plots, in the field. Foxtail millet seeds were sown in soil and grown under normal condition [15 units of Nitrogen (kg nitrogen per dunam)] and reduced nitrogen fertilization (2.5-3.0 units of Nitrogen in the soil (based on soil measurements).

[1370] Analyzed Foxtail millet tissues—tissues at different developmental stages [leaf, flower, head, root, vein and stem], representing different plant characteristics, were sampled and RNA was extracted as described above. Each micro-array expression information tissue type has received a Set ID as summarized in Tables 182-183 below.

TABLE 182
Foxtail millet transcriptome expression
sets under normal conditions
Provided are the foxtail millet transcriptome expression
sets under normal conditions

| Expression Set | Set ID |
|---|---|
| flag leaf grown under Normal conditions, grain filling stage | 1 |
| flag leaf grown under Normal conditions, heading stage | 2 |
| flower grown under Normal conditions, heading stage | 3 |
| head grown under Normal conditions, grain filling stage | 4 |
| leaf grown under Normal conditions, seedling stage | 5 |
| low stem grown under Normal conditions, heading stage | 6 |
| mature leaf grown under Normal conditions, grain filling stage | 7 |
| root grown under Normal conditions, seedling stage | 8 |
| stem grown under Normal conditions, seedling stage | 9 |
| stem node grown under Normal conditions, grain filling stage | 10 |
| up stem grown under Normal conditions, grain filling stage | 11 |
| up stem grown under Normal conditions, heading stage | 12 |
| vein grown under Normal conditions, grain filling stage | 13 |

TABLE 183
Foxtail millet transcriptome expression sets under low N conditions
Provided are the foxtail millet transcriptome expression
sets under low N conditions.

| Expression Set | Set ID |
|---|---|
| flag leaf grown under Low N conditions, grain filling stage | 1 |
| flag leaf grown under Low N conditions, heading stage | 2 |
| flower grown under Low N conditions, heading stage | 3 |
| head grown under Low N conditions, grain filling stage | 4 |
| low stem grown under Low N conditions, heading stage | 5 |
| mature leaf grown under Low N conditions, grain filling stage | 6 |
| stem node grown under Low N conditions, grain filling stage | 7 |
| up stem grown under Low N conditions, grain filling stage | 8 |
| up stem grown under Low N conditions, heading stage | 9 |
| vein grown under Low N conditions, grain filling stage | 10 |

[1371] Foxtail millet yield components and vigor related parameters assessment—Plants were continuously phenotyped during the growth period and at harvest (Tables 184-185, below). The image analysis system included a personal desktop computer (Intel P4 3.0 GHz processor) and a public domain program—ImageJ 1.37 (Java based image processing program, which was developed at the U.S. National Institutes of Health and freely available on the internet [rsbweb (dot) nih (dot) gov/]. Next, analyzed data was saved to text files and processed using the JMP statistical analysis software (SAS institute).

[1372] The following parameters were collected using digital imaging system:

[1373] At the end of the growing period the grains were separated from the Plant ‘Head’ and the following parameters were measured and collected:

[1374] (i) Average Grain Area (cm²)—A sample of ˜200 grains was weighted, photographed and images were processed using the below described image processing system. The grain area was measured from those images and was divided by the number of grains.

[1375] (ii) Average Grain Length and width (cm)—A sample of ˜200 grains was weighted, photographed and images were processed using the below described image processing system. The sum of grain lengths and width (longest axis) was measured from those images and was divided by the number of grains.

[1376] At the end of the growing period 14 ‘Heads’ were photographed and images were processed using the below described image processing system.

[1377] (i) Head Average Area (cm²)—The ‘Head’ area was measured from those images and was divided by the number of ‘Heads’.

[1378] (ii) Head Average Length (mm)—The ‘Head’ length (longest axis) was measured from those images and was divided by the number of ‘Heads’.

[1379] The image processing system was used, which consists of a personal desktop computer (Intel P4 3.0 GHz processor) and a public domain program—ImageJ 1.37, Java based image processing software, which was developed at the U.S. National Institutes of Health and is freely available on the internet at rsbweb (dot) nih (dot) gov/. Images were captured in resolution of 10 Mega Pixels (3888×2592 pixels) and stored in a low compression JPEG (Joint Photographic Experts Group standard) format. Next, image processing output data for seed area and seed length was saved to text files and analyzed using the JMP statistical analysis software (SAS institute).

[1380] Additional parameters were collected either by sampling 5 plants per plot (SP) or by measuring the parameter across all the plants within the plot (RP).

[1381] Total Grain Weight (gr.)—At the end of the experiment (plant ‘Heads’) heads from plots were collected, the heads were threshed and grains were weighted. In addition, the average grain weight per head was calculated by dividing the total grain weight by number of total heads per plot (based on plot).

[1382] Head weight and head number—At the end of the experiment, heads were harvested from each plot and were counted and weighted (kg.).

[1383] Biomass at harvest—At the end of the experiment the vegetative material from plots was weighted.

[1384] Dry weight—total weight of the vegetative portion above ground (excluding roots) after drying at 70° C. in oven for 48 hours at harvest.

[1385] Total dry mater per plot—Calculated as Vegetative portion above ground plus all the heads dry weight per plot.

[1386] Number days to anthesis—Calculated as the number of days from sowing till 50% of the plot arrives anthesis.

[1387] Total No. of tillers—all tillers were counted per plot at two time points at the Vegetative growth (30 days after sowing) and at harvest.

[1388] SPAD—Chlorophyll content was determined using a Minolta SPAD 502 chlorophyll meter and measurement was performed at time of flowering. SPAD meter readings were done on young fully developed leaf. Three measurements per leaf were taken per plot.

[1389] Root FW (gr.), root length (cm) and No. of lateral roots—one plant per plot (5 repeated plots) were selected for measurement of root weight, root length and for counting the number of lateral roots formed.

[1390] Shoot FW (fresh weight)—weight of one plant per plot were recorded at different time-points.

[1391] Grain N (H)—% N (nitrogen) content of dry matter in the grain at harvest.

[1392] Head N (GF)—% N content of dry matter in the head at grain filling.

[1393] Total shoot N—calculated as the % N content multiplied by the weight of plant shoot

[1394] Total grain N—calculated as the % N content multiplied by the weight of plant grain yield.

[1395] NUE [kg/kg]—was calculated based on Formula 51.

[1396] NUpE [kg/kg]—was calculated based on Formula 52.

[1397] Grain NUtE—was calculated based on Formula 55.

[1398] Total NUtE was calculated based on Formula 53.

[1399] Stem volume—was calculated based on Formula 50 above.

[1400] Stem density—was calculated based on Formula 54.

[1401] Maintenance of performance under low N conditions—Represent ratio for the specified parameter of low N condition results divided by Normal conditions results (maintenance of phenotype under low N in comparison to normal conditions).

[1402] Data parameters collected are summarized in Tables 184-185 herein below

TABLE 184
Foxtail millet correlated parameters
under normal and low N conditions (vectors)-set 1
Provided are the foxtail millet collected parameters
under normal conditions. “num” = number;
“gr.” = grams; “F” = flowering stage; “H” = harvest stage;
“cm” = centimeter; “N” = nitrogen;
“num” = number; “NutE” = Nitrogen
“GF” = grain filling stage; “FW” = fresh weight, “DW” = dry weight;
utilization efficiency; “NUE” = Nitrogen use efficiency; “NHI” = nitrogen
harvest index; “NupE” = “RGR” = relative growth rate.
Nitrogen uptake efficiency; “SPAD” = chlorophyll
levels; “Avr” = average;

| Correlated parameter with | Correlation ID |
|---|---|
| Grain area [mm²] | 1 |
| Grain length [mm] | 2 |
| Grain Perimeter [mm] | 3 |
| Grain width [mm] | 4 |
| Grains yield (RP) [gr.] | 5 |
| Grains Yield per plant (RP) [gr.] | 6 |
| Heads FW (RP) [gr.] | 7 |
| Heads FW (SP) [gr.] | 8 |
| Heads num (SP) [number] | 9 |
| Heads weight (RP) [gr.] | 10 |
| Heads weight (SP) [gr.] | 11 |
| 1000 grain weight [gr.] | 12 |
| Heads weight per plant (RP) [gr.] | 13 |
| Leaves num 1 [number] | 14 |
| Leaves num 2 [number] | 15 |
| Leaves num 3 [number] | 16 |
| Leaves num 4 [number] | 17 |
| Leaves temperature 1 [° C.] | 18 |
| Leaves temperature 2 [° C.] | 19 |
| Lower Stem DW (F) [gr.] | 20 |
| Lower Stem FW (F) [gr.] | 21 |
| Lower Stem length (F) [cm] | 22 |
| Lower Stem width (F) [cm] | 23 |
| Num days to Heading (field) [days] | 24 |
| Num days to Maturity [days] | 25 |
| Num lateral roots [number] | 26 |
| Plant height growth [cm/day] | 27 |
| Plant height 1 [cm] | 28 |
| Plant height 2 [cm] | 29 |
| Plant height 3 [cm] | 30 |
| Plant height 4 [cm] | 31 |
| Plant num at harvest [number] | 32 |
| Plant weight growth [gr./day] | 33 |
| Root length [cm] | 34 |
| Shoot DW 1 [gr.] | 35 |
| Shoot DW 2 [gr.] | 36 |
| Shoot DW 3 [gr.] | 37 |
| SPAD (F) [SPAD unit] | 38 |
| SPAD 1 [SPAD unit] | 39 |
| SPAD 2 [SPAD unit] | 40 |
| Tillering 1 [number] | 41 |
| Tillering 2 [number] | 42 |
| Tillering 3 [number] | 43 |
| Upper Stem DW (F) [gr.] | 44 |
| Upper Stem FW (F) [gr.] | 45 |
| Upper Stem length (F) [cm] | 46 |
| Upper Stem width (F) [cm] | 47 |
| Vegetative DW (RP) [gr.] | 48 |
| Vegetative DW (SP) [gr.] | 49 |
| Vegetative DW per plant [gr.] | 50 |
| Vegetative FW (RP) [gr.] | 51 |
| Vegetative FW (SP) [gr.] | 52 |

TABLE 185
Foxtail millet additional correlated parameters under
normal and low N conditions (vectors)-set 2
Provided are the foxtail millet collected parameters
under normal conditions. “num” =
number; “gr.” = grams; “mg” =
milligram; “F” = flowering stage;
“H” = harvest stage; “cm” = centimeter;
“DW” = dry weight; “num” = number;
“N” = nitrogen; “GF” = grain filling
stage; “FW” = fresh weight,
efficiency; “NHI” = nitrogen harvest
“NutE” = Nitrogen utilization
efficiency; “NUE” = Nitrogen use
levels; “vs.” = versus.
index; “NupE” = Nitrogen uptake
efficiency; “SPAD” = chlorophyll

| Correlated parameter with | Correlation ID |
|---|---|
| NUE [ratio] | 1 |
| Total NUtE [ratio] | 2 |
| Grain NUtE [ratio] | 3 |
| NUpE [ratio] | 4 |
| N harvest index [ratio] | 5 |
| Head N (GF) [%] | 6 |
| Total grain N (H) [mg] | 7 |
| Grain N (H) [%] | 8 |
| Total shoot N (H) [mg] | 9 |
| Shoot N (H) [%] | 10 |
| Grain C vs N (H) [ratio] | 11 |
| Head C vs. N (GF) [ratio] | 12 |
| Shoot C vs N (H) [ratio] | 13 |

[1403] Experimental Results

[1404] Fourteen different foxtail millet accessions were grown and characterized for different parameters as described above. The average for each of the measured parameters was calculated using the JMP software and values are summarized in Tables 186-193 below. Subsequent correlation analysis between the various transcriptome sets and the average parameters was conducted (Tables 194-197). Follow, results were integrated to the database.

TABLE 186
Measured parameters of correlation IDs in foxtail millet accessions under
normal conditions (set 1 parameters)

| Corr. | Line | | | | | | |
|---|---|---|---|---|---|---|---|
| ID | Line-1 | Line-2 | Line-3 | Line-4 | Line-5 | Line-6 | Line-7 |
| 1 | 0.04 | 0.03 | 0.03 | 0.03 | 0.03 | 0.03 | 0.02 |
| 2 | 0.25 | 0.26 | 0.26 | 0.25 | 0.27 | 0.27 | 0.20 |
| 3 | 0.72 | 0.68 | 0.69 | 0.69 | 0.72 | 0.72 | 0.58 |
| 4 | 0.19 | 0.15 | 0.15 | 0.16 | 0.16 | 0.16 | 0.16 |
| 5 | 1086.00 | 679.20 | 727.60 | 797.60 | 792.40 | 856.80 | 902.80 |
| 6 | 34.70 | 23.00 | 24.80 | 31.10 | 26.60 | 28.30 | 34.90 |
| 7 | 1.80 | 1.12 | 1.07 | 1.34 | 1.32 | 1.11 | 1.36 |
| 8 | 0.25 | 0.17 | 0.18 | 0.27 | 0.21 | 0.23 | 0.28 |
| 9 | 7.20 | 94.00 | 87.60 | 295.40 | 114.00 | 122.40 | 29.80 |
| 10 | 1.31 | 0.87 | 0.89 | 1.07 | 1.02 | 0.98 | 1.10 |
| 11 | 0.18 | 0.10 | 0.12 | 0.25 | 0.21 | 0.23 | 0.22 |
| 12 | 3.48 | 2.20 | 2.49 | 2.63 | 2.66 | 2.66 | 2.18 |
| 13 | 41.80 | 29.30 | 30.30 | 41.60 | 34.40 | 32.50 | 41.80 |
| 14 | 4.07 | 5.33 | 4.13 | 5.07 | 5.00 | 4.27 | 3.67 |
| 15 | NA | NA | NA | NA | NA | NA | NA |
| 16 | 5.30 | 2.90 | 2.94 | 3.55 | 3.90 | 4.12 | 4.40 |
| 17 | 7.90 | 4.70 | 4.50 | 5.30 | 6.55 | 6.35 | 7.15 |
| 18 | NA | NA | NA | 27.70 | 28.00 | 28.30 | 28.20 |
| 19 | 30.18 | NA | NA | NA | NA | NA | NA |
| 20 | 0.71 | NA | 0.30 | 0.16 | 0.15 | 0.20 | 0.61 |
| 21 | 4.21 | NA | 1.43 | 0.69 | 0.64 | 0.64 | 2.50 |
| 22 | 8.35 | NA | 10.25 | 8.75 | 6.69 | 7.64 | 8.07 |
| 23 | 7.24 | NA | 4.16 | 3.12 | 3.33 | 3.18 | 5.57 |
| 24 | 54.00 | 63.40 | 59.40 | 39.60 | 46.00 | 40.80 | 50.00 |
| 25 | NA | NA | NA | NA | 75.00 | 75.00 | NA |
| 26 | NA | NA | NA | NA | NA | NA | NA |
| 27 | 2.10 | 1.42 | 1.32 | 2.10 | 1.93 | 2.44 | 1.84 |
| 28 | 3.72 | 2.92 | 3.25 | 3.55 | 3.45 | 3.68 | 2.92 |
| 29 | NA | NA | NA | NA | NA | NA | NA |
| 30 | 26.60 | 17.70 | 18.00 | 25.80 | 23.40 | 28.60 | 21.50 |
| 31 | 46.00 | 31.80 | 29.80 | 46.10 | 42.90 | 53.60 | 40.70 |
| 32 | 31.40 | 29.60 | 29.80 | 26.00 | 30.00 | 30.20 | 27.80 |
| 33 | 2.85 | 3.12 | 5.11 | 4.35 | 2.87 | 3.11 | 2.93 |
| 34 | NA | NA | NA | NA | NA | NA | NA |
| 35 | 12.70 | 19.50 | 14.40 | 20.70 | 20.60 | 21.00 | 14.00 |
| 36 | 57.10 | 65.70 | 54.30 | 59.80 | 60.80 | 72.00 | 54.00 |
| 37 | 88.90 | 97.90 | 162.70 | 136.00 | 100.40 | 103.30 | 97.30 |
| 38 | 60.80 | NA | NA | 54.70 | 49.90 | 57.50 | 58.60 |
| 39 | NA | NA | NA | 54.70 | 49.90 | 57.50 | 58.60 |
| 40 | 60.82 | NA | NA | NA | NA | NA | NA |
| 41 | NA | NA | NA | NA | NA | NA | NA |
| 42 | 1.10 | 21.10 | 16.80 | 34.30 | 17.10 | 10.80 | 3.30 |
| 43 | 1.40 | 10.30 | 7.60 | 10.70 | 6.40 | 9.20 | 2.22 |
| 44 | 0.81 | NA | 0.24 | 0.24 | 0.14 | 0.21 | 0.32 |
| 45 | 3.24 | NA | 0.48 | 0.67 | 0.43 | 0.50 | 1.28 |
| 46 | 33.70 | NA | 17.70 | 36.20 | 19.60 | 27.90 | 26.20 |
| 47 | 3.68 | NA | 1.78 | 1.51 | 1.59 | 1.50 | 2.55 |
| 48 | 1.06 | 1.56 | 1.17 | 0.67 | 0.67 | 0.71 | 0.87 |
| 49 | 0.13 | 0.23 | 0.21 | 0.11 | 0.11 | 0.13 | 0.16 |
| 50 | 33.30 | 52.80 | 41.10 | 25.80 | 22.50 | 23.50 | 31.90 |
| 51 | 3.19 | 3.85 | 2.78 | 1.98 | 2.15 | 1.57 | 2.19 |
| 52 | 0.45 | 0.57 | 0.53 | 0.39 | 0.27 | 0.37 | NA |

Table 186: Provided are the values of each of the parameters (as described above) measured in Foxtail millet accessions (L = Line). Growth conditions are specified in the experimental procedure section.
“NA” = not available

TABLE 187
Measured parameters of correlation IDs in additional foxtail millet
accessions under normal conditions (set 1 parameters)

| Corr. | Line | | | | | | |
|---|---|---|---|---|---|---|---|
| ID | Line-8 | Line-9 | Line-10 | Line-11 | Line-12 | Line-13 | Line-14 |
| 1 | 0.03 | 0.03 | 0.03 | 0.03 | 0.03 | 2.49 | 3.19 |
| 2 | 0.24 | 0.23 | 0.21 | 0.22 | 0.26 | 0.03 | 0.04 |
| 3 | 0.67 | 0.68 | 0.62 | 0.62 | 0.71 | 0.24 | 0.27 |
| 4 | 0.16 | 0.18 | 0.16 | 0.15 | 0.17 | 0.67 | 0.74 |
| 5 | 803.60 | 1120.80 | 584.40 | 268.00 | 818.80 | 0.16 | 0.17 |
| 6 | 26.40 | 48.40 | 22.30 | 9.40 | 31.50 | 800.80 | 818.40 |
| 7 | 1.16 | 1.69 | 1.44 | 0.57 | 1.13 | 30.10 | 30.00 |
| 8 | 0.25 | 0.40 | 0.25 | 0.13 | 0.25 | 1.23 | 1.27 |
| 9 | 129.20 | 11.00 | 13.20 | 53.60 | 32.80 | 0.31 | 0.29 |
| 10 | 0.98 | 1.29 | 1.04 | 0.42 | 1.00 | 60.60 | 323.20 |
| 11 | 0.24 | 0.30 | 0.18 | 0.10 | 0.22 | 0.99 | 1.02 |
| 12 | 2.57 | 2.90 | 1.93 | 2.19 | 2.82 | 0.24 | 0.23 |
| 13 | 32.10 | 60.60 | 39.90 | 14.60 | 38.40 | 37.50 | 37.40 |
| 14 | 3.77 | 3.79 | 3.73 | 4.00 | 3.90 | 4.03 | 5.23 |
| 15 | NA | NA | NA | NA | NA | NA | NA |
| 16 | 4.10 | 3.90 | 4.35 | 3.25 | 3.30 | 3.75 | 3.70 |
| 17 | 7.00 | 6.65 | 5.90 | 4.80 | 5.20 | 5.20 | 9.25 |
| 18 | 28.00 | NA | NA | NA | NA | NA | 27.50 |
| 19 | NA | 30.92 | NA | NA | NA | NA | NA |
| 20 | 0.17 | 0.87 | NA | NA | 0.55 | 0.93 | 0.09 |
| 21 | 0.76 | 3.13 | NA | NA | 3.64 | 5.49 | 0.39 |
| 22 | 7.15 | 9.15 | NA | NA | 10.18 | 12.26 | 8.97 |
| 23 | 3.61 | 6.95 | NA | NA | 6.23 | 6.75 | 2.23 |
| 24 | 39.00 | 54.00 | 71.00 | 61.00 | 63.00 | 61.00 | 42.00 |
| 25 | 75.00 | NA | 98.00 | 109.00 | 98.00 | 98.00 | NA |
| 26 | NA | NA | NA | NA | NA | NA | NA |
| 27 | 2.56 | 1.91 | 0.97 | 1.16 | 1.35 | 1.50 | 2.12 |
| 28 | 3.63 | 4.12 | 2.47 | 3.10 | 3.58 | 3.43 | 3.63 |
| 29 | NA | NA | NA | NA | NA | NA | NA |
| 30 | 30.50 | 26.00 | 16.80 | 17.80 | 19.50 | 20.80 | 24.60 |
| 31 | 55.60 | 42.10 | 20.50 | 25.80 | 30.30 | 33.30 | 47.30 |
| 32 | 30.80 | 23.60 | 26.00 | 29.40 | 26.20 | 27.00 | 27.40 |
| 33 | 3.40 | 4.79 | 3.15 | 3.41 | 3.12 | 2.04 | 4.51 |
| 34 | NA | NA | NA | NA | NA | NA | NA |
| 35 | 18.80 | 14.20 | 11.60 | 19.60 | 18.40 | 10.80 | 17.10 |
| 36 | 71.70 | 87.50 | 52.60 | 52.30 | 77.30 | 63.50 | 66.50 |
| 37 | 118.40 | 142.40 | 98.20 | 116.80 | 103.20 | 72.90 | 143.60 |
| 38 | 55.40 | 55.00 | NA | NA | NA | NA | 55.90 |
| 39 | 55.40 | NA | NA | NA | NA | NA | 55.90 |
| 40 | NA | 55.04 | NA | NA | NA | NA | NA |
| 41 | NA | NA | NA | NA | NA | NA | NA |
| 42 | 11.80 | 2.20 | 3.00 | 9.50 | 6.80 | 4.50 | 39.10 |
| 43 | 4.67 | 2.70 | 3.50 | 6.50 | 5.80 | 6.80 | 16.70 |
| 44 | 0.53 | 0.41 | NA | NA | 0.37 | 0.77 | 0.08 |
| 45 | 0.93 | 1.49 | NA | NA | 0.68 | 0.89 | 0.21 |
| 46 | 38.70 | 24.50 | NA | NA | 21.90 | 16.50 | 21.90 |
| 47 | 1.90 | 3.19 | NA | NA | 1.92 | 2.69 | 0.97 |
| 48 | 0.58 | 0.98 | 1.91 | 2.80 | 1.34 | 1.53 | 0.88 |
| 49 | 0.12 | 0.18 | 0.34 | 0.57 | 0.29 | 0.44 | 0.18 |
| 50 | 18.90 | 42.00 | 73.70 | 101.20 | 51.40 | 57.70 | 35.10 |
| 51 | 1.68 | 2.42 | 5.52 | 5.17 | 3.34 | 3.63 | 2.05 |
| 52 | 0.37 | 0.58 | 0.97 | 1.10 | 0.72 | 1.04 | 0.44 |

Table 187: Provided are the values of each of the parameters (as described above) measured in Foxtail millet accessions (L = Line). Growth conditions are specified in the experimental procedure section.
“NA” = not available

TABLE 188
Additional measured parameters of correlation IDs in foxtail millet
accessions under normal conditions (set 2 parameters)

| Corr. | Line | | | | | | |
|---|---|---|---|---|---|---|---|
| ID | Line-1 | Line-2 | Line-3 | Line-4 | Line-5 | Line-6 | Line-7 |
| 1 | 1.83 | 1.21 | 1.31 | 1.64 | 1.40 | 1.49 | 1.84 |
| 2 | 0.10 | 0.12 | NA | 0.09 | 0.08 | 0.08 | 0.08 |
| 3 | 0.56 | 0.29 | NA | 0.68 | 0.60 | 0.67 | 0.67 |
| 4 | 35.50 | 32.90 | NA | 34.70 | 31.40 | 33.90 | 41.80 |
| 5 | 1.83 | 1.21 | 1.31 | 1.64 | 1.40 | 1.49 | 1.84 |
| 6 | 1.72 | 2.21 | NA | 2.30 | 1.97 | 2.07 | 2.45 |
| 7 | 612.80 | 543.70 | NA | 613.70 | 551.80 | 602.00 | 742.80 |
| 8 | 1.77 | 2.36 | NA | 1.98 | 2.07 | 2.13 | 2.13 |
| 9 | 62.40 | 80.50 | NA | 45.90 | 44.80 | 42.00 | 51.80 |
| 10 | 1.87 | 1.52 | NA | 1.78 | 1.99 | 1.79 | 1.63 |
| 11 | 23.80 | 18.00 | NA | 21.30 | 20.40 | 19.70 | 19.50 |
| 12 | 24.80 | 19.60 | NA | 18.30 | 21.70 | 20.30 | 17.00 |
| 13 | 22.20 | 27.60 | NA | 23.00 | 19.80 | 20.00 | 23.60 |

Table 188: Provided are the values of each of the parameters (as described above) measured in Foxtail millet accessions (L = Line). Growth conditions are specified in the experimental procedure section.
“NA” = not available

TABLE 189
Additional measured parameters of correlation IDs in additional foxtail
millet accessions under normal conditions (set 2 parameters)

| Corr. | Line | | | | | | |
|---|---|---|---|---|---|---|---|
| ID | Line-8 | Line-9 | Line-10 | Line-11 | Line-12 | Line-13 | Line-14 |
| 1 | 1.39 | 2.54 | 1.18 | 0.49 | 1.66 | 1.58 | 1.58 |
| 2 | NA | 0.10 | 0.12 | NA | 0.13 | NA | 0.10 |
| 3 | NA | 0.76 | 0.25 | NA | 0.50 | NA | 0.33 |
| 4 | NA | 48.90 | 40.60 | 0.00 | 34.00 | NA | 35.90 |
| 5 | 1.39 | 2.54 | 1.18 | 0.49 | 1.66 | 1.58 | 1.58 |
| 6 | NA | 1.93 | 1.81 | NA | 2.17 | NA | 2.26 |
| 7 | NA | 865.00 | 682.10 | NA | 583.60 | NA | 590.90 |
| 8 | NA | 1.79 | 3.05 | NA | 1.85 | NA | 1.97 |
| 9 | NA | 64.00 | 89.20 | NA | 63.00 | NA | 91.30 |
| 10 | NA | 1.53 | 1.21 | NA | 1.23 | NA | 2.60 |
| 11 | NA | 23.20 | 13.60 | NA | 22.70 | NA | 21.50 |
| 12 | NA | 21.70 | 24.10 | NA | 19.80 | NA | 18.40 |
| 13 | NA | 25.00 | 31.70 | NA | 30.80 | NA | 15.60 |

Table 189: Provided are the values of each of the parameters (as described above) measured in Foxtail millet accessions (L = Line). Growth conditions are specified in the experimental procedure section.
“NA” = not available

TABLE 190
Measured parameters of correlation IDs in foxtail millet accessions
under low N conditions (set 1 parameters)

| Corr. | Line | | | | | | |
|---|---|---|---|---|---|---|---|
| ID | Line-1 | Line-2 | Line-3 | Line-4 | Line-5 | Line-6 | Line-7 |
| 1 | 0.04 | 0.03 | 0.03 | 0.03 | 0.03 | 0.03 | 0.02 |
| 2 | 0.25 | 0.26 | 0.26 | 0.25 | 0.27 | 0.28 | 0.20 |
| 3 | 0.73 | 0.68 | 0.69 | 0.70 | 0.72 | 0.73 | 0.58 |
| 4 | 0.19 | 0.15 | 0.15 | 0.16 | 0.16 | 0.16 | 0.16 |
| 5 | 936.40 | 622.80 | 923.60 | 819.50 | 726.80 | 683.50 | 622.80 |
| 6 | 29.90 | 20.50 | 34.40 | 29.70 | 22.30 | 23.00 | 22.60 |
| 7 | 1.60 | 1.01 | 1.38 | 1.42 | 1.14 | 0.89 | 0.97 |
| 8 | 0.26 | 0.16 | 0.22 | 0.26 | 0.16 | 0.18 | 0.19 |
| 9 | 8.20 | 57.00 | 64.60 | 214.00 | 69.20 | 117.80 | 31.80 |
| 10 | 1.18 | 0.81 | 1.17 | 1.07 | 0.88 | 0.77 | 0.76 |
| 11 | 0.18 | 0.16 | 0.18 | 0.23 | 0.17 | 0.19 | 0.14 |
| 12 | 3.71 | 2.38 | 2.52 | 2.72 | 2.78 | 2.82 | 2.30 |
| 13 | 37.60 | 26.50 | 37.20 | 38.70 | 27.00 | 25.90 | 27.60 |
| 14 | 4.27 | 2.60 | 2.80 | 2.53 | 2.60 | 2.28 | 3.57 |
| 15 | NA | NA | NA | NA | NA | NA | NA |
| 16 | 5.90 | 3.45 | 3.20 | 3.50 | 3.95 | 4.15 | 4.90 |
| 17 | 6.50 | 3.65 | 3.15 | 3.90 | 3.75 | 5.05 | 6.15 |
| 18 | NA | NA | NA | 26.30 | 27.10 | 27.80 | 27.70 |
| 19 | 30.83 | NA | NA | NA | NA | NA | NA |
| 20 | 0.99 | NA | 0.30 | 0.18 | 0.14 | 0.25 | 0.55 |
| 21 | 3.57 | NA | 1.50 | 0.68 | 0.54 | 0.94 | 1.93 |
| 22 | 6.81 | NA | 10.46 | 8.34 | 6.76 | 7.46 | 6.44 |
| 23 | 6.85 | NA | 3.89 | 2.96 | 3.19 | 3.18 | 5.08 |
| 24 | 54.00 | 64.00 | 58.60 | 40.40 | 46.00 | 41.60 | 51.60 |
| 25 | 90.00 | 90.00 | 90.00 | NA | 75.00 | NA | NA |
| 26 | NA | NA | NA | NA | NA | NA | NA |
| 27 | 1.64 | 1.00 | 1.01 | 1.81 | 1.50 | 1.88 | 1.38 |
| 28 | 4.21 | 3.76 | 3.72 | 3.87 | 4.27 | 4.19 | 3.43 |
| 29 | NA | NA | NA | NA | NA | NA | NA |
| 30 | 22.50 | 14.00 | 16.20 | 23.90 | 20.90 | 25.10 | 17.80 |
| 31 | 37.10 | 24.10 | 23.50 | 40.30 | 34.30 | 41.90 | 31.40 |
| 32 | 31.40 | 31.00 | 28.60 | 27.50 | 32.40 | 30.00 | 28.20 |
| 33 | 2.21 | 3.42 | 3.31 | 2.21 | 2.83 | 3.79 | 1.75 |
| 34 | NA | NA | NA | NA | NA | NA | NA |
| 35 | 11.00 | 8.20 | 9.40 | 14.40 | 13.50 | 14.90 | 8.00 |
| 36 | 54.70 | 53.90 | 70.20 | 67.80 | 76.00 | 85.70 | 48.30 |
| 37 | 67.30 | 101.50 | 95.20 | 66.70 | 84.30 | 100.30 | 55.00 |
| 38 | 58.60 | 35.90 | 39.10 | 48.30 | 40.70 | 52.30 | 59.10 |
| 39 | 57.90 | 35.90 | 39.10 | 48.30 | 40.70 | 52.30 | 59.10 |
| 40 | 60.61 | NA | NA | NA | NA | NA | NA |
| 41 | NA | NA | NA | NA | NA | NA | NA |
| 42 | 1.05 | 10.95 | 12.35 | 22.60 | 14.00 | 10.60 | 1.60 |
| 43 | 1.30 | 9.10 | 8.25 | 17.00 | 8.10 | 12.25 | 2.20 |
| 44 | 0.75 | NA | 0.31 | 0.18 | 0.18 | 0.25 | 0.51 |
| 45 | 2.65 | NA | 0.59 | 0.54 | 0.49 | 0.55 | 1.57 |
| 46 | 29.10 | NA | 20.10 | 34.90 | 26.90 | 32.60 | 28.30 |
| 47 | 3.29 | NA | 1.71 | 1.33 | 1.53 | 1.54 | 2.58 |
| 48 | 0.97 | 1.11 | 1.14 | 0.59 | 0.51 | 0.58 | 0.56 |
| 49 | 0.13 | 0.16 | 0.18 | 0.11 | 0.08 | 0.12 | 0.11 |
| 50 | 30.70 | 35.90 | 36.90 | 21.70 | 15.50 | 19.30 | 20.20 |
| 51 | 3.03 | 2.55 | 2.86 | 2.22 | 1.97 | 1.21 | 1.37 |
| 52 | 0.39 | 0.36 | 0.44 | 0.38 | 0.19 | 0.32 | NA |

Table 190: Provided are the values of each of the parameters (as described above) measured in Foxtail millet accessions (L = Line). Growth conditions are specified in the experimental procedure section.
“NA” = not available.

TABLE 191
Measured parameters of correlation IDs in additional foxtail millet
accessions under low N conditions (set 1 parameters)

| Corr. | Line | | | | | | |
|---|---|---|---|---|---|---|---|
| ID | Line-8 | Line-9 | Line-10 | Line-11 | Line-12 | Line-13 | Line-14 |
| 1 | 0.03 | 0.03 | 0.03 | 0.03 | 0.04 | 0.03 | 0.04 |
| 2 | 0.25 | 0.23 | 0.21 | 0.23 | 0.26 | 0.25 | 0.28 |
| 3 | 0.68 | 0.69 | 0.62 | 0.63 | 0.72 | 0.69 | 0.75 |
| 4 | 0.16 | 0.18 | 0.16 | 0.16 | 0.17 | 0.16 | 0.17 |
| 5 | 636.50 | 944.00 | 693.60 | 644.80 | 866.40 | 896.00 | 662.50 |
| 6 | 20.70 | 37.10 | 25.40 | 21.00 | 34.00 | 34.80 | 26.20 |
| 7 | 0.98 | 1.52 | 1.48 | 0.99 | 1.15 | 1.28 | 0.98 |
| 8 | 0.17 | 0.31 | 0.28 | 0.15 | 0.27 | 0.30 | 0.23 |
| 9 | 99.20 | 7.00 | 14.60 | 30.80 | 28.80 | 68.20 | 215.20 |
| 10 | 0.78 | 1.14 | 1.07 | 0.81 | 1.01 | 1.09 | 0.82 |
| 11 | 0.18 | 0.24 | 0.21 | 0.12 | 0.24 | 0.26 | 0.17 |
| 12 | 2.59 | 3.15 | 2.03 | 2.48 | 3.45 | 2.85 | 3.06 |
| 13 | 25.30 | 45.10 | 39.30 | 26.10 | 39.70 | 42.40 | 32.70 |
| 14 | 3.00 | 3.40 | 3.83 | 2.90 | 3.07 | 3.37 | 3.20 |
| 15 | NA | NA | NA | NA | NA | NA | NA |
| 16 | 5.00 | 3.95 | 4.45 | 3.55 | 3.75 | 3.80 | 3.35 |
| 17 | 5.20 | 4.75 | 5.15 | 3.20 | 3.65 | 4.30 | 3.30 |
| 18 | 27.90 | NA | NA | NA | NA | NA | 27.20 |
| 19 | NA | 30.61 | NA | NA | NA | NA | NA |
| 20 | 0.16 | 0.96 | NA | NA | 0.48 | 0.94 | 0.08 |
| 21 | 0.54 | 2.98 | NA | NA | 3.93 | 4.39 | 0.30 |
| 22 | 7.16 | 8.50 | NA | NA | 9.94 | 11.84 | 8.67 |
| 23 | 3.11 | 6.43 | NA | NA | 6.52 | 6.08 | 2.13 |
| 24 | 39.00 | 55.40 | 72.40 | 61.00 | 62.20 | 62.40 | 42.80 |
| 25 | 75.00 | 90.00 | 98.00 | 109.00 | 98.00 | 98.00 | NA |
| 26 | NA | NA | NA | NA | NA | NA | NA |
| 27 | 2.10 | 1.47 | 0.84 | 0.83 | 1.10 | 1.18 | 1.25 |
| 28 | 3.72 | 4.66 | 3.11 | 3.57 | 4.01 | 3.75 | 3.48 |
| 29 | NA | NA | NA | NA | NA | NA | NA |
| 30 | 24.20 | 20.70 | 15.10 | 14.00 | 17.70 | 17.40 | 19.20 |
| 31 | 47.50 | 32.80 | 18.20 | 19.80 | 25.60 | 27.20 | 27.90 |
| 32 | 30.80 | 25.20 | 27.60 | 30.60 | 26.80 | 26.60 | 25.50 |
| 33 | 2.18 | 2.52 | 2.71 | 2.37 | 2.63 | 4.09 | 3.44 |
| 34 | NA | NA | NA | NA | NA | NA | NA |
| 35 | 12.90 | 7.90 | 5.60 | 9.90 | 8.70 | 7.60 | 12.70 |
| 36 | 64.00 | 54.80 | 48.00 | 34.80 | 40.30 | 62.00 | 92.40 |
| 37 | 65.90 | 74.20 | 69.50 | 76.90 | 81.10 | 118.80 | 94.60 |
| 38 | 52.90 | 52.20 | 43.80 | 36.60 | 38.70 | 46.20 | 45.40 |
| 39 | 52.90 | 52.30 | 43.80 | 36.60 | 38.70 | 46.20 | 45.40 |
| 40 | NA | 52.50 | NA | NA | NA | NA | NA |
| 41 | NA | NA | NA | NA | NA | NA | NA |
| 42 | 8.45 | 1.20 | 2.20 | 7.80 | 4.90 | 7.56 | 26.95 |
| 43 | 5.40 | 1.90 | 3.30 | 6.11 | 4.00 | 8.60 | 20.62 |
| 44 | 0.34 | 0.51 | NA | NA | 0.68 | 0.76 | 0.09 |
| 45 | 0.72 | 1.53 | NA | NA | 0.90 | 1.34 | 0.20 |
| 46 | 38.60 | 22.30 | NA | NA | 27.20 | 18.10 | 26.90 |
| 47 | 1.71 | 2.82 | NA | NA | 2.00 | 2.57 | 0.90 |
| 48 | 0.47 | 0.74 | 1.74 | 2.39 | 1.17 | 1.53 | 0.74 |
| 49 | 0.08 | 0.13 | 0.33 | 0.35 | 0.28 | 0.38 | 0.13 |
| 50 | 15.40 | 29.10 | 59.50 | 76.50 | 45.20 | 59.10 | 28.70 |
| 51 | 1.35 | 1.99 | 4.55 | 4.37 | 2.75 | 2.67 | 1.43 |
| 52 | 0.24 | 0.43 | 0.87 | 0.64 | 0.65 | 0.80 | 0.33 |

Table 191: Provided are the values of each of the parameters (as described above) measured in Foxtail millet accessions (L = Line). Growth conditions are specified in the experimental procedure section.
“NA” = not available

TABLE 192
Measured parameters of correlation IDs in foxtail millet accessions under
low N conditions (set 2 parameters)

| Corr. | Line | | | | | | |
|---|---|---|---|---|---|---|---|
| ID | Line-1 | Line-2 | Line-3 | Line-4 | Line-5 | Line-6 | Line-7 |
| 1 | 29.90 | 20.50 | 34.40 | 29.70 | 22.30 | 23.00 | 22.60 |
| 2 | NA | 0.12 | 0.10 | 0.10 | 0.10 | 0.09 | NA |
| 3 | NA | 0.41 | 0.73 | 0.74 | 0.85 | 0.74 | NA |
| 4 | NA | 464.80 | 688.20 | 516.10 | 380.00 | 484.90 | NA |
| 5 | NA | 0.89 | 0.93 | 0.92 | 0.93 | 0.94 | NA |
| 6 | NA | 1.97 | 1.84 | 1.20 | 1.64 | 1.23 | NA |
| 7 | NA | 415.30 | 641.00 | 475.70 | 353.90 | 453.80 | NA |
| 8 | NA | 2.03 | 1.86 | 1.60 | 1.59 | 1.97 | NA |
| 9 | NA | 49.50 | 47.20 | 40.40 | 26.20 | 31.10 | NA |
| 10 | NA | 1.38 | 1.28 | 1.86 | 1.68 | 1.61 | NA |
| 11 | NA | 20.70 | 22.70 | 25.70 | 26.40 | 21.30 | NA |
| 12 | NA | 59.70 | 23.30 | 36.00 | 25.70 | 33.80 | NA |
| 13 | NA | 28.20 | 29.60 | 20.60 | 22.40 | 20.20 | NA |

Table 192: Provided are the values of each of the parameters (as described above) measured in Foxtail millet accessions (L = Line). Growth conditions are specified in the experimental procedure section.
“NA” = not available

TABLE 193
Measured parameters of correlation IDs in additional foxtail millet
accessions under low N conditions (set 2 parameters)

| Corr. | Line | | | | | | |
|---|---|---|---|---|---|---|---|
| ID | Line-8 | Line-9 | Line-10 | Line-11 | Line-12 | Line-13 | Line-14 |
| 1 | 20.70 | 37.10 | 25.40 | 21.00 | 34.00 | 34.80 | 26.20 |
| 2 | 0.07 | 0.12 | 0.16 | NA | 0.12 | NA | 0.10 |
| 3 | 0.78 | 0.87 | 0.36 | NA | 0.72 | NA | 0.47 |
| 4 | 493.50 | 572.80 | 517.90 | 0.00 | 661.90 | NA | 565.20 |
| 5 | 0.95 | 0.93 | 0.86 | NA | 0.93 | NA | 0.90 |
| 6 | 1.91 | 1.92 | 1.71 | NA | 2.10 | NA | 2.13 |
| 7 | 466.80 | 529.90 | 446.50 | NA | 614.60 | NA | 508.80 |
| 8 | 2.26 | 1.43 | 1.76 | NA | 1.81 | NA | 1.94 |
| 9 | 26.70 | 42.80 | 71.50 | NA | 47.30 | NA | 56.40 |
| 10 | 1.73 | 1.47 | 1.20 | NA | 1.05 | NA | 1.96 |
| 11 | 18.80 | 28.90 | 23.90 | NA | 23.20 | NA | 21.70 |
| 12 | 22.60 | 22.10 | 25.40 | NA | 20.60 | NA | 19.80 |
| 13 | 22.10 | 25.00 | 31.80 | NA | 35.80 | NA | 20.10 |

Table 193: Provided are the values of each of the parameters (as described above) measured in Foxtail millet accessions (L = Line). Growth conditions are specified in the experimental procedure section.
“NA” = not available

TABLE 194
Correlation between the expression level of selected genes of some embodiments
of the invention in various tissues and the phenotypic performance under normal
conditions across Foxtail millet varieties (set 1)

| Gene | | | Exp. | Corr. | Gene | | | Exp. | Corr. |
|---|---|---|---|---|---|---|---|---|---|
| Name | R | P value | set | ID | Name | R | P value | set | ID |
| LBY471 | 0.73 | 2.47E−02 | 3 | 44 | LBY471 | 0.74 | 3.60E−02 | 4 | 23 |
| LBY471 | 0.87 | 4.83E−03 | 4 | 47 | LBY471 | 0.88 | 4.05E−03 | 4 | 45 |
| LBY471 | 0.92 | 1.03E−03 | 4 | 20 | LBY471 | 0.79 | 7.14E−03 | 9 | 14 |
| LBY471 | 0.87 | 2.31E−03 | 9 | 47 | LBY471 | 0.76 | 1.02E−02 | 9 | 16 |
| LBY471 | 0.93 | 3.31E−04 | 9 | 45 | LBY471 | 0.80 | 5.64E−03 | 9 | 17 |
| LBY471 | 0.80 | 1.03E−02 | 9 | 20 | LBY471 | 0.72 | 1.96E−02 | 2 | 6 |
| LBY471 | 0.91 | 7.92E−04 | 2 | 22 | LBY472 | 0.72 | 1.97E−02 | 3 | 12 |
| LBY472 | 0.70 | 3.40E−02 | 3 | 44 | LBY472 | 0.82 | 3.48E−03 | 3 | 16 |
| LBY472 | 0.73 | 2.43E−02 | 3 | 45 | LBY472 | 0.95 | 8.15E−04 | 8 | 22 |
| LBY472 | 0.73 | 1.55E−02 | 1 | 14 | LBY472 | 0.74 | 2.33E−02 | 9 | 44 |
| LBY472 | 0.81 | 8.37E−03 | 9 | 23 | LBY472 | 0.78 | 7.34E−03 | 9 | 14 |
| LBY472 | 0.95 | 8.68E−05 | 9 | 47 | LBY472 | 0.89 | 1.51E−03 | 9 | 45 |
| LBY472 | 0.93 | 2.83E−04 | 9 | 20 | LBY472 | 0.74 | 2.13E−02 | 2 | 44 |
| LBY472 | 0.77 | 1.57E−02 | 2 | 47 | LBY472 | 0.87 | 1.21E−03 | 2 | 16 |
| LBY472 | 0.79 | 1.08E−02 | 2 | 45 | LBY472 | 0.76 | 1.13E−02 | 2 | 17 |
| LBY473 | 0.71 | 2.16E−02 | 3 | 14 | LBY473 | 0.79 | 1.05E−02 | 3 | 47 |
| LBY473 | 0.71 | 2.07E−02 | 3 | 16 | LBY473 | 0.73 | 2.57E−02 | 3 | 45 |
| LBY473 | 0.70 | 2.30E−02 | 3 | 17 | LBY473 | 0.73 | 2.51E−02 | 3 | 20 |
| LBY473 | 0.76 | 1.07E−02 | 9 | 16 | LBY473 | 0.71 | 3.33E−02 | 9 | 45 |
| LBY474 | 0.86 | 1.46E−03 | 3 | 12 | LBY474 | 0.74 | 1.51E−02 | 3 | 14 |
| LBY474 | 0.73 | 1.68E−02 | 3 | 1 | LBY474 | 0.77 | 1.50E−02 | 3 | 45 |
| LBY474 | 0.72 | 1.95E−02 | 3 | 4 | LBY474 | 0.83 | 6.02E−03 | 8 | 43 |
| LBY474 | 0.78 | 1.26E−02 | 8 | 9 | LBY474 | 0.82 | 6.34E−03 | 8 | 42 |
| LBY474 | 0.78 | 8.05E−03 | 9 | 14 | LBY474 | 0.83 | 5.26E−03 | 9 | 47 |
| LBY474 | 0.79 | 6.47E−03 | 9 | 51 | LBY474 | 0.91 | 7.67E−04 | 9 | 45 |
| LBY474 | 0.70 | 2.41E−02 | 9 | 17 | LBY474 | 0.74 | 2.29E−02 | 9 | 20 |
| LBY511 | 0.72 | 1.90E−02 | 3 | 14 | LBY511 | 0.74 | 2.19E−02 | 3 | 47 |
| LBY511 | 0.77 | 9.69E−03 | 3 | 39 | LBY511 | 0.77 | 9.07E−03 | 3 | 38 |
| LBY511 | 0.77 | 1.46E−02 | 3 | 45 | LBY511 | 0.73 | 1.70E−02 | 3 | 17 |
| LBY511 | 0.78 | 1.23E−02 | 3 | 20 | LBY511 | 0.74 | 1.45E−02 | 3 | 4 |
| LBY511 | 0.72 | 3.03E−02 | 8 | 36 | LBY512 | 0.77 | 9.89E−03 | 3 | 43 |
| LBY512 | 0.71 | 2.09E−02 | 3 | 9 | LBY512 | 0.75 | 1.23E−02 | 3 | 42 |
| LBY512 | 0.71 | 2.23E−02 | 4 | 43 | LBY512 | 0.71 | 2.26E−02 | 4 | 36 |
| LBY512 | 0.76 | 1.05E−02 | 2 | 39 | LBY512 | 0.76 | 1.08E−02 | 2 | 38 |
| LBY512 | 0.75 | 1.25E−02 | 2 | 17 | LBY513 | 0.71 | 3.38E−02 | 8 | 3 |
| LBY513 | 0.81 | 8.39E−03 | 8 | 36 | LBY513 | 0.75 | 1.33E−02 | 1 | 28 |
| LBY513 | 0.72 | 2.73E−02 | 9 | 47 | LBY513 | 0.80 | 5.80E−03 | 9 | 16 |
| LBY513 | 0.81 | 7.78E−03 | 9 | 45 | LBY513 | 0.74 | 1.48E−02 | 9 | 17 |
| LBY514 | 0.89 | 1.38E−03 | 8 | 33 | LBY514 | 0.79 | 1.16E−02 | 8 | 37 |
| LBY514 | 0.73 | 1.73E−02 | 1 | 11 | LBY514 | 0.80 | 5.86E−03 | 1 | 49 |
| LBY514 | 0.77 | 9.71E−03 | 1 | 52 | LBY514 | 0.71 | 7.53E−02 | 1 | 25 |
| LBY514 | 0.71 | 2.27E−02 | 4 | 48 | LBY514 | 0.76 | 1.13E−02 | 4 | 51 |
| LBY514 | 0.77 | 1.54E−02 | 9 | 44 | LBY514 | 0.84 | 2.43E−03 | 9 | 14 |
| LBY514 | 0.80 | 8.88E−03 | 9 | 47 | LBY514 | 0.88 | 7.73E−04 | 9 | 16 |
| LBY514 | 0.92 | 4.23E−04 | 9 | 45 | LBY514 | 0.87 | 1.21E−03 | 9 | 17 |
| LBY514 | 0.72 | 2.81E−02 | 9 | 20 | LBY514 | 0.76 | 1.14E−02 | 2 | 11 |

Table 194. Provided are the correlations (R) between the genes expression levels in various tissues and the phenotypic performance.
“Corr. ID”—correlation vector ID according to the correlated parameters specified in Table 184.
“Exp. Set”—Expression set specified in Table 182.
“R” = Pearson correlation coefficient;
“P” = p value

TABLE 195
Correlation between the expression level of selected genes of some embodiments
of the invention in various tissues and the phenotypic performance under normal
conditions (set 2 parameters) across Foxtail millet varieties

| Gene | | | Exp. | Corr. | Gene | | | Exp. | Corr. |
|---|---|---|---|---|---|---|---|---|---|
| Name | R | P value | set | ID | Name | R | P value | set | ID |
| LBY471 | 0.75 | 1.32E−02 | 3 | 1 | LBY471 | 0.85 | 7.38E−03 | 3 | 7 |
| LBY471 | 0.71 | 4.66E−02 | 3 | 3 | LBY471 | 0.81 | 1.48E−02 | 3 | 4 |
| LBY471 | 0.75 | 1.32E−02 | 3 | 5 | LBY471 | 0.89 | 3.05E−03 | 1 | 2 |
| LBY471 | 0.90 | 2.10E−03 | 1 | 13 | LBY471 | 0.87 | 2.14E−03 | 12 | 7 |
| LBY471 | 0.84 | 4.37E−03 | 12 | 4 | LBY472 | 0.76 | 2.91E−02 | 3 | 12 |
| LBY472 | 0.71 | 7.50E−02 | 2 | 11 | LBY472 | 0.72 | 4.55E−02 | 1 | 9 |
| LBY472 | 0.83 | 5.36E−03 | 12 | 13 | LBY473 | 0.71 | 1.12E−01 | 8 | 1 |
| LBY473 | 0.71 | 1.12E−01 | 8 | 5 | LBY473 | 0.76 | 1.72E−02 | 12 | 7 |
| LBY473 | 0.74 | 2.37E−02 | 12 | 4 | LBY474 | 0.72 | 4.53E−02 | 3 | 3 |
| LBY474 | 0.84 | 9.09E−03 | 5 | 12 | LBY474 | 0.80 | 1.74E−02 | 9 | 12 |
| LBY474 | 0.88 | 3.58E−03 | 9 | 8 | LBY474 | 0.83 | 5.26E−03 | 12 | 7 |
| LBY474 | 0.85 | 3.41E−03 | 12 | 4 | LBY511 | 0.82 | 7.09E−03 | 4 | 7 |
| LBY511 | 0.86 | 3.23E−03 | 4 | 4 | LBY511 | 0.76 | 2.91E−02 | 5 | 12 |
| LBY511 | 0.81 | 1.41E−02 | 5 | 8 | LBY511 | 0.74 | 3.50E−02 | 11 | 7 |
| LBY511 | 0.76 | 2.87E−02 | 11 | 13 | LBY511 | 0.74 | 3.61E−02 | 11 | 4 |
| LBY511 | 0.89 | 3.39E−03 | 9 | 12 | LBY511 | 0.84 | 8.47E−03 | 9 | 8 |
| LBY511 | 0.73 | 1.70E−02 | 12 | 1 | LBY511 | 0.71 | 3.16E−02 | 12 | 7 |
| LBY511 | 0.73 | 1.70E−02 | 12 | 5 | LBY512 | 0.71 | 3.38E−02 | 4 | 10 |
| LBY512 | 0.80 | 2.96E−02 | 2 | 12 | LBY512 | 0.74 | 3.68E−02 | 5 | 6 |
| LBY512 | 0.80 | 1.69E−02 | 11 | 2 | LBY512 | 0.83 | 1.16E−02 | 11 | 13 |
| LBY512 | 0.94 | 4.39E−04 | 11 | 8 | LBY512 | 0.71 | 4.63E−02 | 1 | 9 |
| LBY512 | 0.81 | 8.57E−03 | 12 | 10 | LBY513 | 0.76 | 1.78E−02 | 4 | 10 |
| LBY513 | 0.80 | 2.94E−02 | 2 | 3 | LBY513 | 0.76 | 2.99E−02 | 1 | 12 |
| LBY513 | 0.73 | 2.42E−02 | 12 | 7 | LBY513 | 0.71 | 3.33E−02 | 12 | 4 |
| LBY514 | 0.75 | 1.94E−02 | 4 | 9 | LBY514 | 0.71 | 3.34E−02 | 4 | 8 |
| LBY514 | 0.79 | 1.97E−02 | 3 | 10 | LBY514 | 0.71 | 7.44E−02 | 2 | 6 |
| LBY514 | 0.71 | 4.83E−02 | 1 | 13 | LBY514 | 0.86 | 2.62E−03 | 12 | 7 |
| LBY514 | 0.87 | 2.28E−03 | 12 | 4 | | | | | |

Table 195. Provided are the correlations (R) between the genes expression levels in various tissues and the phenotypic performance.
“Corr. ID”—correlation vector ID according to the correlated parameters specified in Table 185.
“Exp. Set”—Expression set specified in Table 182.
“R” = Pearson correlation coefficient;
“P” = p value

TABLE 196
Correlation between the expression level of selected genes of some embodiments of
the invention in various tissues and the phenotypic performance under low N conditions
(set 1 parameters) across Foxtail millet varieties

| Gene | | | Exp. | Corr. | Gene | | | Exp. | Corr. |
|---|---|---|---|---|---|---|---|---|---|
| Name | R | P value | set | ID | Name | R | P value | set | ID |
| LBY471 | 0.78 | 8.06E−03 | 3 | 8 | LBY471 | 0.75 | 1.32E−02 | 2 | 7 |
| LBY471 | 0.73 | 1.75E−02 | 3 | 13 | LBY471 | 0.76 | 1.09E−02 | 2 | 12 |
| LBY471 | 0.74 | 1.50E−02 | 3 | 36 | LBY471 | 0.74 | 3.74E−02 | 10 | 22 |
| LBY471 | 0.76 | 1.12E−02 | 1 | 48 | LBY471 | 0.73 | 1.60E−02 | 12 | 50 |
| LBY471 | 0.81 | 4.54E−03 | 1 | 24 | LBY471 | 0.85 | 3.86E−03 | 12 | 22 |
| LBY471 | 0.77 | 9.70E−03 | 1 | 49 | LBY471 | 0.72 | 2.92E−02 | 12 | 52 |
| LBY471 | 0.71 | 4.96E−02 | 12 | 20 | LBY472 | 0.76 | 7.83E−02 | 7 | 5 |
| LBY472 | 0.71 | 3.22E−02 | 3 | 23 | LBY472 | 0.71 | 3.14E−02 | 2 | 21 |
| LBY472 | 0.73 | 1.62E−02 | 11 | 14 | LBY472 | 0.80 | 1.68E−02 | 11 | 23 |
| LBY472 | 0.76 | 1.06E−02 | 12 | 48 | LBY472 | 0.75 | 1.20E−02 | 11 | 51 |
| LBY472 | 0.77 | 8.84E−03 | 12 | 50 | LBY472 | 0.78 | 7.99E−03 | 11 | 24 |
| LBY472 | 0.81 | 1.57E−02 | 12 | 20 | LBY472 | 0.73 | 1.64E−02 | 11 | 49 |
| LBY472 | 0.87 | 2.02E−03 | 12 | 52 | LBY472 | 0.78 | 2.30E−02 | 11 | 21 |
| LBY473 | 0.71 | 1.12E−01 | 8 | 6 | LBY473 | 0.72 | 1.06E−01 | 7 | 13 |
| LBY473 | 0.84 | 3.66E−02 | 8 | 4 | LBY474 | 0.71 | 1.17E−01 | 7 | 16 |
| LBY474 | 0.96 | 2.66E−03 | 8 | 17 | LBY474 | 0.85 | 3.27E−02 | 7 | 32 |
| LBY474 | 0.72 | 3.02E−02 | 4 | 12 | LBY474 | 0.83 | 6.15E−03 | 6 | 17 |
| LBY474 | 0.75 | 1.90E−02 | 4 | 5 | LBY474 | 0.78 | 1.26E−02 | 2 | 23 |
| LBY474 | 0.83 | 5.12E−03 | 3 | 47 | LBY474 | 0.84 | 2.56E−03 | 2 | 16 |
| LBY474 | 0.76 | 1.05E−02 | 3 | 7 | LBY474 | 0.83 | 3.06E−03 | 2 | 11 |
| LBY474 | 0.82 | 7.23E−03 | 3 | 45 | LBY474 | 0.78 | 1.36E−02 | 2 | 20 |
| LBY474 | 0.87 | 1.03E−03 | 3 | 5 | LBY474 | 0.76 | 1.79E−02 | 2 | 21 |
| LBY474 | 0.72 | 6.82E−02 | 5 | 47 | LBY474 | 0.70 | 3.50E−02 | 4 | 48 |
| LBY474 | 0.71 | 3.10E−02 | 5 | 51 | LBY474 | 0.81 | 7.56E−03 | 4 | 24 |
| LBY474 | 0.76 | 1.70E−02 | 9 | 51 | LBY474 | 0.71 | 2.05E−02 | 11 | 13 |
| LBY474 | 0.72 | 1.80E−02 | 12 | 50 | LBY474 | 0.83 | 5.97E−03 | 11 | 52 |
| LBY511 | 0.72 | 6.55E−02 | 4 | 47 | LBY511 | 0.79 | 3.43E−02 | 3 | 20 |
| LBY511 | 0.70 | 3.47E−02 | 3 | 47 | LBY511 | 0.71 | 2.10E−02 | 2 | 27 |
| LBY511 | 0.82 | 3.73E−03 | 3 | 16 | LBY511 | 0.72 | 1.81E−02 | 2 | 31 |
| LBY511 | 0.80 | 5.37E−03 | 3 | 7 | LBY511 | 0.82 | 3.67E−03 | 2 | 11 |
| LBY511 | 0.78 | 1.37E−02 | 3 | 45 | LBY511 | 0.72 | 1.99E−02 | 2 | 30 |
| LBY511 | 0.85 | 1.66E−03 | 3 | 5 | LBY511 | 0.71 | 5.00E−02 | 10 | 20 |
| LBY511 | 0.86 | 3.28E−03 | 11 | 52 | LBY511 | 0.86 | 2.93E−03 | 8 | 16 |
| LBY511 | 0.73 | 1.70E−02 | 12 | 6 | LBY512 | 0.72 | 1.10E−01 | 7 | 36 |
| LBY512 | 0.83 | 5.56E−03 | 4 | 32 | LBY512 | 0.87 | 1.09E−03 | 2 | 27 |
| LBY512 | 0.88 | 8.37E−04 | 3 | 31 | LBY512 | 0.80 | 5.84E−03 | 2 | 28 |
| LBY512 | 0.85 | 2.05E−03 | 3 | 30 | LBY512 | 0.73 | 2.54E−02 | 1 | 1 |
| LBY512 | 0.71 | 7.13E−02 | 2 | 44 | LBY512 | 0.83 | 6.05E−03 | 1 | 16 |
| LBY512 | 0.77 | 1.56E−02 | 2 | 7 | LBY512 | 0.78 | 1.37E−02 | 1 | 11 |
| LBY512 | 0.81 | 2.81E−02 | 2 | 45 | LBY512 | 0.75 | 1.99E−02 | 1 | 17 |
| LBY512 | 0.84 | 4.24E−03 | 2 | 4 | LBY512 | 0.83 | 6.12E−03 | 4 | 43 |
| LBY512 | 0.73 | 2.46E−02 | 5 | 27 | LBY512 | 0.90 | 1.09E−03 | 4 | 10 |
| LBY512 | 0.73 | 2.58E−02 | 5 | 31 | LBY512 | 0.75 | 5.09E−02 | 4 | 46 |
| LBY512 | 0.79 | 1.09E−02 | 5 | 42 | LBY512 | 0.91 | 2.25E−04 | 10 | 48 |
| LBY512 | 0.91 | 3.07E−04 | 11 | 51 | LBY512 | 0.90 | 3.26E−04 | 10 | 50 |
| LBY512 | 0.83 | 2.71E−03 | 11 | 24 | LBY512 | 0.94 | 6.93E−05 | 10 | 49 |
| LBY512 | 0.90 | 8.76E−04 | 11 | 52 | LBY512 | 0.82 | 3.56E−03 | 12 | 43 |
| LBY512 | 0.81 | 4.67E−03 | 1 | 10 | LBY512 | 0.74 | 1.47E−02 | 12 | 42 |
| LBY512 | 0.72 | 2.72E−02 | 9 | 14 | LBY512 | 0.78 | 8.29E−03 | 11 | 1 |
| LBY512 | 0.75 | 1.25E−02 | 12 | 27 | LBY512 | 0.75 | 1.21E−02 | 11 | 31 |
| LBY512 | 0.72 | 1.98E−02 | 12 | 3 | LBY512 | 0.71 | 2.22E−02 | 11 | 30 |
| LBY512 | 0.74 | 1.35E−02 | 12 | 32 | LBY512 | 0.74 | 1.46E−02 | 11 | 2 |
| LBY513 | 0.78 | 6.49E−02 | 8 | 16 | LBY513 | 0.73 | 1.01E−01 | 7 | 8 |
| LBY513 | 0.78 | 1.25E−02 | 4 | 43 | LBY513 | 0.89 | 1.44E−03 | 3 | 10 |
| LBY513 | 0.71 | 3.11E−02 | 4 | 37 | LBY513 | 0.81 | 7.91E−03 | 3 | 42 |
| LBY513 | 0.75 | 1.19E−02 | 3 | 12 | LBY513 | 0.79 | 3.40E−02 | 4 | 23 |
| LBY513 | 0.80 | 2.96E−02 | 5 | 47 | LBY513 | 0.77 | 4.14E−02 | 4 | 20 |
| LBY513 | 0.88 | 1.77E−03 | 1 | 44 | LBY513 | 0.77 | 1.61E−02 | 12 | 47 |
| LBY513 | 0.71 | 2.19E−02 | 1 | 7 | LBY513 | 0.91 | 6.13E−04 | 12 | 45 |
| LBY514 | 0.89 | 1.67E−02 | 8 | 13 | LBY514 | 0.92 | 9.14E−03 | 7 | 8 |
| LBY514 | 0.80 | 5.56E−02 | 8 | 10 | LBY514 | 0.86 | 1.45E−03 | 2 | 27 |
| LBY514 | 0.78 | 7.29E−03 | 3 | 16 | LBY514 | 0.86 | 1.37E−03 | 2 | 31 |
| LBY514 | 0.82 | 3.99E−03 | 3 | 17 | LBY514 | 0.78 | 7.37E−03 | 2 | 30 |
| LBY514 | 0.80 | 8.95E−03 | 1 | 52 | LBY514 | 0.73 | 1.58E−02 | 11 | 13 |
| LBY514 | 0.76 | 2.79E−02 | 12 | 20 | | | | | |

Table 196. Provided are the correlations (R) between the genes expression levels in various tissues and the phenotypic performance.
“Corr. ID”—correlation vector ID according to the correlated parameters specified in Table 184.
“Exp. Set”—Expression set specified in Table 183.
“R” = Pearson correlation coefficient;
“P” = p value

TABLE 197
Correlation between the expression level of selected genes of some embodiments of
the invention in various tissues and the phenotypic performance under low N conditions
(set 2 parameters) across Foxtail millet varieties

| Gene | | | Exp. | Corr. | Gene | | | Exp. | Corr. |
|---|---|---|---|---|---|---|---|---|---|
| Name | R | P value | set | ID | Name | R | P value | set | ID |
| LBY471 | 0.92 | 1.01E−03 | 8 | 6 | LBY471 | 0.73 | 2.57E−02 | 9 | 2 |
| LBY471 | 0.83 | 5.94E−03 | 1 | 13 | LBY471 | 0.93 | 2.97E−04 | 2 | 4 |
| LBY471 | 0.72 | 1.96E−02 | 2 | 1 | LBY471 | 0.94 | 1.47E−04 | 2 | 7 |
| LBY472 | 0.72 | 2.85E−02 | 3 | 5 | LBY472 | 0.75 | 3.06E−02 | 8 | 4 |
| LBY472 | 0.77 | 2.49E−02 | 8 | 7 | LBY472 | 0.73 | 2.70E−02 | 9 | 2 |
| LBY472 | 0.84 | 4.38E−03 | 1 | 6 | LBY474 | 0.71 | 4.90E−02 | 8 | 10 |
| LBY474 | 0.81 | 8.09E−03 | 9 | 2 | LBY511 | 0.72 | 2.88E−02 | 9 | 3 |
| LBY512 | 0.71 | 2.24E−02 | 4 | 10 | LBY514 | 0.71 | 3.35E−02 | 3 | 3 |
| LBY514 | 0.72 | 2.78E−02 | 9 | 8 | LBY514 | 0.79 | 1.14E−02 | 1 | 13 |
| LBY514 | 0.71 | 2.17E−02 | 4 | 2 | LBY514 | 0.77 | 8.67E−03 | 4 | 9 |
| LBY514 | 0.73 | 2.56E−02 | 2 | 13 | | | | | |

Table 197. Provided are the correlations (R) between the genes expression levels in various tissues and the phenotypic performance.
“Corr. ID”—correlation vector ID according to the correlated parameters specified in Table 185.
“Exp. Set”—Expression set specified in Table 183.
“R” = Pearson correlation coefficient;
“P” = p value.

### Example 19

### Production of Foxtail Millet Transcriptome and High Throughput Correlation Analysis with Yield Related Parameters Measured in Fields Using 65K Foxtail Millet Oligonucleotide Micro-Arrays

[1405] In order to produce a high throughput correlation analysis between plant phenotype and gene expression level, the present inventors utilized a Foxtail millet oligonucleotide micro-array, produced by Agilent Technologies [chem. (dot) agilent (dot) com/Scripts/PDS (dot) asp?1Page=50879]. The array oligonucleotide represents about 65,000 Foxtail millet genes and transcripts. In order to define correlations between the levels of RNA expression with yield components or vigor related parameters, various plant characteristics of 51 different Foxtail millet inbreds were analyzed. Among them, 49 inbreds encompassing the observed variance were selected for RNA expression analysis. The correlation between the RNA levels and the characterized parameters was analyzed using Pearson correlation test [davidmlane (dot) com/hyperstat/A34739 (dot) html].

[1406] Experimental Procedures

[1407] 51 Foxtail millet varieties were grown in 4 repetitive plots, in field. Briefly, the growing protocol was as follows:

[1408] Regular growth conditions: foxtail millet plants were grown in the field using commercial fertilization and irrigation protocols, which include 202 m³ water per dunam (1000 square meters) per entire growth period and fertilization of 12 units of URAN® 32% (Nitrogen Fertilizer Solution; PCS Sales, Northbrook, Ill., USA) (normal growth conditions).

[1409] Analyzed Foxtail millet tissues—49 selected Foxtail millet inbreds were sampled. Tissues [leaf, panicle and peduncle] representing different plant characteristics, from plants growing under normal conditions were sampled and RNA was extracted as described above. Each micro-array expression information tissue type has received a Set ID as summarized in Table 198 below.

TABLE 198
Foxtail millet transcriptome expression sets in field experiment
Provided are the foxtail transcriptome expression sets.
Peduncle = stem below the panicle.

| Expression Set | Set ID |
|---|---|
| Panicle grown under normal conditions, flowering stage | 1 |
| Leaf grown under normal conditions, seedling stage | 2 |
| Peduncle grown under normal conditions, flowering stage | 3 |

[1410] Foxtail millet yield components and vigor related parameters assessment—Plants were phenotyped as shown in Table 199 below. Some of the following parameters were collected using a digital imaging system:

[1411] 1000 grain (seed) weight (gr.)—was calculated using Formula 14 above.

[1412] 1000 grain weight filling rate (gr./day)—was calculated based on Formula 36 above.

[1413] Average heads dry weight per plant at heading (gr.)—At the process of the growing period heads of 3 plants per plot were collected (heading stage). Heads were weighted after oven dry (dry weight), and the weight was divided by the number of plants.

[1414] Average internode length (cm)—Plant heights of 4 plants per plot were measured at harvest and divided by plant number. The average plant height was divided by the average number of nodes.

[1415] Average main tiller leaves dry weight per plant at heading (gr.)—At heading stage, main tiller leaves were collected from 3 plants per plot and dried in an oven to obtain the leaves dry weight. The obtained leaves dry weight was divided by the number of plants.

[1416] Average seedling dry weight (gr.)—At seedling stage, shoot material of 4 plants per plot (without roots) was collected and dried in an oven to obtain the dry weight. The obtained values were divided by the number of plants.

[1417] Average shoot dry weight (gr.)—During the vegetative growing period, shoot material of 3 plants per plot (without roots) was collected and dried in an oven to obtain the dry weight. The obtained values were divided by the number of plants.

[1418] Average total dry matter per plant at harvest (kg)—Average total dry matter per plant was calculated as follows: average head weight per plant at harvest+average vegetative dry weight per plant at harvest.

[1419] Average total dry matter per plant at heading (gr.)—Average total dry matter per plant was calculated as follows: average head weight per plant at heading+average vegetative dry weight per plant at heading.

[1420] Average vegetative dry weight per plant at harvest (kg)—At the end of the growing period all vegetative material (excluding roots and heads) were collected and weighted after oven dry (dry weight). The biomass was then divided by the total number of square meters. To obtain the biomass per plant the biomass per square meter was divided by the number of plants per square meter.

[1421] Average vegetative dry weight per plant at heading (gr.)—At the heading stage, all vegetative material (excluding roots) were collected and weighted after (dry weight) oven dry. The biomass per plant was calculated by dividing total biomass by the number of plants.

[1422] Calculated grains per dunam (number)—Calculated by dividing grains yield per dunam by average grain weight.

[1423] Dry matter partitioning (ratio)—Dry matter partitioning was calculated based on Formula 35.

[1424] Grain area (cm²)—At the end of the growing period the grains were separated from the head. A sample of ˜200 grains were weighted, photographed and images were processed using the below described image processing system. The grain area was measured from those images and was divided by the number of grains.

[1425] Grain fill duration (num)—Duration of grain filling period was calculated by subtracting the number of days to flowering from the number of days to maturity.

[1426] Grain length (cm)—At the end of the growing period the grains were separated from the ear. A sample of ˜200 grains were weighted, photographed and images were processed using the below described image processing system. The sum of grain lengths (longest axis) was measured from those images and was divided by the number of grains.

[1427] Grain width (cm)—At the end of the growing period the grains were separated from the ear. A sample of ˜200 grains were weighted, photographed and images were processed using the below described image processing system. The sum of grain width (longest axis) was measured from those images and was divided by the number of grains.

[1428] Grains yield per dunam (kg)—At the end of the growing period heads were collected (harvest stage). Heads were separately threshed and grains were weighted (grain yield). Grains yield per dunam was calculated by multiplying grain yield per m² by 1000 (dunam is 1000 m²).

[1429] Grains yield per head (gr.)—At the end of the experiment all heads were collected. 6 main heads from 6 plants per plot were separately threshed and grains were weighted. The average grain weight per head was calculated by dividing the total grain weight of the 6 heads by the number of heads.

[1430] Grains yield per plant (gr.)—At the end of the experiment all plants were collected. All heads from 6 plants per plot were separately threshed and grains were weighted. The average grain weight per plant was calculated by dividing the total grain weight of the 6 plants by the number of plants.

[1431] Harvest index (number)—was calculated based on Formula 15 above.

[1432] Head area (cm²)—At the end of the growing period 6 main heads from 6 plants per plot were photographed and images were processed using the below described image processing system. The head area was measured from those images and was divided by the number of heads.

[1433] Head length (cm)—At the end of the growing period 6 heads from 6 plants per plot were photographed and images were processed using the below described image processing system. The head length (longest axis) was measured from those images and was divided by the number of heads.

[1434] Head width (cm)—At the end of the growing period 6 main heads of 6 plants per plot were photographed and images were processed using the below described image processing system. The head width (longest axis) was measured from those images and was divided by the number of heads.

[1435] Heads per plant (number)—At the end of the growing period total number of 6 plants heads per plot was counted and divided by the number of plants.

[1436] Leaves area per plant at heading (cm²)—Total green leaves area per plant at heading. Leaf area of 3 plants was measured separately using a leaf area-meter. The obtained leaf area was divided by 3 to obtain leaf area per plant.

[1437] Leaves dry weight at heading (gr.)—Leaves dry weight was measured at heading stage by collecting all leaves material of 3 plants per plot and weighting it after oven dry (dry weight).

[1438] Leaves num at heading (number)—Plants were characterized for leaf number during the heading stage. Plants were measured for their leaf number by separately counting all green leaves of 3 plants per plot.

[1439] Leaves temperature 1 (° Celsius)—Leaf temperature was measured using Fluke IR thermometer 568 device. Measurements were done on opened flag leaf.

[1440] Lower stem width at heading (mm)—At heading stage lower stem internodes from 3 plants were separated from the plant and their diameter was measured using a caliber.

[1441] Main heads dry weight at harvest (gr.)—At the end of the growing period (harvest stage) main heads of 6 plants per plot were collected and weighted after oven dry (dry weight).

[1442] Main heads grains number (number)—At the end of the growing period (harvest stage) all plants were collected. Main heads from 6 plants per plot were threshed and grains were counted.

[1443] Main heads grains yield (gr.)—At the end of the growing period (harvest stage) all plants were collected. Main heads from 6 plants per plot were threshed and grains were weighted.

[1444] Main stem dry weight at harvest (gr.)—At the end of the experiment all plants were collected. Main stems from 6 plants per plot were separated from the rest of the plants, oven dried and weighted to obtain their dry weight.

[1445] Nodes number (number)—Nodes number was counted in main culm (stem) in 6 plants at heading stage.

[1446] Number days to flag leaf senescence (number)—the number of days from sowing till 50% of the plot arrives to flag leaf senescence (above half of the leaves are yellow).

[1447] Number days to heading (number)—the number of days from sowing till 50% of the plot arrives to heading.

[1448] Number days to tan (number)—the number of days from sowing till 50% of the plot arrives to tan.

[1449] Peduncle thickness per plant at heading (mm)—Peduncle thickness was obtained at heading stage by measuring the diameter of main culm just above auricles of flag leaf.

[1450] Plant height (cm)—Plants were measured for their height at harvest stage using a measuring tape. Height was measured from ground level to the point below the head.

[1451] Plant weight growth (gr./day)—Plant weight growth was calculated based on Formula 7 above.

[1452] SPAD at grain filling (SPAD unit)—Chlorophyll content was determined using a Minolta SPAD 502 chlorophyll meter and measurement was performed at grain filling stage. SPAD meter readings were done on fully developed leaves of 4 plants per plot by performing three measurements per leaf per plant.

[1453] SPAD at vegetative stage (SPAD unit)—Chlorophyll content was determined using a Minolta SPAD 502 chlorophyll meter and measurement was performed at vegetative stage. SPAD meter readings were done on fully developed leaves of 4 plants per plot by performing three measurements per leaf per plant.

[1454] Specific leaf area at heading (cm²/gr.)—was calculated according to Formula 37 above.

[1455] Tillering per plant at heading (number)—Tillers of 3 plants per plot were counted at heading stage and divided by the number of plants.

[1456] Vegetative dry weight at flowering/water until flowering (gr./lit)—was calculated according to Formula 38 above.

[1457] Vegetative dry weight (kg)—At the end of the growing period all vegetative material (excluding roots and heads) were collected and weighted after oven dry. The weight of plants is per one meter.

[1458] Yield filling rate (gr./day)—was calculated according to Formula 39 above.

[1459] Yield per dunam/water until tan (kg/ml)—was calculated according to Formula 40 above.

[1460] Yield per plant/water until tan (gr./ml)—was calculated according to Formula 41 above.

[1461] Data parameters collected are summarized in Table 199, herein below.

TABLE 199
Foxtail millet correlated parameters under normal conditions (vectors)
Provided are the Foxtail millet correlated parameters
(vectors). “gr.” = grams; “kg” = kilograms; “SPAD” =
chlorophyll levels; “DW” = Plant Dry weight; “GF” = grain filling growth
stage; “F” = flowering stage; “H” = harvest stage; “hd” = heading
growth stage; “Avr”-average; “num”-number; “cm”-centimeter;
“veg” = vegetative stage. VDW” = vegetative dry weight; “TDM” = Total
dry matter; “lit”-liter; “CV” = coefficient of variation (%).

| Correlated parameter with | Correlation ID |
|---|---|
| Yield filling rate [gr./day] | 1 |
| 1000 grain weight [gr.] | 2 |
| 1000 grain weight filling rate [gr./day] | 3 |
| CV (Grain area) [%] | 4 |
| Grain area [cm²] | 5 |
| CV (Grain length) [%] | 6 |
| Grain length [cm] | 7 |
| Plant height [cm] | 8 |
| Average internode length [cm] | 9 |
| Main Stem DW (H) [gr.] | 10 |
| Average main Stem DW (H) [gr.] | 11 |
| Nodes num [number] | 12 |
| Average Total dry matter per plant (H) [kg] | 13 |
| Average Total dry matter per plant (HD) [gr.] | 14 |
| Grains Yield per dunam [kg] | 15 |
| Main heads Grains yield [gr.] | 16 |
| Grains Yield per plant [gr.] | 17 |
| Grains yield per Head [gr.] | 18 |
| Main Heads DW (H) [gr,] | 19 |
| Average Heads DW per plant (HD) [gr.] | 20 |
| Yield per dunam/water until tan [kg/ml] | 21 |
| Yield per plant/water until tan [gr./ml] | 22 |
| VDW (F)/water until heading [gr./lit] | 23 |
| Calculated Grains per dunam [number] | 24 |
| Main heads Grains num [number] | 25 |
| Num days Flag leaf senescence [number] | 26 |
| Grain fill duration [days] | 27 |
| Num days to Tan [number] | 28 |
| CV (Grain width) [%] | 29 |
| Grain width [cm] | 30 |
| Leaves temperature [Celsiu] | 31 |
| Specific leaf area (HD) [cm²/gr.] | 32 |
| Lower Stem width (HD) [mm] | 33 |
| Peduncle thickness per plant (HD) [mm] | 34 |
| Tillering per plant (HD) [num] | 35 |
| Heads per plant [number] | 36 |
| Head Area [cm²] | 37 |
| Field Head Width [cm] | 38 |
| Head Width [cm] | 39 |
| Harvest index [number] | 40 |
| Dry matter partitioning [ratio] | 41 |
| Average main tiller Leaves DW per plant (HD) [gr.] | 42 |
| Leaves DW (HD) [gr.] | 43 |
| Leaves num (HD) [number] | 44 |
| Leaves area per plant (HD) [cm²] | 45 |
| Average Seedling DW [gr.] | 46 |
| Average Shoot DW_[gr.] | 47 |
| Average Vegetative DW per plant (HD) [gr.] | 48 |
| Average Vegetative DW per plant (H) [kg] | 49 |
| Vegetative DW [kg] | 50 |
| Plant weight growth [gr./day] | 51 |
| Num days to Heading [number] | 52 |
| SPAD_(veg) [SPAD unit] | 53 |
| SPAD (GF) [SPAD unit] | 54 |

[1462] Experimental Results 51 different Foxtail millet inbreds were grown and characterized for different parameters (Table 199). 49 lines were selected for expression analysis. The average for each of the measured parameter was calculated using the JMP software (Tables 200-204) and a subsequent correlation analysis was performed (Table 205). Results were then integrated to the database.

TABLE 200
Measured parameters in Foxtail millet accessions under normal conditions

| | Corr. ID | | | | | | | | |
|---|---|---|---|---|---|---|---|---|---|
| L | 1 | 2 | 3 | 4 | 5 | 6 | 7 | 8 | 9 |
| L-1 | 3.208 | 0.134 | 10.147 | 0.511 | 7.660 | 0.130 | 51.761 | 0.064 | 41.614 |

Table 200: Provided are the values of each of the parameters (as described above) measured in Foxtail millet accessions (“L” = Line) under normal conditions. Growth conditions are specified in the experimental procedure section.

TABLE 201
Additional measured parameters in Foxtail millet accessions under normal growth conditions

| | Corr. ID | | | | | | | | | | |
|---|---|---|---|---|---|---|---|---|---|---|---|
| L | 10 | 11 | 12 | 13 | 14 | 15 | 16 | 17 | 18 | 19 | 20 |
| L-1 | 12.686 | 10.313 | 2.612 | 6.099 | 5.497 | 3.996 | 1676.9 | 60.631 | 19.032 | 0.0375 | 24 |

Table 201: Provided are the values of each of the parameters (as described above) measured in Foxtail millet accessions (“L” = Line) under normal conditions. Growth conditions are specified in the experimental procedure section.

TABLE 202
Additional measured parameters in Foxtail millet accessions under normal growth conditions

| | Corr. ID | | | | | | | | | | |
|---|---|---|---|---|---|---|---|---|---|---|---|
| L | 21 | 22 | 23 | 24 | 25 | 26 | 27 | 28 | 29 | 30 | 31 |
| L-1 | 0.247 | 0.1936 | [symbol] 23.448 | 52.326 | 6.423 | 0.406 | 45.904 | 1.902 | 7.935 | 7.835 | 465.7 |

Table 202: Provided are the values of each of the parameters (as described above) measured in Foxtail millet accessions (“L” = Line) under normal conditions. Growth conditions are specified in the experimental procedure section. [symbol]
indicates data missing or illegible when filed

TABLE 203
Additional measured parameters in Foxtail millet accessions under normal growth conditions

| | Corr. ID | | | | | | | | | | |
|---|---|---|---|---|---|---|---|---|---|---|---|
| L | 32 | 33 | 34 | 35 | 36 | 37 | 38 | 39 | 40 | 41 | 42 |
| L-1 | 10.167 | 35.346 | 6.212 | 89.8 | 21808 | 69.938 | 10.208 | 87 | 37.8 | 61 | 2.97 |

Table 203: Provided are the values of each of the parameters (as described above) measured in Foxtail millet accessions (“L” = Line) under normal conditions. Growth conditions are specified in the experimental procedure section.

TABLE 204
Additional measured parameters in Foxtail millet accessions under normal
growth conditions

| | Corr. ID | | | | | | |
|---|---|---|---|---|---|---|---|
| L | 43 | 44 | 45 | 46 | 46 | 47 | 48 |
| L-1 | 128.958 | 1.573 | 61.935 | 48.331 | 48.331 | 178.139 | 7.583 |

Corr. ID

| L | 49 | 50 | 51 | 52 | 53 | 54 |
|---|---|---|---|---|---|---|
| L-1 | 0.491 | 0.622 | 21.437 | 2.412 | 0.241 | 61.875 |

Table 204: Provided are the values of each of the parameters (as described above) measured in Foxtail millet accessions (“L” = Line) under normal conditions. Growth conditions are specified in the experimental procedure section.

TABLE 205
Correlation between the expression level of selected genes of some embodiments of
the invention in various tissues and the phenotypic performance under normal
conditions across Foxtail millet accessions

| Gene | | | Exp. | Corr. | Gene | | | Exp. | Corr. |
|---|---|---|---|---|---|---|---|---|---|
| Name | R | P value | set | ID | Name | R | P value | set | ID |
| LBY514 | 0.73 | 5.60E−09 | 3 | 11 | LBY514 | 0.70 | 2.75E−08 | 3 | 25 |
| LBY514 | 0.73 | 5.60E−09 | 3 | 10 | | | | | |

Table 205. Provided are the correlations (R) between the genes expression levels in various tissues (“Exp. Set” = Expression set specified in Table 198) and the phenotypic performance measured (Tables 200-204) according to the correlation vectors (“Corr. ID”) specified in Table 199.
“R” = Pearson correlation coefficient;
“P” = p value.

### Example 20

### Production of Wheat Transcriptome and High Throughput Correlation Analysis with Yield Related Parameters Using 62K Wheat Oligonucleotide Micro-Arrays

[1463] In order to produce a high throughput correlation analysis between plant phenotype and gene expression level, the present inventors utilized a wheat oligonucleotide micro-array, produced by Agilent Technologies [chem. (dot) agilent (dot) com/Scripts/PDS (dot) asp?1Page=50879]. The array oligonucleotide represents about 50,000 wheat genes and transcripts.

[1464] Correlation of Wheat Lines Grown Under Regular Growth Conditions

[1465] Experimental Procedures

[1466] 185 spring wheat lines were grown in 5 replicate plots in the field. Wheat seeds were sown and plants were grown under commercial fertilization and irrigation protocols (normal growth conditions) which include 150 m³ applied water and 400 m³ by rainfall per dunam (1000 square meters) per entire growth period and fertilization of 15 units of URAN® 21% (Nitrogen Fertilizer Solution; PCS Sales, Northbrook, Ill., USA).

[1467] In order to define correlations between the levels of RNA expression with yield components or vigor related parameters, phenotypic performance of the 185 different wheat lines was characterized and analyzed at various developmental stages. Twenty six selected lines, encompassing a wide range of the observed variation were sampled for RNA expression analysis. The correlation between the RNA levels and the characterized parameters was analyzed using Pearson correlation test [davidmlane (dot) com/hyperstat/A34739 (dot) html].

[1468] Analyzed Wheat tissues—Three types of plant tissues [flag leaf, inflorescence and peduncle] from plants grown under Normal conditions were sampled and RNA was extracted as described above. Micro-array expression information from each tissue type has received a Set ID as summarized in Table 206 below.

TABLE 206
Wheat transcriptome expression sets under normal growth conditions

| Expression Set | Set ID |
|---|---|
| Flag leaf at heading stage under normal growth conditions | 1 |
| Inflorescence at heading stage under normal growth | 2 |
| conditions | |
| peduncle at heading stage under normal growth conditions | 3 |

Table 206: Provided are the wheat transcriptome expression sets. Flag leaf = Full expanded upper leaf at heading; inflorescence = spike before flowering at full head emergence; peduncle = upper stem internode between the flag leaf and spike.

[1469] Wheat Yield Components and Vigor Related Parameters Assessment

[1470] The collected data parameters were as follows:

[1471] % Canopy coverage (F)—percent Canopy coverage at flowering stage. The % Canopy coverage is calculated using Formula 32 (above).

[1472] 1000 seed weight [gr.]—was calculated based on Formula 14 (above).

[1473] 1000 grain weight filling rate (gr./day)—was calculated based on Formula 36 above.

[1474] Average spike weight (H) [gr.]—The biomass and spikes of each plot was separated. Spikes dry weight at harvest was divided by the number of spikes or by the number of plants.

[1475] Dry weight=total weight of the vegetative portion above ground (excluding roots) after drying at 70° C. in oven for 48 hours.

[1476] Average tiller DW (H) [gr.]—Average Stem Dry Matter at harvest.

[1477] Average vegetative DW per plant (H) [gr.]—Vegetative dry weight per plant at harvest.

[1478] Fertile spikelets [number]—Number of fertile spikelets per spike. Count the bottom sterile spikelets in a sample from harvested spikes and deduce from number of spikelets per spike (with the unfertile spikes).

[1479] Fertile spikelets ratio [value]—Measure by imaging, the number of fertile and sterile spikelets per spike in 20 spikes randomly selected from the plot. Calculate the ratio between fertile spikelets to total number of spikelets×100 (sum of fertile and sterile spikelets).

[1480] Field Spike length (H) [cm]—Measure spike length per plant excluding the awns, at harvest.

[1481] Grain fill duration [number]—Defined by view. Calculate the number of days from anthesis in 50% of the plot to physiological maturity in 50% of the plot.

[1482] Grain fill duration (GDD)—Duration of grain filling period according to the growing degree units (GDD) method. The accumulated GDD during the grain filling period was calculated by subtracting the Num days to Anthesis (GDD) from Num days to Maturity (GDD).

[1483] Grains per spike [number]—The total number of grains from 20 spikes per plot that were manually threshed was counted. The average grains per spike was calculated by dividing the total grain number by the number of spikes.

[1484] Grains per spikelet [number]—Number of grains per spike divided by the number of fertile spikelets per spike. Measure by imaging the number of fertile spikelets in 20 randomly selected spikes and calculate an average per spike.

[1485] Grains yield per micro plots [Kg]—Grain weight per micro plots.

[1486] Grains yield per spike [gr.]—Total grain weight per spike from 20 spikes per plot. The total grain weight per spike was calculated by dividing the grain weight of 20 spikes by the number of spikes.

[1487] Harvest index [ratio]—was calculated based on Formula 18 (above).

[1488] Number days to anthesis [number]—Calculated as the number of days from sowing till 50% of the plots reach anthesis.

[1489] Number days to anthesis (GDD)—Number days to anthesis according to the growing degree units method. The accumulated GDD from sowing until anthesis stage.

[1490] Number days to maturity [number]—Calculated as the number of days from sowing till 50% of the plots reach maturity.

[1491] Number days to maturity (GDD)—Number days to maturity according to the growing degree units method. The accumulated GDD from sowing until maturity stage.

[1492] Number days to tan [number]—Calculated as the number of days from sowing till 50% of the plot arrive to grain maturation.

[1493] PAR_LAI (F)—Photosynthetically Active Radiation (PAR) at flowering.

[1494] Peduncle length (F) [cm]—Length of upper internode from the last node to the spike base at flowering. Calculate the average peduncle length per 10-15 plants randomly distributed within a pre-defined 0.5 m² of a plot.

[1495] Peduncle width (F) [mm]—Upper node width at flowering. Calculate the average upper nodes width, measured just above the flag leaf auricles per 10-15 plants randomly distributed within a pre-defined 0.5 m² of a plot.

[1496] Peduncle volume (F) [Float value]=Peduncle length*(peduncle thickness/2)²*π.

[1497] Spikelets per spike [number]—Number of spikelets per spike (with the unfertile spikes). Measured by imaging, the number of spikelets per spike in 20 spikes randomly selected from the plot.

[1498] Spikes per plant (H) [number]—Number of spikes per plant at harvest. Calculate Number of spikes per unit area/Number of plants per plot.

[1499] Spikes weight per plant (FC) [gr.]—Spikes weight per plant at flowering complete. Spikes weight from 10 plants/number of plants.

[1500] Stem length (F) [cm]—Main Stem length at flowering. Measures the length of Main Stem from ground to end of elongation (without the spike).

[1501] Stem width (F) [mm]—Stem width at flowering. Measures on the stem beneath the peduncle.

[1502] Test weight (mechanical harvest) [Kg/hectoliter]—Volume weight of seeds.

[1503] Tillering (F) [number]—Count the number of tillers per plant from 6-10 plants randomly distributed in a plot, at flowering stage.

[1504] Tillering (H) [number]—Number of tillers at harvest.

[1505] Total dry matter (F) [gr.]—was calculated based on Formula 21.

[1506] Total Plant Biomass (H) [gr.]—Vegetative dry weight+Spikes dry weight.

[1507] Vegetative DW per plant (F) [gr.]—Plant weight after drying (excluding the spikes) at flowering stage.

[1508] Total N content of grain per plant [gr.]—N content of grain*Grains yield per plant.

[1509] NDRE 1 [Float value]—Normalized difference Red-Edge TP-1 (time point). Calculated as (NIR-Red edge)/(NIR+Red edge). (“NIR”—Near InfraRed)

[1510] NDRE 2 [Float value]—Normalized difference Red-Edge TP-2. Calculated as (Nir−Red edge)/(Nir+Red edge).

[1511] NDVI 1 [Float value]—Normalized Difference Vegetation Index TP-1. Calculated as (Nir−Red edge)/(Nir+Red edge).

[1512] NDVI 2[Float value]—Normalized Difference Vegetation Index TP-2. Calculated as (Nir−Red edge)/(Nir+Red edge).

[1513] RUE [ratio]—total dry matter produced per intercepted PAR. Spikes weight per plant+Vegetative DW per plant at flowering/% Canopy coverage.

[1514] The following parameters were collected using digital imaging system:

[1515] Grain Area [cm²]—A sample of ˜200 grains were weight, photographed and images were processed using the below described image processing system. The grain area was measured from those images and was divided by the number of grains.

[1516] Grain Length and Grain width [cm]—A sample of ˜200 grains was weighted, photographed and images were processed using the below described image processing system. The sum of grain lengths and width (longest axis) was measured from those images and was divided by the number of grains.

[1517] Grain Perimeter [cm]—A sample of ˜200 grains were weight, photographed and images were processed using the below described image processing system. The sum of grain perimeter was measured from those images and was divided by the number of grains.

[1518] Spike area [cm²]—At the end of the growing period 5 ‘spikes’ were photographed and images were processed using the below described image processing system. The ‘spike’ area was measured from those images and was divided by the number of ‘spikes’.

[1519] Spike length [cm]—Measure by imaging spikes length excluding awns, per 30 randomly selected spikes within a pre-defined 0.5 m² of a plot.

[1520] Spike max width [cm]—Measure by imaging the max width of 10-15 spikes randomly distributed within a pre-defined 0.5 m² of a plot. Measurements were carried out at the middle of the spike.

[1521] Spike width [cm]—Measure by imaging the width of 10-15 spikes randomly distributed within a pre-defined 0.5 m² of a plot. Measurements were carried out at the middle of the spike.

[1522] N use efficiency [ratio]—was calculated based on Formula 51 (above).

[1523] Yield per spike filling rate [gr./day]—was calculated based on Formula 60 (above).

[1524] Yield per micro plots filling rate [gr./day]—was calculated based on Formula 61 (above).

[1525] Grains yield per hectare [ton/ha]—was calculated based on Formula 62 (above).

[1526] Yield per plant filling rate (gr./day)—was calculated according to Formula 39 (using grain yield per plant).

[1527] Total NUtE [ratio]—was calculated based on Formula 53 (above).

[1528] The image processing system consisted of a personal desktop computer (Intel P4 3.0 GHz processor) and a public domain program—ImageJ 1.37, Java based image processing software, which was developed at the U.S. National Institutes of Health and is freely available on the internet at rsbweb (dot) nih (dot) gov/. Images were captured in resolution of 10 Mega Pixels (3888×2592 pixels) and stored in a low compression JPEG (Joint Photographic Experts Group standard) format.

[1529] Next, image processing output data for seed area and seed length was saved to text files and analyzed using the JMP statistical analysis software (SAS institute).

[1530] Data parameters collected are summarized in Table 207, herein below

TABLE 207
Wheat correlated parameters (vectors)

| | Correlation |
|---|---|
| Correlated parameter with | ID |
| Tillering (F) [number] | 1 |
| Tillering (H) [number] | 2 |
| Avr tiller DW (H) [gr.] | 3 |
| Avr Vegetative DW per plant (H) [gr.] | 4 |
| Total Plant Biomass (H) [gr.] | 5 |
| Vegetative DW per plant (F) [gr.] | 6 |
| Grains yield per hectare [ton/ha] | 7 |
| Grains yield per micro plots [kg] | 8 |
| PAR_LAI (F) [μmol⁻² S⁻¹] | 9 |
| % Canopy coverage (F) [%] | 10 |
| RUE [ratio] | 11 |
| Grains yield per spike [gr.] | 12 |
| Spikes dry weight per plant (F) [gr.] | 13 |
| NDRE 1 [Float value] | 14 |
| NDRE 2 [Float value] | 15 |
| NDVI 1 [Float value] | 16 |
| Avr Spikes DW per plant (H) [gr.] | 17 |
| Avr spike weight (H) [gr.] | 18 |
| NDVI 2 [Float value] | 19 |
| Num days to anthesis [number] | 20 |
| Num days to anthesis (GDD) [number] | 21 |
| Num days to tan [number] | 22 |
| Grains per spike [number] | 23 |
| Grains per spikelet [number] | 24 |
| Spikelets per spike [number] | 25 |
| Num days to maturity [number] | 26 |
| Num days to maturity (GDD) [number] | 27 |
| Peduncle length (F) [cm] | 28 |
| Fertile spikelets [number] | 29 |
| Fertile spikelets ratio [value] | 30 |
| Peduncle width (F) [mm] | 31 |
| Peduncle volume (F) [Float value] | 32 |
| Stem length (F) [cm] | 33 |
| Spikes per plant (H) [number] | 34 |
| Spike Area [cm²] | 35 |
| Stem width (F) [mm] | 36 |
| N use efficiency [ratio] | 37 |
| Spike length [cm] | 38 |
| Field Spike length (H) [cm] | 39 |
| Spike width [cm] | 40 |
| Total N utilization efficiency [ratio] | 41 |
| Spike max width [cm] | 42 |
| 1000 grain weight [gr.] | 43 |
| Grain area [cm²] | 44 |
| Test weight (mechanical harvest) [kg/hectoliter] | 45 |
| Grain length [cm] | 46 |
| Grain Perimeter [cm] | 47 |
| Grain width [cm] | 48 |
| Grain fill duration [number] | 49 |
| Grain fill duration (GDD) [number] | 50 |
| Yield per micro plots filling rate [ratio] | 51 |
| Total N content of grain per plant [gr.] | 52 |
| N content of grain (harvest) [gr.] | 53 |
| Yield per plant filling rate [gr./day] | 54 |
| Yield per spike filling rate [gr./day] | 55 |
| 1000 grain weight filling rate [gr./day] | 56 |
| Harvest index [ratio] | 57 |
| Total dry matter (F) [gr.] | 58 |

Table 207. Provided are the wheat correlated parameters.
“TP” = time point;
“DW” = dry weight;
“FW” = fresh weight;
“Low N” = Low Nitrogen;
”Relative water content [percent];
“num” = number.
“gr.” = grams;
“cm” = centimeter;
“Avr” = average;
“RGR’ = relative growth rate;
“BPE” = biomass production efficiency;
“NHI” = Nitrogen harvest index;
“NupE” = nitrogen uptake efficiency;
“NutE” = nitrogen utilization efficiency;
“SPAD” = chlorophyll levels;
“F” = flowering stage;
“H” = harvest stage;
“N” = nitrogen; ;
“gr.” = gram(s);
“cm” = centimeter(s);
“kg” = kilogram;
“FC” = flowering completed;
“RUE = radiation use efficiency;
“NDVI” = normalized Difference Vegetation Index;
“NDRE” = normalized Difference Red-Edge index.

[1531] Experimental Results

[1532] 185 different wheat lines were grown and characterized for different parameters. Tissues for expression analysis were sampled from a subset of 26 lines. The correlated parameters are described in Table 207 above. The average for each of the measured parameter was calculated using the JMP software (Tables 208-210) and a subsequent correlation analysis was performed (Table 211). Results were then integrated to the database.

TABLE 208
Measured parameters in Wheat accessions under normal conditions

| | Line | | | | | | | | |
|---|---|---|---|---|---|---|---|---|---|
| Corr. ID | L-4 | L-8 | L-23 | L-27 | L-31 | L-36 | L-40 | L-60 | L-63 |
| 1 | 3.27 | 2.51 | 3.02 | 2.62 | 2.99 | 3.08 | 4.03 | 3.00 | 2.71 |
| 2 | 3.11 | 2.59 | 3.63 | 3.38 | 2.47 | 3.98 | 3.84 | 2.98 | 2.33 |
| 3 | 1.99 | 1.35 | 1.23 | 1.36 | 1.47 | 2.32 | 2.28 | 1.38 | 1.64 |
| 4 | 5.87 | 3.01 | 4.06 | 4.55 | 3.52 | 7.85 | 6.72 | 3.87 | 3.61 |
| 5 | 9.30 | 4.90 | 9.10 | 11.10 | 9.20 | 11.80 | 10.80 | 8.50 | 9.40 |
| 6 | 6.90 | 5.77 | 4.95 | 5.46 | 5.25 | 9.49 | 11.27 | 6.03 | 6.20 |
| 7 | 6.59 | 4.54 | 8.24 | 9.75 | 11.85 | 5.63 | 5.94 | 7.97 | 12.37 |
| 8 | 5.66 | 3.90 | 7.09 | 8.38 | 10.19 | 4.84 | 5.11 | 6.85 | 10.64 |
| 9 | 4.58 | 2.45 | 2.26 | 2.49 | 5.78 | 1.88 | 2.87 | 5.26 | 3.73 |
| 10 | 92.10 | 67.60 | 64.40 | 73.00 | 96.20 | 59.80 | 87.80 | 92.80 | 92.90 |
| 11 | 0.087 | 0.103 | 0.101 | 0.138 | 0.068 | 0.185 | 0.147 | 0.079 | 0.089 |
| 12 | 1.12 | 0.89 | 1.32 | 1.52 | 1.95 | 0.93 | 1.31 | 1.69 | 2.03 |
| 13 | 1.09 | 1.02 | 0.96 | 3.74 | 1.27 | 1.18 | 1.60 | 1.28 | 2.13 |
| 14 | 0.134 | 0.139 | 0.128 | 0.119 | 0.121 | 0.144 | 0.147 | 0.125 | 0.129 |
| 15 | 0.230 | 0.229 | 0.204 | 0.233 | 0.184 | 0.236 | 0.203 | 0.211 | 0.194 |
| 16 | 0.33 | 0.33 | 0.30 | 0.30 | 0.29 | 0.36 | 0.36 | 0.30 | 0.30 |
| 17 | 3.48 | 2.07 | 5.00 | 6.60 | 5.64 | 3.93 | 4.47 | 4.68 | 5.78 |
| 18 | 1.61 | 1.12 | 1.80 | 2.14 | 2.64 | 1.30 | 2.08 | 2.23 | 2.77 |
| 19 | 0.61 | 0.60 | 0.54 | 0.62 | 0.46 | 0.65 | 0.53 | 0.56 | 0.51 |
| 20 | 128.00 | 120.80 | 128.00 | 127.80 | 116.60 | 137.60 | 129.30 | 117.20 | 128.00 |
| 21 | 951.80 | 856.90 | 951.80 | 943.10 | 813.70 | 1067.6 | 966.70 | 819.40 | 951.80 |
| 22 | 160.80 | 153.20 | 157.80 | 158.20 | 153.60 | 172.00 | 163.70 | 153.20 | 157.00 |
| 23 | 29.10 | 24.80 | 32.20 | 37.40 | 43.30 | 24.10 | 32.50 | 42.80 | 46.30 |
| 24 | 1.81 | 1.65 | 2.07 | 2.36 | 2.61 | 1.53 | 1.88 | 2.38 | 2.69 |
| 25 | 18.10 | 16.90 | 18.10 | 17.90 | 19.10 | 17.70 | 19.60 | 20.10 | 19.70 |
| 26 | 176.00 | 163.00 | 167.30 | 168.20 | 163.00 | 177.80 | 175.70 | 164.60 | 169.00 |
| 27 | 1575.7 | 1336.2 | 1412.6 | 1428.6 | 1336.2 | 1610.0 | 1571.9 | 1364.3 | 1441.6 |
| 28 | 38.90 | 36.40 | 38.00 | 39.50 | 34.50 | 38.30 | 49.00 | 38.30 | 35.90 |
| 29 | 16.10 | 14.90 | 15.60 | 15.90 | 16.60 | 15.90 | 17.30 | 18.00 | 17.20 |
| 30 | 88.50 | 88.10 | 86.30 | 89.00 | 87.00 | 90.10 | 88.20 | 89.50 | 87.10 |
| 31 | 2.44 | 3.12 | 2.68 | 2.68 | 3.05 | 2.20 | 2.66 | 3.09 | 2.73 |
| 32 | 18.90 | 28.20 | 21.60 | 22.50 | 25.30 | 14.70 | 27.90 | 28.90 | 21.00 |
| 33 | 122.20 | 98.00 | 92.50 | 94.10 | 74.80 | 126.10 | 135.60 | 97.00 | 85.70 |
| 34 | 2.28 | 1.91 | 3.26 | 3.18 | 2.29 | 3.19 | 2.63 | 2.27 | 2.20 |
| 35 | 8.47 | 5.67 | 7.72 | 9.83 | 11.67 | 6.81 | 7.30 | 9.53 | NA |
| 36 | 3.67 | 4.48 | 3.71 | 4.03 | 4.89 | 3.42 | 3.64 | 4.21 | 4.06 |
| 37 | 38.70 | 21.40 | 48.50 | 57.30 | 69.70 | 33.10 | 35.00 | 28.10 | 72.70 |
| 38 | 9.50 | 6.56 | 8.22 | 8.20 | 11.06 | 8.09 | 9.41 | 9.93 | NA |
| 39 | 8.90 | 6.70 | 8.55 | 7.92 | 10.46 | 8.83 | 10.12 | 9.49 | 9.70 |
| 40 | 1.03 | 1.01 | 1.09 | 1.42 | 1.26 | 0.97 | 0.90 | 1.16 | NA |
| 41 | 130.70 | 116.30 | 106.10 | 107.20 | 102.60 | 131.80 | 127.60 | 113.10 | 123.10 |
| 42 | 1.26 | 1.23 | 1.32 | 1.71 | 1.57 | 1.18 | 1.08 | 1.45 | NA |
| 43 | 39.80 | 38.30 | 42.10 | 41.70 | 48.40 | 39.50 | 41.20 | 41.30 | 44.60 |
| 44 | 0.183 | 0.178 | 0.186 | 0.189 | 0.211 | 0.173 | 0.178 | 0.190 | 0.202 |
| 45 | 69.00 | 84.60 | 81.00 | 85.60 | 84.30 | 75.20 | 81.60 | 85.30 | 79.70 |
| 46 | 0.660 | 0.653 | 0.689 | 0.671 | 0.708 | 0.662 | 0.650 | 0.696 | 0.702 |
| 47 | 1.70 | 1.68 | 1.74 | 1.73 | 1.84 | 1.68 | 1.68 | 1.76 | 1.79 |
| 48 | 0.37 | 0.36 | 0.36 | 0.37 | 0.39 | 0.35 | 0.36 | 0.37 | 0.38 |
| 49 | 33.80 | 32.40 | 29.00 | 30.50 | 37.00 | 34.40 | 34.10 | 36.00 | 29.00 |
| 50 | 365.60 | 388.60 | 304.80 | 337.80 | 437.30 | 432.70 | 383.70 | 426.10 | 304.80 |
| 51 | 0.19 | 0.14 | 0.29 | 0.36 | 0.32 | 0.17 | 0.17 | 0.23 | 0.42 |
| 52 | 63.40 | 42.50 | 79.30 | 78.90 | 73.20 | 58.50 | 70.10 | 76.40 | 57.70 |
| 53 | 2.49 | 1.86 | 1.89 | 1.99 | 1.75 | 2.24 | 2.12 | 1.81 | 1.54 |
| 54 | 0.078 | 0.053 | 0.139 | 0.197 | 0.120 | 0.088 | 0.108 | 0.106 | 0.153 |
| 55 | 0.033 | 0.027 | 0.045 | 0.059 | 0.053 | 0.028 | 0.039 | 0.047 | 0.068 |
| 56 | 1.16 | 1.19 | 1.45 | 1.54 | 1.31 | 1.18 | 1.20 | 1.15 | 1.54 |
| 57 | 0.28 | 0.33 | 0.48 | 0.44 | 0.49 | 0.25 | 0.29 | 0.45 | 0.48 |
| 58 | 7.99 | 6.79 | 5.91 | 9.20 | 6.53 | 10.77 | 12.87 | 7.32 | 8.33 |

Table 208. Provided are the values of each of the parameters (as described above) measured in wheat accessions (“L” = Line). Growth conditions are specified in the experimental procedure section.
“NA” = not available.
“Corr.”—correlation.

TABLE 209
Measured parameters in additional Wheat accessions under normal growth conditions

| | Line | | | | | | | | |
|---|---|---|---|---|---|---|---|---|---|
| Corr. ID | L-68 | L-74 | L-75 | L-87 | L-100 | L-107 | L-118 | L-129 | L-134 |
| 1 | 2.60 | 1.93 | 3.33 | 2.50 | 3.03 | 4.15 | 2.45 | 2.43 | 1.87 |
| 2 | 2.23 | 2.13 | 3.16 | 2.72 | 3.67 | 4.25 | 3.30 | 3.70 | 3.37 |
| 3 | 2.75 | 1.67 | 1.83 | 2.40 | 3.05 | 2.27 | 2.09 | 2.31 | 1.94 |
| 4 | 5.65 | 3.33 | 5.38 | 6.08 | 9.56 | 8.83 | 6.00 | 6.74 | 4.47 |
| 5 | 10.70 | 8.70 | 9.20 | 9.10 | 14.70 | 12.60 | 12.10 | 10.70 | 10.80 |
| 6 | 7.87 | 4.24 | 6.82 | 6.54 | 10.43 | 10.67 | 5.09 | 6.64 | 4.07 |
| 7 | 9.56 | 11.60 | 6.98 | 5.83 | 5.71 | 5.47 | 8.46 | 6.10 | 9.67 |
| 8 | 8.22 | 9.98 | 6.00 | 5.01 | 4.91 | 4.71 | 7.28 | 5.25 | 8.31 |
| 9 | 2.94 | 4.30 | 2.15 | 1.82 | 3.27 | 2.91 | 2.43 | 1.77 | 4.20 |
| 10 | 75.70 | 93.00 | 61.60 | 64.40 | 72.70 | 84.80 | 63.30 | 55.20 | 83.90 |
| 11 | 0.157 | 0.063 | 0.184 | 0.133 | 0.181 | 0.154 | 0.113 | 0.152 | 0.082 |
| 12 | 1.97 | 2.39 | 1.29 | 1.28 | 1.36 | 0.80 | 1.63 | 1.03 | 2.13 |
| 13 | 3.53 | 1.52 | 1.17 | 1.18 | 2.27 | 1.97 | 1.91 | 1.08 | 1.48 |
| 14 | 0.135 | 0.119 | 0.127 | 0.131 | 0.149 | 0.138 | 0.093 | 0.129 | 0.135 |
| 15 | 0.217 | 0.204 | 0.216 | 0.247 | 0.254 | 0.282 | 0.248 | 0.240 | 0.260 |
| 16 | 0.32 | 0.27 | 0.29 | 0.31 | 0.39 | 0.35 | 0.21 | 0.30 | 0.33 |
| 17 | 5.03 | 5.35 | 3.84 | 2.99 | 5.11 | 3.82 | 6.10 | 3.99 | 6.35 |
| 18 | 2.86 | 3.17 | 1.69 | 1.71 | 2.42 | 1.55 | 2.65 | 1.94 | 3.49 |
| 19 | 0.57 | 0.53 | 0.57 | 0.66 | 0.67 | 0.74 | 0.65 | 0.60 | 0.69 |
| 20 | 140.00 | 128.00 | 124.00 | 137.00 | 139.40 | 148.50 | 137.40 | 137.60 | 131.00 |
| 21 | 1088.0 | 951.8 | 897.6 | 1062.5 | 1085.1 | 1188.2 | 1062.5 | 1067.6 | 985.8 |
| 22 | 168.00 | 162.50 | 154.60 | 167.00 | 169.40 | 175.30 | 167.80 | 172.00 | 158.80 |
| 23 | 45.50 | 62.50 | 32.80 | 34.00 | 34.00 | 25.60 | 42.00 | 26.70 | 51.20 |
| 24 | 2.40 | 3.14 | 2.05 | 1.92 | 1.95 | 1.53 | 2.29 | 1.56 | 2.84 |
| 25 | 21.00 | 21.50 | 18.80 | 18.60 | 19.90 | 19.90 | 20.20 | 19.60 | 20.60 |
| 26 | 177.00 | 170.50 | 166.80 | 175.80 | 182.80 | 182.20 | 179.40 | 183.40 | 173.00 |
| 27 | 1595.5 | 1471.3 | 1405.8 | 1571.8 | 1705.0 | 1694.1 | 1640.8 | 1716.0 | 1519.9 |
| 28 | 41.00 | 30.90 | 38.70 | 41.80 | 42.20 | 39.80 | 31.50 | 36.10 | 33.00 |
| 29 | 19.00 | 20.10 | 16.10 | 17.60 | 17.50 | 18.70 | 18.40 | 17.10 | 18.00 |
| 30 | 90.50 | 93.40 | 85.90 | 94.90 | 88.20 | 94.70 | 91.20 | 88.60 | 87.20 |
| 31 | 2.93 | 3.05 | 2.46 | 2.62 | 2.74 | 2.59 | 2.59 | 2.60 | 2.45 |
| 32 | 27.90 | 22.60 | 18.80 | 22.30 | 25.00 | 21.20 | 16.80 | 19.30 | 17.90 |
| 33 | 104.50 | 77.30 | 119.40 | 133.30 | 136.30 | 124.30 | 106.90 | 123.80 | 83.30 |
| 34 | 2.05 | 1.83 | 2.71 | 1.69 | 2.57 | 3.18 | 2.57 | 2.46 | 2.30 |
| 35 | 8.41 | 11.66 | 7.54 | 7.32 | 7.94 | 8.70 | 11.24 | 6.24 | 12.12 |
| 36 | 4.38 | 4.88 | 3.69 | 4.13 | 4.02 | 3.70 | 4.13 | 3.98 | 3.22 |
| 37 | 56.20 | 68.20 | 32.80 | 34.30 | 33.60 | 31.60 | 49.80 | 35.90 | 56.90 |
| 38 | 9.11 | 12.10 | 8.49 | 9.13 | 8.85 | 9.91 | 9.88 | 7.66 | 10.19 |
| 39 | 9.99 | 9.64 | 7.43 | 9.17 | 9.41 | 10.70 | 10.89 | 9.54 | 10.59 |
| 40 | 1.09 | 1.13 | 1.08 | 0.91 | 1.04 | 1.00 | 1.33 | 0.94 | 1.45 |
| 41 | 98.30 | 147.70 | 116.00 | 164.80 | 155.00 | 163.80 | 399.10 | 138.20 | 127.30 |
| 42 | 1.34 | 1.45 | 1.29 | 1.12 | 1.20 | 1.19 | 1.61 | 1.12 | 1.71 |
| 43 | 43.70 | 39.70 | 40.90 | 38.60 | 40.90 | 31.20 | 40.40 | 39.10 | 42.30 |
| 44 | 0.185 | 0.189 | 0.179 | 0.172 | 0.173 | 0.149 | 0.174 | 0.165 | 0.194 |
| 45 | 76.20 | 77.80 | 84.10 | 75.80 | 75.40 | 78.40 | 75.40 | 77.40 | 77.10 |
| 46 | 0.660 | 0.701 | 0.658 | 0.677 | 0.685 | 0.664 | 0.640 | 0.658 | 0.734 |
| 47 | 1.70 | 1.76 | 1.68 | 1.69 | 1.71 | 1.62 | 1.65 | 1.66 | 1.82 |
| 48 | 0.38 | 0.36 | 0.36 | 0.34 | 0.34 | 0.30 | 0.37 | 0.34 | 0.36 |
| 49 | 28.00 | 34.50 | 30.00 | 30.00 | 30.00 | 26.30 | 30.40 | 34.40 | 27.00 |
| 50 | 336.80 | 377.80 | 358.90 | 344.20 | 366.90 | 371.80 | 358.40 | 432.70 | 282.90 |
| 51 | 0.35 | 0.34 | 0.22 | 0.20 | 0.20 | 0.21 | 0.28 | 0.18 | 0.38 |
| 52 | 98.50 | 52.60 | 63.00 | 42.70 | 70.50 | 61.50 | 82.40 | 57.60 | 65.40 |
| 53 | 2.21 | 1.31 | 2.04 | 2.13 | 2.44 | 2.21 | 1.89 | 2.43 | 1.84 |
| 54 | 0.144 | 0.128 | 0.121 | 0.073 | 0.123 | 0.110 | 0.137 | 0.078 | 0.120 |
| 55 | 0.070 | 0.071 | 0.043 | 0.043 | 0.048 | 0.036 | 0.054 | 0.031 | 0.064 |
| 56 | 1.61 | 1.15 | 1.33 | 1.29 | 1.41 | 1.24 | 1.33 | 1.16 | 1.36 |
| 57 | 0.38 | 0.50 | 0.38 | 0.26 | 0.24 | 0.20 | 0.34 | 0.24 | 0.44 |
| 58 | 11.40 | 5.76 | 8.00 | 7.72 | 12.70 | 12.64 | 6.99 | 7.72 | 5.55 |

Table 209. Provided are the values of each of the parameters (as described above) measured in wheat accessions (“L” = Line). Growth conditions are specified in the experimental procedure section.
“NA” = not available.
“Corr.”—correlation.

TABLE 210
Measured parameters in additional Wheat accessions under normal growth conditions

| | Line | | | | | | | | | |
|---|---|---|---|---|---|---|---|---|---|---|
| Corr. ID | L-142 | L-146 | L-159 | L-161 | L-171 | L-173 | L-175 | L-178 | L-179 | L-183 |
| 1 | 2.76 | 2.83 | 4.22 | 2.53 | 2.65 | 4.60 | 3.30 | NA | 2.32 | 2.12 |
| 2 | 3.13 | 3.33 | 4.67 | 2.68 | 2.52 | 3.34 | 2.87 | 2.72 | 2.51 | 2.41 |
| 3 | 2.09 | 1.93 | 2.05 | 2.68 | 1.60 | 2.12 | 1.80 | 1.84 | 2.31 | 2.09 |
| 4 | 6.27 | 5.36 | 7.86 | 6.62 | 3.72 | 5.07 | 4.98 | 4.93 | 5.26 | 4.41 |
| 5 | 9.40 | 7.80 | 14.30 | 10.30 | 9.60 | 7.90 | 12.00 | 11.10 | 10.30 | 10.00 |
| 6 | 8.14 | 6.30 | 8.22 | 8.22 | 5.45 | 11.56 | 9.43 | NA | 6.90 | 3.56 |
| 7 | 6.14 | 5.48 | 5.98 | 6.78 | 11.49 | 5.76 | 12.03 | 11.23 | 10.80 | 11.16 |
| 8 | 5.28 | 4.71 | 5.14 | 5.83 | 9.88 | 4.95 | 10.35 | 9.65 | 9.29 | 9.60 |
| 9 | 2.87 | 2.05 | 2.73 | 2.81 | 5.94 | 3.02 | 3.39 | 5.55 | 2.88 | 2.58 |
| 10 | 70.30 | 63.50 | 68.00 | 75.90 | 96.50 | 71.10 | 96.10 | 95.70 | 74.60 | 80.20 |
| 11 | 0.145 | 0.129 | 0.151 | 0.131 | 0.070 | 0.205 | 0.124 | NA | 0.167 | 0.078 |
| 12 | 1.22 | 1.06 | 1.38 | 1.16 | 2.03 | 0.93 | 2.05 | 1.98 | 2.33 | 2.13 |
| 13 | 2.66 | 1.51 | 1.73 | 1.31 | 1.39 | 2.58 | 2.48 | NA | 4.89 | 2.09 |
| 14 | 0.137 | 0.147 | 0.125 | 0.136 | 0.125 | 0.139 | 0.126 | 0.120 | 0.127 | 0.128 |
| 15 | 0.259 | 0.208 | 0.207 | 0.242 | 0.199 | 0.259 | 0.233 | 0.213 | 0.206 | 0.201 |
| 16 | 0.32 | 0.37 | 0.30 | 0.33 | 0.29 | 0.35 | 0.30 | 0.28 | 0.30 | 0.31 |
| 17 | 3.15 | 2.42 | 6.40 | 3.65 | 5.91 | 2.87 | 7.03 | 6.20 | 5.47 | 5.55 |
| 18 | 1.64 | 1.41 | 1.90 | 2.03 | 2.71 | 1.61 | 2.72 | 2.62 | 3.05 | 2.92 |
| 19 | 0.69 | 0.62 | 0.54 | 0.64 | 0.51 | 0.67 | 0.62 | 0.55 | 0.52 | 0.52 |
| 20 | 141.80 | 137.00 | 127.80 | 140.00 | 116.00 | 140.60 | 127.80 | 128.00 | 140.00 | 131.00 |
| 21 | 1109.9 | 1062.5 | 948.8 | 1088.0 | 808.0 | 1099.7 | 948.8 | 951.8 | 1088.0 | 987.6 |
| 22 | 169.20 | 168.60 | 154.20 | 171.60 | 154.00 | 166.60 | 161.30 | 160.20 | 159.70 | 163.40 |
| 23 | 27.10 | 25.30 | 31.70 | 30.50 | 44.60 | 25.50 | 44.90 | 47.70 | 49.20 | 45.90 |
| 24 | 1.66 | 1.47 | 1.94 | 1.67 | 2.55 | 1.29 | 2.46 | 2.69 | 2.54 | 2.40 |
| 25 | 18.00 | 18.70 | 18.00 | 22.40 | 20.00 | 20.70 | 20.50 | 19.50 | 21.00 | 22.00 |
| 26 | 179.80 | 178.60 | 170.20 | 177.00 | 163.00 | 178.60 | 168.30 | 170.00 | 171.70 | 174.60 |
| 27 | 1647.3 | 1625.4 | 1468.0 | 1595.5 | 1336.2 | 1624.5 | 1429.9 | 1462.0 | 1492.9 | 1548.0 |
| 28 | 37.40 | 42.70 | 39.00 | 45.10 | 39.30 | 40.00 | 40.10 | NA | 42.70 | 38.50 |
| 29 | 16.50 | 17.20 | 16.40 | 18.20 | 17.60 | 19.10 | 18.20 | 17.70 | 19.40 | 19.10 |
| 30 | 91.90 | 91.70 | 90.70 | 81.00 | 87.80 | 92.40 | 88.90 | 90.60 | 92.30 | 87.20 |
| 31 | 2.57 | 2.66 | 2.51 | 2.94 | 2.89 | 2.21 | 2.75 | NA | 3.26 | 3.07 |
| 32 | 19.40 | 23.80 | 19.30 | 31.00 | 26.00 | 15.80 | 23.90 | NA | 35.90 | 28.40 |
| 33 | 128.30 | 129.50 | 113.10 | 139.10 | 90.70 | 125.00 | 104.30 | NA | 110.40 | 99.80 |
| 34 | 1.96 | 2.01 | 4.12 | 2.27 | 2.37 | 2.32 | 2.73 | 2.49 | 2.17 | 2.04 |
| 35 | 6.77 | 7.26 | 8.23 | 6.68 | 10.68 | 8.09 | 12.48 | 11.40 | 11.78 | 12.75 |
| 36 | 3.90 | 4.05 | 3.82 | 4.27 | 4.50 | 3.40 | 4.14 | NA | 4.56 | 4.31 |
| 37 | 36.10 | 32.20 | 35.20 | 39.90 | 67.60 | 33.90 | 70.80 | 66.00 | 63.50 | 65.60 |
| 38 | 7.83 | 9.21 | 9.68 | 8.05 | 9.83 | 10.47 | 9.95 | 8.60 | 10.92 | 11.10 |
| 39 | 8.42 | 9.98 | 8.95 | 9.72 | 9.69 | 10.21 | 9.08 | 9.02 | 10.75 | 10.95 |
| 40 | 1.00 | 0.91 | 1.02 | 0.96 | 1.31 | 0.88 | 1.48 | 1.58 | 1.28 | 1.36 |
| 41 | 145.80 | 147.90 | 113.70 | 179.30 | 116.70 | 123.50 | 131.40 | 118.00 | 96.10 | 116.90 |
| 42 | 1.20 | 1.12 | 1.21 | 1.17 | 1.64 | 1.06 | 1.79 | 1.87 | 1.60 | 1.71 |
| 43 | 46.40 | 42.30 | 44.50 | 38.10 | 48.00 | 40.00 | 47.30 | 43.50 | 48.30 | 47.40 |
| 44 | 0.188 | 0.176 | 0.197 | 0.174 | 0.207 | 0.176 | 0.201 | 0.187 | 0.212 | 0.203 |
| 45 | 76.60 | 78.30 | 79.30 | 81.20 | 86.40 | 80.30 | 86.00 | 86.80 | 85.30 | 87.00 |
| 46 | 0.698 | 0.692 | 0.736 | 0.674 | 0.705 | 0.694 | 0.700 | 0.659 | 0.757 | 0.710 |
| 47 | 1.76 | 1.72 | 1.83 | 1.69 | 1.81 | 1.72 | 1.80 | 1.71 | 1.89 | 1.81 |
| 48 | 0.36 | 0.34 | 0.35 | 0.34 | 0.39 | 0.34 | 0.38 | 0.38 | 0.37 | 0.38 |
| 49 | 27.80 | 31.60 | 26.40 | 31.60 | 38.00 | 26.00 | 33.70 | 32.20 | 19.20 | 32.40 |
| 50 | 343.40 | 372.60 | 302.20 | 405.10 | 448.50 | 300.40 | 363.40 | 343.80 | 197.70 | 356.40 |
| 51 | 0.23 | 0.17 | 0.23 | 0.22 | 0.30 | 0.23 | 0.36 | 0.35 | 0.57 | 0.35 |
| 52 | 40.30 | 37.00 | 120.90 | 46.00 | 84.40 | 77.50 | 68.60 | 84.20 | 101.50 | 74.20 |
| 53 | 1.81 | 2.12 | 1.93 | 2.21 | 1.64 | 2.31 | 1.51 | 1.71 | 2.01 | 1.73 |
| 54 | 0.086 | 0.067 | 0.220 | 0.089 | 0.127 | 0.088 | 0.153 | 0.154 | 0.269 | 0.136 |
| 55 | 0.044 | 0.033 | 0.053 | 0.039 | 0.054 | 0.036 | 0.059 | 0.062 | 0.123 | 0.066 |
| 56 | 1.73 | 1.34 | 1.70 | 1.22 | 1.26 | 1.56 | 1.41 | 1.36 | 2.62 | 1.48 |
| 57 | 0.26 | 0.27 | 0.40 | 0.26 | 0.50 | 0.27 | 0.47 | 0.45 | 0.44 | 0.44 |
| 58 | 10.81 | 7.81 | 9.95 | 9.53 | 6.71 | 14.15 | 11.90 | NA | 11.79 | 5.65 |

Table 210. Provided are the values of each of the parameters (as described above) measured in wheat accessions (“L” = Line). Growth conditions are specified in the experimental procedure section.
“NA” = not available.
“Corr.”—correlation.

TABLE 211
Correlation between the expression level of selected genes of some embodiments of the
invention in various tissues and the phenotypic performance under normal across
wheat accessions

| Gene | | | Exp. | Corr. | Gene | | | Exp. | Corr. |
|---|---|---|---|---|---|---|---|---|---|
| Name | R | P value | set | ID | Name | R | P value | set | ID |
| LBY502 | 0.72 | 8.21E−04 | 3 | 15 | LBY503 | 0.73 | 5.15E−04 | 3 | 51 |
| LBY503 | 0.89 | 9.77E−07 | 3 | 44 | LBY503 | 0.84 | 1.03E−05 | 3 | 43 |
| LBY503 | 0.72 | 6.99E−04 | 3 | 12 | LBY503 | 0.80 | 7.56E−05 | 3 | 47 |
| LBY503 | 0.74 | 5.09E−04 | 3 | 55 | | | | | |

Table 211. Provided are the correlations (R) between the genes expression levels in various tissues (“Exp. Set”—Expression set specified in Table 206) and the phenotypic performance measured (Tables 208-210) according to the correlation vectors (“Corr. ID”—correlation vector ID) specified in Table 207.
“R” = Pearson correlation coefficient;
“P” = p value.

### Example 21

### Production of Wheat Transcriptome and High Throughput Correlation Analysis Using 60K Wheat Oligonucleotide Micro-Array

[1533] In order to produce a high throughput correlation analysis comparing between plant phenotype and gene expression level, the present inventors utilized a Wheat oligonucleotide micro-array, produced by Agilent Technologies [chem. (dot) agilent (dot) com/Scripts/PDS (dot) asp?1Page=50879]. The array oligonucleotide represents about 60K Wheat genes and transcripts.

[1534] In order to define correlations between the levels of RNA expression and yield or vigor related parameters, various plant characteristics of 14 different Wheat accessions were analyzed. Among them, 10 accessions encompassing the observed variance were selected for RNA expression analysis. The correlation between the RNA levels and the characterized parameters was analyzed using Pearson correlation test [davidmlane (dot) com/hyperstat/A34739 (dot) html].

[1535] Experimental Procedures

[1536] 14 Wheat accessions in 5 repetitive blocks, each containing 8 plants per pot were grown at net house. Three different treatments were applied: plants were regularly fertilized and watered during plant growth until harvesting under normal conditions [as recommended for commercial growth, plants were irrigated 2-3 times a week, and fertilization was given in the first 1.5 months of the growth period], under low Nitrogen (70% percent less Nitrogen) or under drought stress (cycles of drought and re-irrigating were conducted throughout the whole experiment, overall 40% less water were given in the drought treatment).

[1537] Analyzed Wheat tissues—Six tissues at different developmental stages [leaf, lemma, spike, stem, root tip and adventitious root] representing different plant characteristics, were sampled and RNA was extracted as described above. Each micro-array expression information tissue type has received a Set ID as summarized in Table 212 below.

TABLE 212
Wheat transcriptome expression sets under normal conditions

| Expression Set | Set ID |
|---|---|
| Adv root, grown under Normal conditions, first tillering stage | 1 |
| Basal lemma, grown under Normal conditions, grain filling stage | 2 |
| Basal spike, grown under Normal conditions, flowering stage | 3 |
| Basal spike, grown under Normal conditions, grain filling stage | 4 |
| Leaf, grown under Normal conditions, flowering stage | 5 |
| Leaf, grown under Normal conditions, grain filling stage | 6 |
| Root tip, grown under Normal conditions, first tillering stage | 7 |
| Stem grown under Normal conditions, flowering stage | 8 |
| Stem, grown under Normal conditions, grain filling stage | 9 |

Table 212. Provided are the wheat transcriptome expression sets under normal conditions.

TABLE 213
Wheat transcriptome expression sets under low N conditions

| Expression Set | Set ID |
|---|---|
| Adv root, grown under Low N conditions, first tillering | 1 |
| stage | |
| Basal spike, grown under Low N conditions, flowering stage | 2 |
| Basal spike, grown under Low N conditions, grain filling | 3 |
| stage | |
| Leaf, grown under Low N conditions, flowering stage | 4 |
| Leaf, grown under Low N conditions, grain filling stage | 5 |
| Root tip, grown under Low N conditions, first tillering stage | 6 |
| Stem, grown under Low N conditions, flowering stage | 7 |
| Stem grown under Low N conditions, grain filling stage | 8 |

Table 213. Provided are the wheat transcriptome expression sets under low N conditions.

TABLE 214
Wheat transcriptome expression sets low N vs. normal conditions

| Expression Set | Set ID |
|---|---|
| Adv root; grown under Low N vs. normal conditions, first | 1 |
| tillering stage | |
| Basal spike; grown under Low N vs. normal conditions, | 2 |
| flowering stage | |
| Basal spike; grown under Low N vs. normal conditions, | 3 |
| grain filling stage | |
| Leaf; grown under Low N vs. normal conditions, flowering | 4 |
| stage | |
| Leaf; grown under Low N vs. normal conditions, grain | 5 |
| filling stage | |
| Root tip; grown under Low N vs. normal conditions, first | 6 |
| tillering stage | |
| Stem; grown under Low N vs. normal conditions, flowering | 7 |
| stage | |
| Stem; grown under Low N vs. normal conditions, grain | 8 |
| filling stage | |

Table 214. Provided are the wheat transcriptome expression sets at low N versus (vs.) normal conditions.

[1538] Wheat yield components and vigor related parameters assessment—Plants were phenotyped on a daily basis following the parameters listed in Tables 215-216 below. Harvest was conducted while all the spikes were dry. All material was oven dried and the seeds were threshed manually from the spikes prior to measurement of the seed characteristics (weight and size) using scanning and image analysis. The image analysis system included a personal desktop computer (Intel P4 3.0 GHz processor) and a public domain program—ImageJ 1.37 (Java based image processing program, which was developed at the U.S. National Institutes of Health and freely available on the internet [rsbweb (dot) nih (dot) gov/]. Next, analyzed data was saved to text files and processed using the JMP statistical analysis software (SAS institute).

[1539] Grain yield (gr.)—At the end of the experiment all spikes of the pots were collected. The total grains from all spikes that were manually threshed were weighted. The grain yield was calculated by per plot or per plant.

[1540] Spike length and width analysis—At the end of the experiment the length and width of five chosen spikes per plant were measured using measuring tape excluding the awns.

[1541] Spike number analysis—The spikes per plant were counted.

[1542] Plant height—Each of the plants was measured for its height using measuring tape. Height was measured from ground level to top of the longest spike excluding awns at two time points at the Vegetative growth (30 days after sowing) and at harvest.

[1543] Spike weight—The biomass and spikes weight of each plot was separated, measured and divided by the number of plants.

[1544] Dry weight—total weight of the vegetative portion above ground (excluding roots) after drying at 70° C. in oven for 48 hours at two time points at the Vegetative growth (30 days after sowing) and at harvest.

[1545] Spikelet per spike—number of spikelets per spike was counted.

[1546] Root/Shoot Ratio—The Root/Shoot Ratio is calculated using Formula 22 described above.

[1547] Total No. of tillers—all tillers were counted per plot at two time points at the Vegetative growth (30 days after sowing) and at harvest.

[1548] Node number—number of nodes in the main stem.

[1549] Percent of reproductive tillers—was calculated based on Formula 26 (above).

[1550] SPAD—Chlorophyll content was determined using a Minolta SPAD 502 chlorophyll meter and measurement was performed at time of flowering. SPAD meter readings were done on young fully developed leaf. Three measurements per leaf were taken per plot.

[1551] Root FW (gr.), root length (cm) and No. of lateral roots—3 plants per plot were selected for measurement of root weight, root length and for counting the number of lateral roots formed.

[1552] Shoot FW (fresh weight)—weight of 3 plants per plot were recorded at different time-points.

[1553] Average Grain Area (cm²)—At the end of the growing period the grains were separated from the spike. A sample of ˜200 grains was weighted, photographed and images were processed using the below described image processing system. The grain area was measured from those images and was divided by the number of grains.

[1554] Average Grain Length and width (cm)—At the end of the growing period the grains were separated from the spike. A sample of ˜200 grains was weighted, photographed and images were processed using the below described image processing system. The sum of grain lengths or width (longest axis) was measured from those images and was divided by the number of grains.

[1555] Average Grain perimeter (cm)—At the end of the growing period the grains were separated from the spike. A sample of ˜200 grains was weighted, photographed and images were processed using the below described image processing system. The sum of grain perimeter was measured from those images and was divided by the number of grains.

[1556] Heading date—the day in which booting stage was observed was recorded and number of days from sowing to heading was calculated.

[1557] Relative water content—Relative water content (RWC) is calculated according to Formula 1.

[1558] Tiller abortion rate (HD to F)—difference between tiller number at heading and tiller number at flowering divided by tiller number at heading.

[1559] Tiller abortion rate—difference between tiller number at harvest and tiller number at flowering divided by tiller number at flowering.

[1560] Grain N (H)—% N content of dry matter in the grain at harvest.

[1561] Head N (GF)—% N content of dry matter in the head at grain filling.

[1562] Total shoot N—calculated as the % N content multiplied by the weight of plant shoot.

[1563] Total grain N—calculated as the % N content multiplied by the weight of plant grain yield.

[1564] NUE [kg/kg] (N use efficiency)—was calculated based on Formula 51.

[1565] NUpE [kg/kg] (N uptake efficiency)—was calculated based on Formula 52.

[1566] Grain NUtE (N utilization efficiency)—was calculated based on Formula 55.

[1567] Total NUtE—was calculated based on Formula 53.

[1568] Stem Volume—was calculated based on Formula 50.

[1569] Stem density—was calculated based on Formula 54.

[1570] NHI (N harvest index)—was calculated based on Formula 56.

[1571] BPE (Biomass production efficiency)—was calculated based on Formula 57.

[1572] Grain fill duration—the difference between number of days to maturity and number of days to flowering.

[1573] Harvest Index (for Wheat)—The harvest index was calculated using Formula 58 described above.

[1574] Growth rate: the growth rate (GR) of Plant Height (Formula 3 described above), SPAD (Formula 4 described above) and number of tillers (Formula 5 described above) were calculated with the indicated Formulas.

[1575] Specific N absorption—N absorbed per root biomass.

[1576] Specific root length—root biomass per root length.

[1577] Ratio low N/Normal: Represents ratio for the specified parameter of Low N condition results divided by Normal conditions results (maintenance of phenotype under Low N in comparison to normal conditions).

[1578] Data parameters collected are summarized in Tables 215-217, herein below.

TABLE 215
Wheat correlated parameters under normal conditions (vectors)

| | Correlation |
|---|---|
| Correlation set | ID |
| Root/Shoot [ratio] | 1 |
| SPAD early-mid grain filling [SPAD units] | 2 |
| SPAD flowering [SPAD units] | 3 |
| SPAD mid-late grain filling [SPAD] | 4 |
| specific N absorption [mg/gr.] | 5 |
| specific root length [gr./cm] | 6 |
| Spike Area [cm²] | 7 |
| Spike length [cm] | 8 |
| Spike Perimeter [cm] | 9 |
| Spike width [cm] | 10 |
| Spikelets per spike [number] | 11 |
| Tiller abortion rate [ratio] | 12 |
| tiller abortion rate (HD to F) | 13 |
| Tillering (Flowering) [number] | 14 |
| Tillering (Heading) [number] | 15 |
| Tillering (Tillering) [number] | 16 |
| Total dry matter [gr.] | 17 |
| total grain N [mg] | 18 |
| total NUtE [ratio] | 19 |
| total shoot N [mg] | 20 |
| Total Leaf Area [cm²] | 21 |
| Vegetative DW (Harvest) [gr.] | 22 |
| Avr spike DW (flowering) [gr.] | 23 |
| Avr spike DW (SS) [gr.] | 24 |
| Avr spike weight (harvest) [gr.] | 25 |
| BPE [ratio] | 26 |
| Fertile spikelets ratio [ratio] | 27 |
| field awns length [cm] | 28 |
| Grain area [mm²] | 29 |
| Grain C/N [ratio] | 30 |
| Grain fill duration [days] | 31 |
| grain NUtE [ratio] | 32 |
| grain protein [%] | 33 |
| 1000 grain weight [gr.] | 34 |
| Grains per plant [number] | 35 |
| Grains per spike [number] | 36 |
| Grains per spikelet [number] | 37 |
| Grains weight per plant [gr.] | 38 |
| Grains weight per spike [gr.] | 39 |
| Harvest index | 40 |
| Leaf Area [cm²] | 41 |
| Leaf Average Width [cm] | 42 |
| Leaf Length [cm] | 43 |
| Leaf Perimeter [cm] | 44 |
| Leaves num at tillering [number] | 45 |
| Leaves num flowering [number] | 46 |
| N use efficiency [ratio] | 47 |
| NHI [ratio] | 48 |
| Node Num [number] | 49 |
| Num days Heading [days] | 50 |
| Num days to anthesis [days] | 51 |
| NupE [ratio] | 52 |
| Peduncle length [cm] | 53 |
| Peduncle thickness [mm] | 54 |
| peduncle volume [cm³] | 55 |
| Plant height [cm] | 56 |
| Root length [cm] | 57 |
| Roots DW [gr.] | 58 |
| RWC [%] | 59 |
| Seminal roots [number] | 60 |
| Shoot C/N [ratio] | 61 |
| Shoot DW [gr] | 62 |

Table 215. Provided are the wheat correlated parameters.
“TP” = time point;
“DW” = dry weight;
“FW” = fresh weight;
“Low N” = Low Nitrogen;
”Relative water content [percent];
“num” = number.
“gr.” = grams;
“cm” = centimeter;
“Avr” = average;
“RGR’ = relative growth rate;
“BPE” = biomass production efficiency;
“NHI” = Nitrogen harvest index;
“NupE” = nitrogen uptake efficiency;
“NutE” = nitrogen utilization efficiency;
“SPAD” = chlorophyll levels;
“F” = flowering stage;
“H” = heading stage;
“N” = nitrogen.

TABLE 216
Wheat correlated parameters under low N conditions (vectors)

| | Correlation |
|---|---|
| Correlation set | ID |
| Grains weight per plant [gr.] | 1 |
| Grains weight per spike [gr.] | 2 |
| Avr spike weight (harvest) [gr.] | 3 |
| Avr spike DW (SS) [gr.] | 4 |
| Avr spike DW (flowering) [gr.] | 5 |
| Spikelets per spike [number] | 6 |
| Grains per plant [number] | 7 |
| Grains per spike [number] | 8 |
| Grains per spikelet [number] | 9 |
| Fertile spikelets ratio [ratio] | 10 |
| Grain area [mm²] | 11 |
| Harvest index | 12 |
| Spike Area [cm²] | 13 |
| Spike length [cm] | 14 |
| Spike Perimeter [cm] | 15 |
| Spike width [cm] | 16 |
| Grain fill duration [days] | 17 |
| Total dry matter [gr.] | 18 |
| Tillering (Tillering) [number] | 19 |
| Tillering (Heading) [number] | 20 |
| Tillering (Flowering) [number] | 21 |
| tiller abortion rate (HD to F) | 22 |
| Tiller abortion rate [ratio] | 23 |
| Root length [cm] | 24 |
| Seminal roots [number] | 25 |
| Roots DW [gr.] | 26 |
| specific root length [gr./cm] | 27 |
| Shoot DW [gr] | 28 |
| Vegetative DW (Harvest) [gr.] | 29 |
| Root/Shoot [ratio] | 30 |
| Total Leaf Area [cm²] | 31 |
| Leaf Area [cm²] | 32 |
| Leaf Average Width [cm] | 33 |
| Leaf Length [cm] | 34 |
| Leaf Perimeter [cm] | 35 |
| Leaves num at tillering [number] | 36 |
| Leaves num flowering [number] | 37 |
| SPAD early-mid grain filling [SPAD units] | 38 |
| SPAD flowering [SPAD units] | 39 |
| SPAD mid-late grain filling [SPAD] | 40 |
| RWC [%] | 41 |
| Peduncle length [cm] | 42 |
| Peduncle thickness [mm] | 43 |
| peduncle volume [cm³] | 44 |
| Plant height [cm] | 45 |
| Node Num [number] | 46 |
| N use efficiency [ratio] | 47 |
| total NUtE [ratio] | 48 |
| grain NUtE [ratio] | 49 |
| NupE [ratio] | 50 |
| NHI [ratio] | 51 |
| BPE [ratio] | 52 |
| specific N absorption [mg/gr.] | 53 |
| total grain N [mg] | 54 |
| total shoot N [mg] | 55 |
| Shoot C/N [ratio] | 56 |
| Grain C/N [ratio] | 57 |
| grain protein [%] | 58 |
| 1000 grain weight [gr.] | 59 |
| field awns length [cm] | 60 |
| Num days Heading [days] | 61 |
| Num days to anthesis [days] | 62 |

Table 216. Provided are the wheat correlated parameters.
“TP” = time point;
“DW” = dry weight;
“FW” = fresh weight;
“Low N” = Low Nitrogen;
”Relative water content [percent];
“num” = number.
“gr.” = grams;
“cm” = centimeter;
“Avr” = average;
“RGR’ = relative growth rate;
“BPE” = biomass production efficiency;
“NHI” = Nitrogen harvest index;
“NupE” = nitrogen uptake efficiency;
“NutE” = nitrogen utilization efficiency;
“SPAD” = chlorophyll levels;
“F” = flowering stage;
“H” = heading stage;
“N” = nitrogen.

TABLE 217
Wheat correlated parameters under low N conditions vs.
normal (vectors)

| | Correlation |
|---|---|
| Correlated parameter with | ID |
| 1000 grain weight [gr.] | 1 |
| BPE [ratio] | 2 |
| Fertile spikelets ratio [ratio] | 3 |
| Grain area [mm²] | 4 |
| Grain fill duration [days] | 5 |
| Grains per spike [number] | 6 |
| Grains per spikelet [number] | 7 |
| Grains weight per spike [gr.] | 8 |
| N use efficiency [ratio] | 9 |
| NHI [ratio] | 10 |
| NupE [ratio] | 11 |
| Peduncle thickness [mm] | 12 |
| Root length [cm] | 13 |
| SPAD early-mid grain filling [SPAD unit] | 14 |
| SPAD flowering [SPAD unit] | 15 |
| Seminal roots [number] | 16 |
| Shoot C/N [ratio] | 17 |
| Spikelets per spike [number] | 18 |
| Tiller abortion rate [ratio] | 19 |
| Grain C/N ratio | 20 |
| Grain NUtE [ratio] | 21 |
| Grain protein [%] | 22 |
| Peduncle volume [cm³] | 23 |
| Specific N absorption [mg/gr.] | 24 |
| Specific root length [gr./cm] | 25 |
| Tiller abortion rate (hd to F) [ratio] | 26 |
| Total NUtE [ratio] | 27 |
| Total grain N [mg] | 28 |
| Total shoot N [mg] | 29 |

Table 217. Provided are the wheat correlated parameters.
“TP” = time point;
“DW” = dry weight;
“FW” = fresh weight;
“Low N” = Low Nitrogen;
”Relative water content [percent];
“num” = number.
“gr.” = grams;
“cm” = centimeter;
“Avr” = average;
“RGR’ = relative growth rate;
“BPE” = biomass production efficiency;
“NHI” = Nitrogen harvest index;
“NupE” = nitrogen uptake efficiency;
“NutE” = nitrogen utilization efficiency;
“SPAD” = chlorophyll levels;
“F” = flowering stage;
“h” = heading stage;
“N” = nitrogen.

[1579] Experimental Results

[1580] Fourteen different Wheat accessions were grown and characterized for different parameters as described above. Tables 215-217 describe the wheat correlated parameters. The average for each of the measured parameters was calculated using the JMP software and values are summarized in Tables 218-223 below. Subsequent correlation analysis between the various transcriptome sets and the average parameters was conducted (Tables 224-226). Follow, results were integrated to the database.

TABLE 218
Measured parameters of correlation IDs in wheat accessions
under normal conditions

| Corr. | Line | | | | | | |
|---|---|---|---|---|---|---|---|
| ID | Line-1 | Line-2 | Line-3 | Line-4 | Line-5 | Line-6 | Line-7 |
| 1 | 0.72 | 3.47 | 2.30 | 0.55 | 1.18 | 0.74 | 0.92 |
| 2 | 37.30 | 28.30 | NA | 38.7 | NA | 46.5 | NA |
| 3 | 38.80 | 31.10 | 43.30 | 40.30 | 45.50 | 44.90 | NA |
| 4 | 36.00 | NA | NA | 37.20 | NA | NA | NA |
| 5 | 146.30 | 2391.40 | 1626.20 | 201.90 | 956.20 | 367.60 | NA |
| 6 | 0.03 | 0.00 | 0.01 | 0.03 | 0.01 | 0.02 | 0.02 |
| 7 | 9.52 | 6.27 | 8.42 | 11.73 | 7.03 | 6.51 | 8.96 |
| 8 | 8.48 | 6.51 | 9.54 | 8.14 | 10.29 | 8.51 | 13.41 |
| 9 | 22.30 | 15.80 | 22.50 | 20.90 | 26.70 | 20.40 | 30.40 |
| 10 | 1.39 | 1.18 | 1.12 | 1.68 | 0.83 | 1.02 | 0.89 |
| 11 | 16.20 | 17.20 | 19.40 | 16.90 | NA | 17.40 | NA |
| 12 | 19.60 | −10.00 | 32.60 | −2.30 | 46.10 | 41.30 | NA |
| 13 | −50.00 | 19.42 | −10.71 | 23.31 | −16.67 | −42.19 | NA |
| 14 | 6.00 | 4.75 | 7.75 | 3.25 | 13.12 | 9.75 | NA |
| 15 | 4.00 | 5.89 | 7.00 | 4.24 | 11.25 | 6.86 | 2.80 |
| 16 | 2.60 | 1.80 | 3.40 | 2.00 | 3.40 | 2.40 | 2.80 |
| 17 | 75.30 | 62.90 | 109.10 | 94.90 | 128.50 | 112.20 | 72.40 |
| 18 | 120.30 | 76.20 | 102.80 | 155.50 | 122.10 | 149.10 | 0.00 |
| 19 | 0.30 | 0.25 | 0.26 | 0.26 | 0.27 | 0.34 | NA |
| 20 | 129.60 | 172.80 | 322.80 | 203.40 | 347.40 | 183.50 | 0.00 |
| 21 | 227.50 | 111.50 | NA | 176.20 | NA | 549.00 | NA |
| 22 | 23.40 | 28.70 | 57.50 | 30.60 | 71.00 | 52.20 | 61.70 |
| 23 | 5.67 | 0.28 | 0.31 | 4.28 | 0.36 | 0.24 | NA |
| 24 | 1.52 | 0.84 | 1.49 | 2.64 | 1.23 | 1.45 | 0.66 |
| 25 | 1.36 | 0.89 | 1.41 | 2.51 | 1.01 | 1.57 | 0.51 |
| 26 | 0.58 | 0.36 | 0.34 | 0.47 | 0.37 | 0.61 | NA |
| 27 | 74.10 | 73.30 | 81.70 | 88.70 | NA | 75.70 | NA |
| 28 | 6.46 | 8.45 | 6.33 | 6.56 | NA | 1.20 | NA |
| 29 | 0.20 | 0.17 | 0.15 | 0.18 | 0.17 | 0.19 | 0.14 |
| 30 | 15.40 | 14.70 | 14.90 | 15.40 | 14.50 | 13.30 | NA |
| 31 | 27.90 | 31.40 | NA | 30.00 | NA | 27.80 | NA |
| 32 | 0.04 | 0.02 | 0.01 | 0.03 | 0.01 | 0.03 | NA |
| 33 | 15.10 | 15.80 | 15.60 | 14.90 | 16.10 | 17.50 | NA |
| 34 | 24.80 | 19.30 | 11.60 | 29.70 | 9.20 | 21.00 | 22.10 |
| 35 | 94.20 | 68.70 | 122.40 | 123.90 | 151.20 | 105.10 | 16.30 |
| 36 | 19.70 | 13.30 | 22.80 | 37.20 | 21.50 | 19.40 | 6.00 |
| 37 | 2.17 | 1.26 | 2.19 | 2.93 | NA | 1.64 | NA |
| 38 | 4.54 | 2.75 | 3.76 | 5.93 | 4.32 | 4.86 | 0.48 |
| 39 | 0.95 | 0.53 | 0.70 | 1.74 | 0.59 | 0.90 | 0.13 |
| 40 | 0.48 | 0.32 | 0.28 | 0.49 | 0.26 | 0.35 | 0.05 |
| 41 | 13.80 | 19.50 | NA | 22.50 | NA | 21.60 | NA |
| 42 | 0.86 | 0.92 | NA | 1.26 | NA | 1.05 | NA |
| 43 | 19.60 | 26.80 | NA | 22.00 | NA | 25.50 | NA |
| 44 | 41.50 | 53.80 | NA | 48.90 | NA | 53.10 | NA |
| 45 | 18.00 | 13.00 | 22.50 | 11.50 | 20.80 | 18.50 | NA |
| 46 | 6.60 | 5.60 | 6.20 | 6.60 | 5.80 | 5.60 | 6.40 |
| 47 | 0.05 | 0.03 | 0.04 | 0.06 | 0.04 | 0.05 | 0.00 |
| 48 | 0.48 | 0.31 | 0.24 | 0.43 | 0.26 | 0.45 | NA |
| 49 | 4.00 | 4.43 | 4.50 | 4.94 | 4.27 | 4.56 | NA |
| 50 | 60.20 | 69.90 | 85.20 | 61.80 | 83.00 | 65.80 | 105.00 |
| 51 | 69.10 | 73.00 | 85.20 | 69.60 | 86.40 | 71.20 | 105.00 |
| 52 | 2.50 | 2.49 | 4.26 | 3.59 | 4.70 | 3.33 | NA |
| 53 | 27.30 | 30.40 | 21.20 | 30.70 | 26.10 | 34.10 | NA |
| 54 | 2.61 | 2.71 | 3.53 | 3.31 | 3.22 | 3.07 | NA |
| 55 | 1.46 | 1.76 | 2.08 | 2.64 | 2.13 | 2.51 | NA |
| 56 | 45.60 | 63.40 | 69.30 | 62.90 | 68.00 | 79.40 | NA |
| 57 | 31.10 | 16.20 | 28.10 | 34.10 | 37.80 | 26.90 | 32.00 |
| 58 | 0.89 | 0.07 | 0.20 | 1.01 | 0.36 | 0.50 | 0.63 |
| 59 | 76.30 | NA | 82.00 | 76.10 | NA | 67.30 | NA |
| 60 | 11.20 | 6.00 | 8.00 | 11.00 | 7.80 | 7.80 | 10.20 |
| 61 | 72.00 | 68.40 | 74.90 | 61.30 | 86.60 | 121.50 | NA |
| 62 | 0.64 | 0.25 | 0.46 | 0.56 | 0.43 | 0.37 | 0.58 |

Table 218. Provided are the values of each of the parameters (as described above) measured in wheat accessions (Lines). Growth conditions are specified in the experimental procedure section.
“NA” = not available.
“Corr.”—correlation.

TABLE 219
Measured parameters of correlation IDs in additional wheat
accessions under normal conditions

| Corr. | Line | | | | | | |
|---|---|---|---|---|---|---|---|
| ID | Line-8 | Line-9 | Line-10 | Line-11 | Line-12 | Line-13 | Line-14 |
| 1 | 3.12 | 2.76 | 0.89 | 0.50 | 0.78 | 1.24 | 1.53 |
| 2 | 38.60 | 35.80 | 45.60 | 46.90 | 35.30 | NA | NA |
| 3 | 39.00 | 36.10 | 46.40 | 42.90 | 34.20 | NA | NA |
| 4 | NA | NA | NA | 46.30 | 35.80 | NA | NA |
| 5 | 1596.10 | 2273.00 | 405.00 | 133.50 | 154.30 | NA | NA |
| 6 | 0.00 | 0.00 | 0.01 | 0.03 | 0.02 | NA | NA |
| 7 | 9.88 | 9.43 | 10.33 | 12.38 | 9.53 | 7.33 | 8.14 |
| 8 | 8.11 | 8.25 | 8.57 | 9.13 | 7.46 | 9.69 | 11.24 |
| 9 | 20.80 | 20.90 | 21.30 | 22.80 | 18.70 | 22.70 | 27.00 |
| 10 | 1.50 | 1.43 | 1.55 | 1.64 | 1.52 | 1.03 | 0.92 |
| 11 | 16.20 | 17.20 | 18.80 | 19.60 | 16.90 | NA | NA |
| 12 | −25.90 | 34.30 | 27.40 | 1.20 | 25.60 | NA | NA |
| 13 | 20.05 | −16.08 | −47.66 | −33.21 | −82.29 | NA | NA |
| 14 | 4.25 | 6.75 | 6.75 | 4.25 | 6.25 | NA | NA |
| 15 | 5.32 | 5.81 | 4.57 | 3.19 | 3.43 | 1.80 | 2.80 |
| 16 | 2.20 | 1.60 | 1.80 | 1.60 | 2.00 | 1.80 | 2.80 |
| 17 | 100.80 | 100.00 | 116.60 | 115.90 | 63.70 | 71.40 | 109.80 |
| 18 | 154.80 | 109.20 | 141.40 | 164.80 | 97.20 | NA | NA |
| 19 | 0.31 | 0.21 | 0.33 | 0.38 | 0.35 | NA | NA |
| 20 | 173.50 | 368.60 | 209.50 | 139.50 | 84.00 | NA | NA |
| 21 | 431.80 | 231.70 | 188.30 | 186.20 | 269.30 | NA | NA |
| 22 | 40.00 | 47.90 | 44.80 | 37.50 | 20.90 | 63.50 | 102.20 |
| 23 | 0.27 | 0.28 | 0.47 | 9.11 | 5.11 | NA | NA |
| 24 | 1.59 | 1.67 | 1.96 | 2.89 | 1.64 | 0.62 | 0.42 |
| 25 | 1.42 | 1.48 | 2.06 | 2.46 | 1.16 | 0.44 | 0.36 |
| 26 | 0.58 | 0.27 | 0.56 | 0.83 | 0.76 | NA | NA |
| 27 | 83.70 | 87.00 | 79.00 | 86.80 | 75.80 | NA | NA |
| 28 | 8.57 | 7.47 | 7.41 | 6.17 | 5.30 | NA | NA |
| 29 | 0.20 | 0.17 | 0.18 | 0.20 | 0.17 | 0.12 | 0.11 |
| 30 | 14.00 | 15.30 | 17.30 | 17.10 | 15.00 | NA | NA |
| 31 | 32.80 | NA | 29.20 | 27.10 | 26.50 | NA | NA |
| 32 | 0.03 | 0.01 | 0.03 | 0.05 | 0.04 | NA | NA |
| 33 | 16.70 | 15.10 | 13.40 | 13.60 | 15.40 | NA | NA |
| 34 | 15.10 | 13.60 | 20.70 | 33.50 | 16.70 | 12.70 | 13.40 |
| 35 | 106.80 | 103.10 | 141.60 | 139.20 | 85.40 | 13.10 | 18.60 |
| 36 | 20.00 | 23.40 | 30.00 | 34.00 | 18.50 | 5.10 | 6.60 |
| 37 | 1.83 | 1.93 | 2.30 | 2.80 | 2.28 | NA | NA |
| 38 | 5.29 | 4.11 | 6.01 | 6.91 | 3.59 | 0.40 | 2.53 |
| 39 | 0.96 | 0.93 | 1.26 | 1.69 | 0.78 | 0.09 | 0.77 |
| 40 | 0.41 | 0.33 | 0.42 | 0.48 | 0.45 | 0.03 | 0.18 |
| 41 | 25.40 | 23.30 | 20.80 | 16.30 | 13.50 | NA | NA |
| 42 | 1.17 | 1.12 | 1.19 | 1.01 | 0.83 | NA | NA |
| 43 | 27.80 | 25.90 | 21.70 | 20.00 | 19.80 | NA | NA |
| 44 | 59.00 | 54.30 | 46.10 | 42.20 | 40.90 | NA | NA |
| 45 | 11.00 | 23.80 | 19.00 | 12.50 | 18.80 | NA | NA |
| 46 | 5.40 | 5.40 | 5.20 | 6.00 | 6.20 | 5.00 | 5.00 |
| 47 | 0.05 | 0.04 | 0.06 | 0.07 | 0.04 | NA | NA |
| 48 | 0.47 | 0.23 | 0.40 | 0.54 | 0.54 | NA | NA |
| 49 | 4.21 | 4.57 | 4.94 | 4.69 | 3.94 | NA | NA |
| 50 | 68.80 | 74.30 | 68.80 | 58.90 | 57.10 | 106.20 | 77.00 |
| 51 | 71.90 | 78.00 | 72.40 | 67.30 | 68.70 | 105.00 | NA |
| 52 | 3.28 | 4.78 | 3.51 | 3.04 | 1.81 | NA | NA |
| 53 | 29.80 | 25.40 | 27.40 | 28.10 | 21.50 | NA | NA |
| 54 | 3.06 | 3.25 | 3.51 | 3.02 | 1.92 | NA | NA |
| 55 | 2.19 | 2.11 | 2.65 | 2.02 | 0.62 | NA | NA |
| 56 | 61.90 | 62.30 | 59.20 | 55.20 | 44.70 | NA | NA |
| 57 | 23.40 | 36.00 | 38.90 | 37.20 | 33.00 | 22.40 | 34.60 |
| 58 | 0.11 | 0.16 | 0.52 | 1.04 | 0.54 | 0.27 | 0.25 |
| 59 | 73.30 | NA | 70.90 | 80.70 | 74.90 | NA | NA |
| 60 | 6.00 | 6.20 | 8.20 | 10.80 | 7.60 | 6.60 | 7.80 |
| 61 | 95.70 | 54.20 | 88.40 | 110.30 | 103.10 | NA | NA |
| 62 | 0.34 | 0.45 | 0.46 | 0.52 | 0.43 | 0.33 | 0.39 |

Table 219. Provided are the values of each of the parameters (as described above) measured in wheat accessions (Lines). Growth conditions are specified in the experimental procedure section.
“NA” = not available.
“Corr.”—correlation.

TABLE 220
Measured parameters of correlation IDs in wheat accessions
under low N conditions

| Corr. | Line | | | | | | |
|---|---|---|---|---|---|---|---|
| ID | Line-1 | Line-2 | Line-3 | Line-4 | Line-5 | Line-6 | Line-7 |
| 1 | 3.43 | 2.50 | 2.98 | 3.29 | 2.54 | 2.93 | 1.26 |
| 2 | 1.06 | 0.75 | 1.22 | 2.02 | 0.64 | 0.97 | 0.40 |
| 3 | 1.36 | 0.99 | 1.76 | 2.66 | 1.12 | 1.45 | 0.79 |
| 4 | 3.13 | 2.01 | 3.00 | 5.55 | 1.32 | 3.31 | 0.83 |
| 5 | 0.29 | 0.33 | 0.30 | 0.50 | 0.23 | 0.32 | NA |
| 6 | 16.20 | 16.30 | 17.50 | 16.40 | 18.00 | 16.50 | 20.60 |
| 7 | 78.70 | 67.40 | 95.70 | 71.50 | 81.50 | 70.10 | 23.70 |
| 8 | 25.30 | 20.10 | 39.40 | 43.80 | 21.10 | 24.50 | 8.40 |
| 9 | 2.69 | 1.73 | 2.94 | 3.57 | 1.93 | 2.45 | 0.69 |
| 10 | 71.80 | 67.60 | 90.50 | 86.80 | 85.60 | 86.30 | 90.20 |
| 11 | 0.18 | 0.16 | 0.14 | 0.18 | 0.15 | 0.18 | 0.12 |
| 12 | 0.51 | 0.41 | 0.38 | 0.50 | 0.27 | 0.38 | 0.09 |
| 13 | 8.05 | 5.90 | 7.31 | 11.08 | 8.29 | 7.38 | 9.73 |
| 14 | 7.32 | 6.31 | 8.17 | 7.87 | 10.05 | 8.70 | 14.36 |
| 15 | 18.50 | 15.50 | 19.60 | 19.80 | 23.90 | 20.10 | 32.40 |
| 16 | 1.29 | 1.10 | 1.13 | 1.51 | 1.03 | 1.07 | 0.92 |
| 17 | 27.50 | 31.60 | 27.10 | 33.10 | 22.40 | 33.80 | NA |
| 18 | 52.70 | 46.60 | 67.20 | 52.40 | 92.30 | 58.80 | 90.00 |
| 19 | 1.80 | 2.60 | 4.20 | 1.60 | 3.20 | 2.80 | 2.40 |
| 20 | 4.14 | 4.22 | 4.29 | 3.00 | 6.05 | 5.29 | 2.40 |
| 21 | 3.75 | 5.50 | 4.50 | 2.50 | 7.75 | 6.25 | NA |
| 22 | 9.48 | −30.26 | −5.00 | 16.67 | −28.15 | −18.24 | NA |
| 23 | 17.30 | 36.40 | 46.10 | 33.00 | 51.90 | 53.20 | NA |
| 24 | 34.60 | 33.40 | 33.10 | 32.00 | 38.60 | 41.90 | 36.90 |
| 25 | 11.20 | 8.00 | 10.00 | 9.60 | 7.00 | 8.80 | 8.20 |
| 26 | 0.78 | 0.63 | 0.28 | 1.10 | 0.48 | 0.68 | 0.61 |
| 27 | 0.02 | 0.02 | 0.01 | 0.03 | 0.01 | 0.02 | NA |
| 28 | 0.45 | 0.48 | 0.64 | 0.51 | 0.39 | 0.55 | 0.48 |
| 29 | 19.10 | 19.50 | 40.00 | 17.70 | 59.00 | 28.30 | 75.00 |
| 30 | 0.58 | 0.77 | 2.24 | 0.47 | 0.81 | 0.81 | 0.79 |
| 31 | 201.40 | 190.90 | NA | 183.00 | NA | 148.40 | NA |
| 32 | 15.28 | 20.23 | NA | 11.13 | NA | 15.37 | NA |
| 33 | 0.94 | 1.01 | NA | 0.80 | NA | 0.90 | NA |
| 34 | 20.00 | 24.80 | NA | 16.80 | NA | 21.20 | NA |
| 35 | 44.00 | 53.50 | NA | 35.90 | NA | 43.80 | NA |
| 36 | 6.40 | 6.40 | 6.80 | 6.00 | 6.00 | 6.20 | 5.00 |
| 37 | NA | NA | NA | NA | 6.25 | NA | NA |
| 38 | 40.40 | 32.20 | 38.20 | 42.40 | 37.50 | 42.30 | NA |
| 39 | 41.10 | 26.00 | NA | 38.90 | NA | 38.10 | NA |
| 40 | 33.10 | NA | NA | 32.57 | NA | NA | NA |
| 41 | 78.10 | 75.00 | 84.40 | 84.10 | NA | 82.70 | NA |
| 42 | 25.90 | 39.60 | 44.70 | 32.30 | 20.80 | 43.80 | NA |
| 43 | 2.45 | 2.85 | 3.54 | 3.59 | 2.88 | 3.42 | NA |
| 44 | 1.22 | 2.52 | 4.39 | 3.26 | 1.36 | 4.02 | 0.00 |
| 45 | 47.50 | 81.10 | 85.40 | 61.30 | 62.30 | 94.40 | NA |
| 46 | 4.12 | 4.08 | 4.44 | 4.75 | 3.94 | 3.81 | NA |
| 47 | 0.14 | 0.10 | 0.12 | 0.13 | 0.10 | 0.12 | 0.05 |
| 48 | 0.42 | 0.48 | 0.43 | 0.35 | 0.49 | 0.39 | NA |
| 49 | 0.06 | 0.05 | 0.03 | 0.06 | 0.02 | 0.04 | NA |
| 50 | 5.03 | 3.92 | 6.22 | 6.07 | 7.61 | 5.99 | 0.00 |
| 51 | 0.54 | 0.49 | 0.42 | 0.66 | 0.28 | 0.56 | NA |
| 52 | 0.92 | 0.93 | 0.74 | 1.01 | 0.68 | 0.89 | NA |
| 53 | 162.00 | 155.90 | 547.20 | 138.10 | 399.40 | 219.80 | NA |
| 54 | 68.40 | 48.00 | 64.70 | 99.70 | 53.70 | 83.60 | NA |
| 55 | 57.40 | 50.00 | 90.80 | 52.10 | 136.70 | 66.30 | NA |
| 56 | 137.80 | 165.90 | 187.00 | 144.70 | 183.80 | 182.50 | NA |
| 57 | 26.60 | 22.90 | 23.40 | 24.00 | 32.60 | 23.50 | NA |
| 58 | 8.60 | 9.96 | 9.81 | 9.58 | 7.09 | 9.80 | NA |
| 59 | 14.20 | 25.20 | 14.40 | 31.90 | 16.50 | 17.70 | 18.60 |
| 60 | 5.77 | 7.70 | 6.64 | 6.17 | NA | NA | NA |
| 61 | 57.60 | 67.10 | 76.20 | 61.30 | 80.60 | 65.10 | 109.00 |
| 62 | 68.90 | 73.00 | 77.90 | 68.00 | 82.60 | 71.20 | 105.00 |

Table 220. Provided are the values of each of the parameters (as described above) measured in wheat accessions (Lines). Growth conditions are specified in the experimental procedure section.
“NA” = not available.
“Corr.”—correlation.

TABLE 221
Measured parameters of correlation IDs in additional wheat
accessions under low N conditions

| Corr. | Line | | | | | | |
|---|---|---|---|---|---|---|---|
| ID | Line-8 | Line-9 | Line-10 | Line-11 | Line-12 | Line-13 | Line-14 |
| 1 | 2.77 | 2.63 | 3.27 | 3.41 | 2.75 | 1.50 | 0.92 |
| 2 | 0.93 | 0.88 | 1.82 | 1.67 | 0.83 | 0.51 | 0.20 |
| 3 | 1.46 | 1.52 | 2.60 | 2.50 | 1.26 | 1.09 | 0.71 |
| 4 | 2.96 | 3.21 | 5.22 | 5.01 | 2.98 | 1.14 | 0.84 |
| 5 | 0.37 | 0.34 | 0.70 | 0.58 | 0.27 | NA | NA |
| 6 | 15.20 | 17.20 | 18.50 | 18.00 | 17.10 | 18.40 | 19.00 |
| 7 | 57.70 | 74.80 | 83.60 | 81.60 | 73.10 | 67.70 | 24.50 |
| 8 | 19.90 | 24.80 | 46.50 | 40.90 | 22.10 | 23.00 | 7.80 |
| 9 | 1.85 | 2.29 | 3.58 | 3.62 | 2.26 | 2.02 | 0.63 |
| 10 | 78.70 | 79.10 | 80.70 | 80.60 | 75.70 | 83.30 | 81.50 |
| 11 | 0.19 | 0.16 | 0.17 | 0.17 | 0.16 | 0.13 | 0.12 |
| 12 | 0.39 | 0.33 | 0.42 | 0.46 | 0.45 | 0.17 | 0.14 |
| 13 | 8.21 | 7.77 | 10.74 | 10.17 | 7.26 | 7.27 | 9.72 |
| 14 | 7.00 | 6.99 | 8.08 | 7.44 | 6.43 | 9.01 | 13.43 |
| 15 | 18.70 | 18.70 | 20.30 | 19.00 | 16.30 | 21.80 | 30.30 |
| 16 | 1.40 | 1.40 | 1.51 | 1.57 | 1.33 | 1.12 | 1.05 |
| 17 | 31.40 | 31.90 | 31.10 | 30.40 | 28.00 | NA | NA |
| 18 | 55.20 | 64.50 | 62.20 | 56.60 | 51.10 | 84.80 | 91.80 |
| 19 | 3.20 | 2.40 | 2.80 | 2.00 | 2.00 | 3.20 | 2.40 |
| 20 | 4.76 | 3.90 | 3.65 | 3.19 | 4.10 | 3.20 | 2.40 |
| 21 | 4.50 | 6.25 | 3.25 | 3.00 | 4.00 | NA | NA |
| 22 | 5.50 | −60.06 | 10.96 | 5.97 | 2.33 | NA | NA |
| 23 | 35.00 | 52.00 | 44.60 | 31.70 | 16.90 | NA | NA |
| 24 | 32.20 | 32.90 | 37.30 | 36.40 | 27.40 | 32.20 | 33.00 |
| 25 | 9.20 | 8.80 | 11.40 | 10.40 | 10.80 | 7.00 | 7.40 |
| 26 | 0.65 | 0.75 | 1.51 | 1.05 | 0.72 | 0.40 | 0.60 |
| 27 | 0.02 | 0.02 | 0.04 | 0.03 | 0.03 | NA | NA |
| 28 | 0.66 | 0.60 | 0.61 | 0.60 | 0.63 | 0.43 | 0.43 |
| 29 | 22.30 | 28.20 | 24.70 | 19.80 | 19.50 | 63.20 | 75.90 |
| 30 | 1.01 | 0.80 | 0.41 | 0.57 | 0.87 | 1.06 | 0.72 |
| 31 | 100.50 | 237.30 | 109.90 | 273.80 | 230.90 | NA | NA |
| 32 | 13.37 | 18.07 | 14.65 | 16.78 | 12.92 | NA | NA |
| 33 | 0.81 | 0.98 | 0.95 | 0.93 | 0.92 | NA | NA |
| 34 | 19.80 | 22.10 | 19.60 | 22.30 | 18.00 | NA | NA |
| 35 | 41.90 | 46.50 | 45.20 | 46.60 | 38.40 | NA | NA |
| 36 | 5.60 | 5.40 | 6.00 | 6.00 | 6.00 | 5.80 | 5.40 |
| 37 | NA | NA | NA | NA | NA | NA | NA |
| 38 | 38.80 | 36.30 | NA | 45.10 | 34.60 | NA | NA |
| 39 | 32.10 | 31.50 | 41.40 | 45.30 | 35.20 | NA | NA |
| 40 | NA | NA | NA | 37.87 | 29.01 | NA | NA |
| 41 | 72.50 | 53.60 | 84.00 | 79.50 | 86.20 | NA | NA |
| 42 | 42.70 | 37.80 | 32.50 | 27.70 | 24.60 | NA | NA |
| 43 | 3.16 | 3.23 | 3.69 | 3.51 | 2.44 | NA | NA |
| 44 | 3.34 | 3.09 | 3.46 | 2.68 | 1.14 | NA | NA |
| 45 | 74.40 | 80.20 | 64.60 | 61.80 | 54.10 | NA | NA |
| 46 | 3.31 | 4.25 | 3.53 | 4.56 | 4.56 | NA | NA |
| 47 | 0.11 | 0.11 | 0.13 | 0.14 | 0.11 | NA | NA |
| 48 | 0.35 | 0.43 | 0.30 | 0.30 | 0.38 | NA | NA |
| 49 | 0.04 | 0.03 | 0.03 | 0.05 | 0.04 | NA | NA |
| 50 | 6.24 | 6.00 | 8.40 | 7.49 | 5.44 | NA | NA |
| 51 | 0.56 | 0.47 | 0.45 | 0.66 | 0.51 | NA | NA |
| 52 | 0.81 | 0.81 | 0.54 | 0.89 | 0.76 | NA | NA |
| 53 | 238.90 | 201.20 | 139.30 | 178.10 | 188.90 | NA | NA |
| 54 | 87.80 | 69.90 | 95.10 | 123.60 | 68.90 | NA | NA |
| 55 | 68.20 | 80.10 | 114.90 | 63.70 | 67.10 | NA | NA |
| 56 | 134.10 | 149.80 | 92.60 | 132.20 | 122.60 | NA | NA |
| 57 | 24.40 | 23.80 | 25.40 | 22.60 | 21.00 | NA | NA |
| 58 | 9.46 | 9.69 | 9.02 | 10.20 | 10.94 | NA | NA |
| 59 | 15.40 | 9.50 | 24.20 | 25.40 | 13.50 | 21.50 | 15.70 |
| 60 | 9.31 | 7.49 | 5.62 | 5.46 | 4.75 | NA | NA |
| 61 | 65.60 | 70.00 | 66.40 | 58.40 | 53.10 | 103.60 | 109.00 |
| 62 | 71.00 | 72.60 | 73.00 | 67.80 | 68.40 | 101.10 | 105.00 |

Table 221. Provided are the values of each of the parameters (as described above) measured in wheat accessions (Lines). Growth conditions are specified in the experimental procedure section.
“NA” = not available.
“Corr.”—correlation.

TABLE 222
Additional measured parameters of correlation IDs in wheat
accessions under low N vs. normal conditions (ratio)

| Corr. | Line | | | | | | |
|---|---|---|---|---|---|---|---|
| ID | Line-1 | Line-2 | Line-3 | Line-4 | Line-5 | Line-6 | Line-7 |
| 1 | 0.57 | 1.30 | 1.24 | 1.07 | 1.78 | 0.84 | 0.84 |
| 2 | 1.58 | 2.55 | 2.19 | 2.16 | 1.83 | 1.45 | NA |
| 3 | 0.97 | 0.92 | 1.11 | 0.98 | NA | 1.14 | NA |
| 4 | 0.89 | 0.99 | 0.90 | 0.95 | 0.91 | 0.95 | 0.88 |
| 5 | 0.99 | 1.01 | NA | 1.10 | NA | 1.22 | NA |
| 6 | 1.28 | 1.51 | 1.73 | 1.18 | 0.98 | 1.26 | 1.40 |
| 7 | 1.24 | 1.37 | 1.34 | 1.22 | NA | 1.50 | NA |
| 8 | 1.12 | 1.41 | 1.75 | 1.16 | 1.09 | 1.08 | 3.03 |
| 9 | 3.03 | 3.63 | 3.17 | 2.22 | 2.35 | 2.41 | 10.62 |
| 10 | 1.13 | 1.60 | 1.72 | 1.52 | 1.08 | 1.24 | NA |
| 11 | 2.01 | 1.58 | 1.46 | 1.69 | 1.62 | 1.80 | NA |
| 12 | 0.94 | 1.05 | 1.00 | 1.08 | 0.90 | 1.11 | NA |
| 13 | 1.11 | 2.06 | 1.18 | 0.94 | 1.02 | 1.56 | 1.15 |
| 14 | 1.10 | 0.92 | NA | 1.01 | NA | 0.82 | NA |
| 15 | 1.04 | 1.04 | 0.88 | 1.05 | 0.82 | 0.94 | NA |
| 16 | 1.00 | 1.33 | 1.25 | 0.87 | 0.90 | 1.13 | 0.80 |
| 17 | 1.91 | 2.43 | 2.50 | 2.36 | 2.12 | 1.50 | NA |
| 18 | 1.00 | 0.95 | 0.90 | 0.97 | NA | 0.95 | NA |
| 19 | 0.89 | −3.64 | 1.42 | −14.30 | 1.13 | 1.29 | NA |
| 20 | 1.73 | 1.56 | 1.57 | 1.56 | 2.25 | 1.76 | NA |
| 21 | 1.71 | 3.14 | 2.82 | 2.16 | 1.50 | 1.67 | NA |
| 22 | 0.57 | 0.63 | 0.63 | 0.64 | 0.44 | 0.56 | NA |
| 23 | 0.84 | 1.43 | 2.11 | 1.24 | 0.64 | 1.60 | NA |
| 24 | 1.11 | 0.07 | 0.34 | 0.68 | 0.42 | 0.60 | NA |
| 25 | 0.79 | 4.23 | 1.21 | 1.16 | 1.29 | 0.88 | NA |
| 26 | −0.19 | −1.56 | 0.47 | 0.72 | 1.69 | 0.43 | NA |
| 27 | 1.39 | 1.88 | 1.69 | 1.31 | 1.77 | 1.16 | NA |
| 28 | 0.57 | 0.63 | 0.63 | 0.64 | 0.44 | 0.56 | NA |
| 29 | 0.44 | 0.29 | 0.28 | 0.26 | 0.39 | 0.36 | NA |

Table 222. Provided are the values of each of the parameters (as described above) measured in wheat accessions (Lines). Growth conditions are specified in the experimental procedure section.
“NA” = not available.
“Corr.”—correlation.

TABLE 223
Additional measured parameters of correlation IDs in wheat
accessions under low N vs. normal conditions (ratio)

| Corr. | Line | | | | | | |
|---|---|---|---|---|---|---|---|
| ID | Line-8 | Line-9 | Line-10 | Line-11 | Line-12 | Line-13 | Line-14 |
| 1 | 1.02 | 0.70 | 1.17 | 0.76 | 0.81 | 1.68 | 1.17 |
| 2 | 1.39 | 2.97 | 0.97 | 1.07 | 1.00 | NA | NA |
| 3 | 0.94 | 0.91 | 1.02 | 0.93 | 1.00 | NA | NA |
| 4 | 0.94 | 0.92 | 0.90 | 0.87 | 0.92 | 1.17 | 1.08 |
| 5 | 0.96 | NA | 1.07 | 1.12 | 1.06 | NA | NA |
| 6 | 1.00 | 1.06 | 1.55 | 1.20 | 1.20 | 4.52 | 1.18 |
| 7 | 1.01 | 1.19 | 1.55 | 1.29 | 0.99 | NA | NA |
| 8 | 0.97 | 0.95 | 1.44 | 0.99 | 1.07 | 5.54 | 0.26 |
| 9 | 2.10 | 2.56 | 2.18 | 1.98 | 3.07 | NA | NA |
| 10 | 1.19 | 2.04 | 1.12 | 1.22 | 0.94 | NA | NA |
| 11 | 1.90 | 1.26 | 2.39 | 2.46 | 3.00 | NA | NA |
| 12 | 1.03 | 0.99 | 1.05 | 1.16 | 1.27 | NA | NA |
| 13 | 1.37 | 0.91 | 0.96 | 0.98 | 0.83 | 1.44 | 0.95 |
| 14 | 0.83 | 0.88 | 0.91 | 0.97 | 1.00 | NA | NA |
| 15 | 1.00 | 1.01 | NA | 1.05 | 1.01 | NA | NA |
| 16 | 1.53 | 1.42 | 1.39 | 0.96 | 1.42 | 1.06 | 0.95 |
| 17 | 1.40 | 2.76 | 1.05 | 1.20 | 1.19 | NA | NA |
| 18 | 0.93 | 1.00 | 0.98 | 0.92 | 1.01 | NA | NA |
| 19 | −1.35 | 1.52 | 1.63 | 26.92 | 0.66 | NA | NA |
| 20 | 1.74 | 1.55 | 1.47 | 1.32 | 1.39 | NA | NA |
| 21 | 1.33 | 2.94 | 0.99 | 1.08 | 0.96 | NA | NA |
| 22 | 0.57 | 0.64 | 0.67 | 0.75 | 0.71 | NA | NA |
| 23 | 1.53 | 1.46 | 1.31 | 1.33 | 1.84 | NA | NA |
| 24 | 0.15 | 0.09 | 0.34 | 1.33 | 1.22 | NA | NA |
| 25 | 4.38 | 5.03 | 3.04 | 1.03 | 1.59 | NA | NA |
| 26 | 0.27 | 3.73 | −0.23 | −0.18 | −0.03 | NA | NA |
| 27 | 1.15 | 2.05 | 0.89 | 0.79 | 1.07 | NA | NA |
| 28 | 0.57 | 0.64 | 0.67 | 0.75 | 0.71 | NA | NA |
| 29 | 0.39 | 0.22 | 0.55 | 0.46 | 0.80 | NA | NA |

Table 223. Provided are the values of each of the parameters (as described above) measured in wheat accessions (Lines). Growth conditions are specified in the experimental procedure section.
“NA” = not available.
“Corr.”—correlation

TABLE 224
Correlation between the expression level of selected genes of some embodiments
of the invention in various tissues and the phenotypic performance under normal
conditions across wheat accessions

| Gene | | | Exp. | Corr. | Gene | | | Exp. | Corr. |
|---|---|---|---|---|---|---|---|---|---|
| Name | R | P value | set | ID | Name | R | P value | set | ID |
| LBY502 | 0.72 | 1.78E−02 | 1 | 58 | LBY502 | 0.71 | 2.18E−02 | 1 | 7 |
| LBY502 | 0.73 | 1.70E−02 | 1 | 62 | LBY502 | 0.74 | 1.51E−02 | 1 | 24 |
| LBY502 | 0.82 | 6.24E−03 | 1 | 37 | LBY502 | 0.71 | 2.25E−02 | 1 | 6 |
| LBY502 | 0.94 | 5.37E−03 | 5 | 58 | LBY502 | 0.90 | 1.49E−02 | 5 | 23 |
| LBY502 | 0.82 | 4.45E−02 | 5 | 48 | LBY502 | 0.76 | 8.15E−02 | 5 | 7 |
| LBY502 | 0.86 | 2.85E−02 | 5 | 62 | LBY502 | 0.76 | 7.82E−02 | 5 | 32 |
| LBY502 | 0.90 | 1.47E−02 | 5 | 60 | LBY502 | 0.75 | 8.35E−02 | 5 | 9 |
| LBY502 | 0.78 | 6.63E−02 | 5 | 37 | LBY502 | 0.77 | 7.19E−02 | 5 | 29 |
| LBY502 | 0.93 | 6.54E−03 | 5 | 40 | LBY502 | 0.80 | 5.67E−02 | 5 | 46 |
| LBY502 | 0.96 | 2.15E−03 | 5 | 6 | LBY502 | 0.72 | 1.78E−02 | 10 | 58 |
| LBY502 | 0.71 | 2.18E−02 | 10 | 7 | LBY502 | 0.73 | 1.70E−02 | 10 | 62 |
| LBY502 | 0.74 | 1.51E−02 | 10 | 24 | LBY502 | 0.82 | 6.24E−03 | 10 | 37 |
| LBY502 | 0.71 | 2.25E−02 | 10 | 6 | LBY502 | 0.94 | 5.37E−03 | 14 | 58 |
| LBY502 | 0.90 | 1.49E−02 | 14 | 23 | LBY502 | 0.82 | 4.45E−02 | 14 | 48 |
| LBY502 | 0.76 | 8.15E−02 | 14 | 7 | LBY502 | 0.86 | 2.85E−02 | 14 | 62 |
| LBY502 | 0.76 | 7.82E−02 | 14 | 32 | LBY502 | 0.90 | 1.47E−02 | 14 | 60 |
| LBY502 | 0.75 | 8.35E−02 | 14 | 9 | LBY502 | 0.78 | 6.63E−02 | 14 | 37 |
| LBY502 | 0.77 | 7.19E−02 | 14 | 29 | LBY502 | 0.93 | 6.54E−03 | 14 | 40 |
| LBY502 | 0.80 | 5.67E−02 | 14 | 46 | LBY502 | 0.96 | 2.15E−03 | 14 | 6 |
| LBY503 | 0.70 | 2.41E−02 | 2 | 61 | LBY503 | 0.76 | 2.96E−02 | 2 | 21 |
| LBY503 | 0.79 | 7.02E−03 | 7 | 30 | LBY503 | 0.71 | 2.21E−02 | 1 | 30 |
| LBY503 | 0.76 | 1.85E−02 | 1 | 28 | LBY503 | 0.79 | 3.35E−02 | 4 | 31 |
| LBY503 | 0.76 | 2.90E−02 | 4 | 44 | LBY503 | 0.76 | 1.14E−02 | 4 | 1 |
| LBY503 | 0.83 | 1.15E−02 | 4 | 43 | LBY503 | 0.71 | 2.15E−02 | 4 | 5 |
| LBY503 | 0.75 | 1.30E−02 | 9 | 1 | LBY503 | 0.73 | 1.69E−02 | 9 | 20 |
| LBY503 | 0.87 | 1.08E−03 | 9 | 5 | LBY503 | 0.75 | 8.41E−02 | 5 | 1 |
| LBY503 | 0.73 | 1.07E−02 | 8 | 50 | LBY503 | 0.74 | 9.39E−03 | 8 | 52 |
| LBY503 | 0.75 | 8.32E−03 | 8 | 51 | LBY503 | 0.78 | 5.04E−03 | 8 | 45 |
| LBY503 | 0.84 | 1.36E−03 | 8 | 20 | LBY503 | 0.70 | 2.41E−02 | 11 | 61 |
| LBY503 | 0.76 | 2.96E−02 | 11 | 21 | LBY503 | 0.79 | 7.02E−03 | 16 | 30 |
| LBY503 | 0.71 | 2.21E−02 | 10 | 30 | LBY503 | 0.79 | 3.35E−02 | 13 | 31 |
| LBY503 | 0.76 | 2.90E−02 | 13 | 44 | LBY503 | 0.76 | 1.14E−02 | 13 | 1 |
| LBY503 | 0.83 | 1.15E−02 | 13 | 43 | LBY503 | 0.71 | 2.15E−02 | 13 | 5 |
| LBY503 | 0.75 | 1.30E−02 | 18 | 1 | LBY503 | 0.73 | 1.69E−02 | 18 | 20 |
| LBY503 | 0.87 | 1.08E−03 | 18 | 5 | LBY503 | 0.75 | 8.41E−02 | 14 | 1 |
| LBY503 | 0.74 | 9.39E−03 | 17 | 52 | LBY503 | 0.78 | 5.04E−03 | 17 | 45 |
| LBY503 | 0.84 | 1.36E−03 | 17 | 20 | LBY504 | 0.80 | 5.81E−03 | 7 | 30 |
| LBY504 | 0.75 | 1.32E−02 | 7 | 10 | LBY504 | 0.71 | 2.19E−02 | 7 | 40 |
| LBY504 | 0.72 | 1.31E−02 | 3 | 52 | LBY504 | 0.76 | 6.50E−03 | 3 | 20 |
| LBY504 | 0.78 | 8.13E−03 | 1 | 30 | LBY504 | 0.83 | 2.73E−03 | 1 | 10 |
| LBY504 | 0.78 | 7.32E−03 | 1 | 7 | LBY504 | 0.71 | 2.06E−02 | 1 | 32 |
| LBY504 | 0.78 | 1.37E−02 | 1 | 37 | LBY504 | 0.89 | 5.73E−04 | 1 | 40 |
| LBY504 | 0.80 | 5.81E−03 | 16 | 30 | LBY504 | 0.75 | 1.32E−02 | 16 | 10 |
| LBY504 | 0.71 | 2.19E−02 | 16 | 40 | LBY504 | 0.72 | 1.31E−02 | 12 | 52 |
| LBY504 | 0.76 | 6.50E−03 | 12 | 20 | LBY504 | 0.78 | 8.13E−03 | 10 | 30 |
| LBY504 | 0.83 | 2.73E−03 | 10 | 10 | LBY504 | 0.78 | 7.32E−03 | 10 | 7 |
| LBY504 | 0.71 | 2.06E−02 | 10 | 32 | LBY504 | 0.78 | 1.37E−02 | 10 | 37 |
| LBY504 | 0.89 | 5.73E−04 | 10 | 40 | | | | | |

Table 224. Provided are the correlations (R) between the genes expression levels in various tissues and the phenotypic performance (Tables 218-219).
“Corr. ID”—correlation vector ID according to the correlated parameters specified in Table 215.
“Exp. Set”—Expression set specified in Table 212.
“R” = Pearson correlation coefficient;
“P” = p value.

TABLE 225
Correlation between the expression level of selected genes of some embodiments
of the invention in various tissues and the phenotypic performance under low N
conditions across wheat accessions

| Gene | | | Exp. | Corr. | Gene | | | Exp. | Corr. |
|---|---|---|---|---|---|---|---|---|---|
| Name | R | P value | set | ID | Name | R | P value | set | ID |
| LBY502 | 0.88 | 2.94E−04 | 2 | 11 | LBY502 | 0.75 | 5.41E−02 | 3 | 26 |
| LBY502 | 0.81 | 2.84E−02 | 3 | 16 | LBY502 | 0.87 | 1.14E−02 | 3 | 28 |
| LBY502 | 0.76 | 4.54E−02 | 3 | 4 | LBY502 | 0.86 | 1.23E−02 | 3 | 27 |
| LBY502 | 0.74 | 5.67E−02 | 3 | 25 | LBY502 | 0.73 | 1.76E−02 | 7 | 24 |
| LBY502 | 0.72 | 1.08E−01 | 4 | 12 | LBY502 | 0.75 | 8.28E−02 | 4 | 22 |
| LBY502 | 0.70 | 1.56E−02 | 1 | 12 | LBY502 | 0.88 | 2.94E−04 | 10 | 11 |
| LBY502 | 0.75 | 5.41E−02 | 11 | 26 | LBY502 | 0.81 | 2.84E−02 | 11 | 16 |
| LBY502 | 0.87 | 1.14E−02 | 11 | 28 | LBY502 | 0.76 | 4.54E−02 | 11 | 4 |
| LBY502 | 0.74 | 5.67E−02 | 11 | 25 | LBY502 | 0.86 | 1.23E−02 | 11 | 27 |
| LBY502 | 0.73 | 1.76E−02 | 15 | 24 | LBY502 | 0.72 | 1.08E−01 | 12 | 12 |
| LBY502 | 0.75 | 8.28E−02 | 12 | 22 | LBY502 | 0.70 | 1.56E−02 | 9 | 12 |
| LBY503 | 0.72 | 1.17E−02 | 2 | 43 | LBY503 | 0.80 | 3.05E−03 | 2 | 54 |
| LBY503 | 0.72 | 1.32E−02 | 2 | 51 | LBY503 | 0.82 | 3.40E−03 | 2 | 38 |
| LBY503 | 0.95 | 8.89E−04 | 3 | 43 | LBY503 | 0.86 | 1.37E−02 | 3 | 44 |
| LBY503 | 0.84 | 1.71E−02 | 3 | 23 | LBY503 | 0.71 | 7.26E−02 | 3 | 5 |
| LBY503 | 0.71 | 7.30E−02 | 3 | 24 | LBY503 | 0.72 | 7.05E−02 | 3 | 6 |
| LBY503 | 0.80 | 5.98E−03 | 7 | 44 | LBY503 | 0.76 | 1.12E−02 | 7 | 45 |
| LBY503 | 0.72 | 1.88E−02 | 7 | 42 | LBY503 | 0.72 | 1.91E−02 | 7 | 24 |
| LBY503 | 0.89 | 1.67E−02 | 4 | 41 | LBY503 | 0.79 | 6.24E−02 | 4 | 28 |
| LBY503 | 0.72 | 1.08E−01 | 4 | 58 | LBY503 | 0.73 | 9.88E−02 | 4 | 25 |
| LBY503 | 0.72 | 1.07E−01 | 4 | 30 | LBY503 | 0.76 | 6.77E−03 | 6 | 10 |
| LBY503 | 0.74 | 8.53E−03 | 6 | 15 | LBY503 | 0.80 | 2.88E−03 | 6 | 14 |
| LBY503 | 0.72 | 1.17E−02 | 10 | 43 | LBY503 | 0.80 | 3.05E−03 | 10 | 54 |
| LBY503 | 0.72 | 1.32E−02 | 10 | 51 | LBY503 | 0.82 | 3.40E−03 | 10 | 38 |
| LBY503 | 0.95 | 8.89E−04 | 11 | 43 | LBY503 | 0.86 | 1.37E−02 | 11 | 44 |
| LBY503 | 0.84 | 1.71E−02 | 11 | 23 | LBY503 | 0.71 | 7.26E−02 | 11 | 5 |
| LBY503 | 0.71 | 7.30E−02 | 11 | 24 | LBY503 | 0.72 | 7.05E−02 | 11 | 6 |
| LBY503 | 0.80 | 5.98E−03 | 15 | 44 | LBY503 | 0.76 | 1.12E−02 | 15 | 45 |
| LBY503 | 0.72 | 1.88E−02 | 15 | 42 | LBY503 | 0.72 | 1.91E−02 | 15 | 24 |
| LBY503 | 0.89 | 1.67E−02 | 12 | 41 | LBY503 | 0.79 | 6.24E−02 | 12 | 28 |
| LBY503 | 0.72 | 1.08E−01 | 12 | 58 | LBY503 | 0.73 | 9.88E−02 | 12 | 25 |
| LBY503 | 0.72 | 1.07E−01 | 12 | 30 | LBY503 | 0.76 | 6.77E−03 | 14 | 10 |
| LBY503 | 0.74 | 8.53E−03 | 14 | 15 | LBY503 | 0.80 | 2.88E−03 | 14 | 14 |
| LBY504 | 0.84 | 2.42E−03 | 7 | 26 | LBY504 | 0.84 | 2.27E−03 | 7 | 5 |
| LBY504 | 0.71 | 2.21E−02 | 7 | 27 | LBY504 | 0.84 | 2.42E−03 | 15 | 26 |
| LBY504 | 0.84 | 2.27E−03 | 15 | 5 | LBY504 | 0.71 | 2.21E−02 | 15 | 27 |

Table 225. Provided are the correlations (R) between the genes expression levels in various tissues and the phenotypic performance (Tables 220-221).
“Corr. ID”—correlation vector ID according to the correlated parameters specified in Table 216.
“Exp. Set”—Expression set specified in Table 213.
“R” = Pearson correlation coefficient;
“P” = p value

TABLE 226
Correlation between the expression level of selected genes of some embodiments
of the invention in various tissues and the phenotypic performance under low N
vs. normal (ratio) conditions across wheat accessions

| Gene | | | Exp. | Corr. | Gene | | | Exp. | Corr. |
|---|---|---|---|---|---|---|---|---|---|
| Name | R | P value | set | ID | Name | R | P value | set | ID |
| LBY502 | 0.73 | 2.50E−02 | 7 | 7 | LBY502 | 0.88 | 2.07E−02 | 4 | 24 |
| LBY502 | 0.82 | 4.42E−02 | 4 | 26 | LBY502 | 0.73 | 1.67E−02 | 1 | 18 |
| LBY502 | 0.73 | 2.50E−02 | 15 | 7 | LBY502 | 0.88 | 2.07E−02 | 12 | 24 |
| LBY502 | 0.82 | 4.42E−02 | 12 | 26 | LBY502 | 0.73 | 1.67E−02 | 9 | 18 |
| LBY503 | 0.74 | 9.30E−02 | 3 | 7 | LBY503 | 0.77 | 1.53E−02 | 7 | 3 |
| LBY503 | 0.74 | 9.04E−02 | 4 | 11 | LBY503 | 0.76 | 8.15E−02 | 4 | 29 |
| LBY503 | 0.86 | 2.83E−02 | 4 | 12 | LBY503 | 0.72 | 1.08E−01 | 4 | 14 |
| LBY503 | 0.85 | 3.25E−02 | 4 | 16 | LBY503 | 0.86 | 2.69E−02 | 4 | 23 |
| LBY503 | 0.76 | 6.29E−03 | 1 | 16 | LBY503 | 0.78 | 7.72E−03 | 6 | 3 |
| LBY503 | 0.74 | 9.30E−02 | 11 | 7 | LBY503 | 0.77 | 1.53E−02 | 15 | 3 |
| LBY503 | 0.74 | 9.04E−02 | 12 | 11 | LBY503 | 0.76 | 8.15E−02 | 12 | 29 |
| LBY503 | 0.86 | 2.83E−02 | 12 | 12 | LBY503 | 0.72 | 1.08E−01 | 12 | 14 |
| LBY503 | 0.85 | 3.25E−02 | 12 | 16 | LBY503 | 0.86 | 2.69E−02 | 12 | 23 |
| LBY503 | 0.76 | 6.29E−03 | 9 | 16 | LBY503 | 0.78 | 7.72E−03 | 14 | 3 |
| LBY504 | 0.78 | 4.77E−03 | 1 | 16 | LBY504 | 0.78 | 4.77E−03 | 9 | 16 |

Table 226. Provided are the correlations (R) between the genes expression levels in various tissues and the phenotypic performance (Tables 222-223).
“Corr. ID”—correlation vector ID according to the correlated parameters specified in Table 217.
“Exp. Set”—Expression set specified in Table 214.
“R” = Pearson correlation coefficient;
“P” = p value.

### Example 22

### Production of Soybean (Glycine max) Transcriptome and High Throughput Correlation Analysis with Yield Parameters Using 60KB. Soybean Oligonucleotide Micro-Arrays

[1581] In order to produce a high throughput correlation analysis, the present inventors utilized a Soybean oligonucleotide micro-array, produced by Agilent Technologies [chem. (dot) agilent (dot) com/Scripts/PDS (dot) asp?1Page=50879]. The array oligonucleotide represents about 65,000 Soybean genes and transcripts. In order to define correlations between the levels of RNA expression with yield components or plant architecture related parameters or plant vigor related parameters, various plant characteristics of 142 different Glycine max varieties were analyzed and 17 varieties were further used for RNA expression analysis. The correlation between the RNA levels and the characterized parameters was analyzed using Pearson correlation test.

[1582] In order to produce 8 Soybean varieties transcriptome, the present inventors utilized an Illumina [illumina (dot) com ] high throughput sequencing technology, by using TruSeq Stranded Total RNA with Ribo-Zero Plant kit [illumina (dot) com/products/truseq-stranded-total-rna-plant. (dot) html].

[1583] Correlation of Glycine max Genes' Expression Levels with Phenotypic Characteristics Across Ecotype

[1584] Experimental Procedures

[1585] 142 Soybean varieties were grown in two repetitive blocks, in field. Briefly, the growing protocol was as follows: Soybean seeds were sown in soil and grown under normal conditions (no irrigation, good agronomic practices) which included high temperature about 84.4 (° F.), low temperature about 48.6 (° F.); total precipitation rainfall from May through September (from sowing until harvest) was about 28.42 inch (Temperatures about 10-15 degrees below average, effect on reproductive development between varieties).

[1586] In order to define correlations between the levels of RNA expression with yield components, plant architecture related parameters or vigor related parameters, 17 different Soybean varieties (out of 142 varieties) were analyzed and used for gene expression analysis. Analysis was performed at two pre-determined time periods: at vegetative stage (V5) and at pod set (R4-R5, when the soybean pods are formed).

TABLE 227
Soybean transcriptome expression sets

| Expression Set | Set ID |
|---|---|
| Stem at vegetative stage under normal growth condition | 1 |
| Apical meristem at vegetative stage under normal growth | 2 |
| condition | |
| Basal pods at pod setting stage under normal growth condition | 3 |
| Distal pods at pod setting stage under normal growth condition | 4 |
| Root branch at vegetative stage under normal growth condition | 5 |

Table 227. Provided are the identification (ID) digits of each of the Soybean expression sets. The samples were taken for micro-array analysis.

TABLE 228
Soybean transcriptome expression sets

| Expression Set | Set ID |
|---|---|
| Apical meristem at vegetative stage under normal growth | 1 |
| condition | |
| Basal pods at pod setting stage under normal growth condition | 2 |
| Distal pods at pod setting stage under normal growth condition | 3 |

Table 228. Provided are the identification (ID) digits of each of the Soybean expression sets. The samples were taken for RNA sequencing analysis (RNAseq).

[1587] RNA extraction—Selected Soybean varieties were sampled [17 varieties for micro-array analysis: lines 2, 4, 16, 22, 23, 25, 27, 53, 55, 70, 75, 76, 95, 102, 105, 127, 131 and 8 varieties for RNAseq analysis: lines 1, 6, 7, 27, 46, 70, 87, 108] and Plant tissues [Stem, apical meristem, basal and distal pods and root] growing under normal conditions were sampled and RNA was extracted as described above.

[1588] The collected data parameters were as follows:

[1589] Stem width at pod set [cm]—the diameter of the base of the main stem (based diameter), average of three plants per plot.

[1590] Pods on main stem at harvest [number]—number of pods on main stem at harvest, average of three plants per plot.

[1591] Nodes on main stem at harvest [number]—count of number of nodes on main stem starting from first node above ground, average of three plants per plot.

[1592] Plant height at harvest [cm]—Height of main stem, measure from first node above ground to last node before apex, average of three plants per plot.

[1593] Ratio of the number of pods per node on main stem at pod set—calculated in Formula 23 (above), average of three plants per plot.

[1594] Total yield per plot at harvest [gr.]—weight of all seeds on lateral branches and main stem at harvest, average of three plants per plot.

[1595] Days till 50% flowering [days]—number of days till 50% flowering for each plot.

[1596] Maturity [days]—measure as 95% of the pods in a plot have ripened (turned 100% brown). Delayed leaf drop and green stems are not considered in assigning maturity. Tests were observed 3 days per week, every other day, for maturity. The maturity date is the date that 95% of the pods have reached final color. Maturity is expressed in days after August 31 [according to the accepted definition of maturity in USA, Descriptor list for SOYBEAN, ars-grin (dot) gov/cgi-bin/npgs/html/desclist (dot) pl?51].

[1597] Reproductive period [days]—number of days till 50% flowering minus days to maturity.

[1598] Yield at harvest [bushels/hectare]—calculated at harvest (per 2 inner rows of a trimmed plot) as weight in grams of cleaned seeds, adjusted to 13% moisture, and then expressed as bushels per acre.

[1599] Main stem average internode length [cm]—Calculate plant height at pod set and divide by the total number of nodes on main stem at pod set.

[1600] Vegetative nodes growth rate [number/day]—Calculated in Formula 67 average of three plants per plot.

TABLE 229
Soybean correlated parameters (vectors)

| | Correlation |
|---|---|
| Correlated parameter with | ID |
| Stem width (PS) [cm] | 1 |
| Number of days to 50% flowering | 2 |
| Number days to Maturity | 3 |
| Reproductive Period [number] | 4 |
| Pods on main stem (H) [number] | 5 |
| Ratio number of pods per node on main stem [value] | 6 |
| Total yield per plot [gr] | 7 |
| bushels per acre [Kg] | 8 |
| Nodes on main stem (H) [number] | 9 |
| Plant height (H) [cm] | 10 |
| Main stem average internode length [number] | 11 |
| Vegetative nodes growth rate [number/day] | 12 |

Table 229.

[1601] Experimental Results

[1602] 142 different Soybean varieties lines were grown and characterized for 12 parameters as specified above. Tissues for expression analysis were sampled from a subset of 17 lines. The correlated parameters are described in Table 229 above. The average for each of the measured parameters was calculated using the JMP software (Tables 230-234) and a subsequent correlation analysis was performed (Table 235-236). Results were then integrated to the database.

TABLE 230
Measured parameters in Soybean varieties (lines 1-32)

| | Corr. ID | | | | | | | | | | | |
|---|---|---|---|---|---|---|---|---|---|---|---|---|
| Line | 1 | 2 | 3 | 4 | 5 | 6 | 7 | 8 | 9 | 10 | 11 | 12 |
| Line-1 | 5.88 | 43 | 138.5 | 95.5 | 40.8 | 2.95 | 2482 | 67.7 | 13.8 | 263 | 19.1 | 0.533 |
| Line-2 | 6.31 | 44 | 136 | 92 | 40.5 | 3.16 | 2203 | 59.9 | 12.8 | 235.7 | 18.4 | 0.433 |
| Line-3 | NA | 44 | 131 | 87 | 35.3 | 2.96 | 2825 | 76.9 | 12 | 240.2 | 20.1 | NA |
| Line-4 | 7.27 | 40.5 | 132 | 91.5 | 33 | 2.71 | 2251 | 61.2 | 12.2 | 222.3 | 18.3 | 0.267 |
| Line-5 | NA | 42.5 | 131 | 88.5 | 40.3 | 3.27 | 2525 | 68.4 | 12.2 | 244.8 | 20.3 | NA |
| Line-6 | 6.73 | 42.5 | 131 | 88.5 | 30.8 | 2.85 | 2523 | 68.8 | 10.8 | 235.8 | 21.8 | NA |
| Line-7 | 6.39 | 37.5 | 123 | 85.5 | 41.8 | 3.22 | 2003 | 54.2 | 13 | 282 | 21.7 | 0.433 |
| Line-8 | 7.08 | 41.5 | 127 | 85.5 | 30.3 | 2.79 | 2389 | 65 | 10.8 | 285.7 | 26.3 | 0.433 |
| Line-9 | NA | 42 | 127 | 85 | 36 | 3.23 | 2169 | 59 | 11.2 | 218.7 | 19.5 | NA |
| Line-10 | NA | 39 | 136.5 | 97.5 | 35.7 | 3.18 | 2581 | 70.2 | 11.2 | 155 | 13.8 | NA |
| Line-11 | NA | 46 | 131 | 85 | 34 | 2.96 | 1357 | 36.9 | 11.5 | 227.2 | 19.8 | NA |
| Line-12 | NA | 37 | 123.5 | 86.5 | 31.3 | 2.77 | 2123 | 57.9 | 11.3 | 222.2 | 19.7 | NA |
| Line-13 | 8.35 | 42 | 126.5 | 84.5 | 31.3 | 2.6 | 2771 | 75.3 | 12 | 231.3 | 19.3 | NA |
| Line-14 | NA | 41.5 | 125 | 83.5 | 33.5 | 3.09 | 2637 | 71.6 | 10.8 | 216.7 | 20.1 | NA |
| Line-15 | NA | 36 | 123 | 87 | 37.3 | 3.25 | 2650 | 72.3 | 11.5 | 183.5 | 15.9 | NA |
| Line-16 | 6.22 | 35 | 125.5 | 90.5 | 38.8 | 3.05 | 2986 | 81.7 | 12.7 | 228 | 18.1 | 0.667 |
| Line-17 | NA | 36 | 126 | 90 | 39.5 | 3.02 | 2942 | 80.4 | 13 | 247 | 19 | NA |
| Line-18 | NA | 37 | 121 | 84 | 44.2 | 3.12 | 2629 | 71.8 | 14.2 | 220.2 | 15.5 | NA |
| Line-19 | NA | 36.5 | 117.5 | 81 | 32.5 | 2.95 | 2471 | 67.5 | 11 | 242 | 22 | NA |
| Line-20 | 6.71 | 44 | 130.5 | 86.5 | 35 | 3.38 | 1720 | 46.6 | 10.2 | 278.8 | 28.4 | 0.333 |
| Line-21 | NA | 40.5 | 129 | 88.5 | 33.8 | 3.13 | 2104 | 57.3 | 10.8 | 213.3 | 19.7 | NA |
| Line-22 | 7.58 | 42 | 129 | 87 | 34.8 | 3.21 | 2266 | 61.6 | 10.8 | 234 | 21.6 | 0.433 |
| Line-23 | 6.11 | 38.5 | 121.5 | 83 | 36.8 | 3.45 | 1649 | 44.9 | 10.7 | 229.5 | 21.6 | 0.383 |
| Line-24 | NA | 36 | 123.5 | 87.5 | 43.3 | 3.51 | 2637 | 71.9 | 12.3 | 265.7 | 21.8 | NA |
| Line-25 | 8.88 | 39 | 135 | 96 | 43.8 | 3.33 | 2487 | 67.7 | 13.2 | 245.5 | 18.6 | 0.383 |
| Line-26 | 8.72 | 41.5 | 132 | 90.5 | 27.3 | 2.52 | 2091 | 56.9 | 10.8 | 244.3 | 22.6 | 0.767 |
| Line-27 | 5.5 | 42.5 | 114 | 71.5 | 35.8 | 2.87 | 2133 | 58.3 | 12.5 | 229.3 | 18.8 | 0.25 |
| Line-28 | NA | 35 | 115 | 80 | 32.7 | 3.11 | 2368 | 64.6 | 10.5 | 245.2 | 23.4 | NA |
| Line-29 | NA | 38 | 121 | 83 | 27.5 | 2.55 | 2371 | 64.4 | 10.8 | 245 | 22.7 | NA |
| Line-30 | 7.04 | 35 | 122.5 | 87.5 | 33.2 | 2.97 | 2364 | 64.6 | 11.2 | 255.2 | 22.9 | 0.433 |
| Line-31 | NA | 42 | 125 | 83 | 36.8 | 3.12 | 2738 | 74.1 | 11.7 | 273.2 | 23.7 | NA |
| Line-32 | NA | 38 | 125 | 87 | 38.5 | 2.95 | 2345 | 63.7 | 13 | 243.7 | 18.8 | NA |

Table 230.

TABLE 231
Measured parameters in Soybean varieties (lines 33-63)

| | Corr. ID | | | | | | | | | | | |
|---|---|---|---|---|---|---|---|---|---|---|---|---|
| Line | 1 | 2 | 3 | 4 | 5 | 6 | 7 | 8 | 9 | 10 | 11 | 12 |
| Line-33 | NA | 39.5 | 134.5 | 95 | 37.8 | 3.18 | 2187 | 59.6 | 11.8 | 246.7 | 20.9 | NA |
| Line-34 | 6.59 | 44 | 131.5 | 87.5 | 29 | 2.63 | 1194 | 32.4 | 11 | 311.5 | 28.4 | 0.533 |
| Line-35 | NA | 35 | 123.5 | 88.5 | 40 | 3.07 | 2741 | 74.4 | 13 | 288 | 22.5 | NA |
| Line-36 | NA | 40.5 | 121 | 80.5 | 41.7 | 3.25 | 2296 | 62.3 | 12.8 | 246 | 19.3 | NA |
| Line-37 | NA | 42.5 | 122 | 79.5 | 33.3 | 3.08 | 2035 | 55.9 | 10.8 | 253.2 | 23.6 | NA |
| Line-38 | 6.2 | 37 | 131 | 94 | 43 | 3.15 | 2576 | 68.9 | 13.7 | 240.5 | 17.6 | 0.383 |
| Line-39 | NA | 41 | 134.5 | 93.5 | 24.7 | 2.3 | 1831 | 49.8 | 10.7 | 249 | 23.4 | NA |
| Line-40 | NA | 44.5 | 126.5 | 82 | 27.2 | 2.84 | 2380 | 64.9 | 9.5 | 243.3 | 25.9 | NA |
| Line-41 | NA | 35 | 124.5 | 89.5 | 29.8 | 2.84 | 2278 | 61.7 | 10.5 | 242.8 | 23.3 | NA |
| Line-42 | NA | 40 | 134 | 94 | 36 | 2.96 | 1987 | 54.1 | 12.2 | 256.8 | 21.1 | NA |
| Line-43 | NA | 41 | 137 | 96 | 37.8 | 3.11 | 2096 | 57 | 12.2 | 260.8 | 21.4 | NA |
| Line-44 | NA | 35 | 123.5 | 88.5 | 27.3 | 2.52 | 2730 | 74.2 | 10.8 | 257.3 | 23.8 | NA |
| Line-45 | NA | 41 | 133.5 | 92.5 | 38.3 | 3.15 | 1696 | 46.2 | 12.2 | 234.3 | 19.2 | NA |
| Line-46 | 5.83 | 39.5 | 122 | 82.5 | 38.3 | 2.91 | 1306 | 35.2 | 13.2 | 236.2 | 17.9 | 0.583 |
| Line-47 | NA | 41 | 131 | 90 | 30.3 | 2.56 | 1784 | 48.4 | 11.8 | 320.3 | 27.1 | NA |
| Line-48 | NA | 37.5 | 123 | 85.5 | 31.2 | 2.83 | 2266 | 61.5 | 11 | 239 | 21.7 | NA |
| Line-49 | 8.07 | 38.5 | 130.5 | 92 | 26.5 | 2.44 | 1388 | 37.7 | 10.8 | 287.8 | 26.6 | 0.55 |
| Line-50 | NA | 39 | 126 | 87 | 28.8 | 2.54 | 1705 | 46.2 | 11.3 | 255.2 | 22.6 | NA |
| Line-51 | NA | 40 | 124.5 | 84.5 | 39.3 | 3.33 | 1785 | 48.6 | 11.8 | 253 | 21.4 | NA |
| Line-52 | 8.03 | 42 | 137 | 95 | 32.7 | 2.65 | 2530 | 68.9 | 12.3 | 279.5 | 22.7 | 0.367 |
| Line-53 | 7.03 | 42.5 | 135.5 | 93 | 38.8 | 3.02 | 2584 | 70.4 | 12.8 | 264.3 | 20.7 | 0.667 |
| Line-54 | NA | 42 | 132 | 90 | 30.7 | 2.74 | 2418 | 65.7 | 11.2 | 236.8 | 21.3 | NA |
| Line-55 | 8.63 | 41 | 135 | 94 | 34.2 | 3.11 | 2821 | 76.4 | 11 | 244.5 | 22.2 | 0.483 |
| Line-56 | NA | 43.5 | 126.5 | 83 | 28.8 | 2.58 | 2397 | 65.2 | 11.2 | 295.3 | 26.6 | NA |
| Line-57 | NA | 37 | 126.5 | 89.5 | 29 | 2.85 | 1780 | 48.5 | 10.2 | 250.5 | 24.8 | NA |
| Line-58 | NA | 41 | 124.5 | 83.5 | 24.8 | 2.41 | 2787 | 75.6 | 10.3 | 225 | 21.8 | NA |
| Line-59 | NA | 40 | 130.5 | 90.5 | 35.5 | 2.98 | 2639 | 71.8 | 11.8 | 233.5 | 19.9 | NA |
| Line-60 | NA | 42.5 | 131.5 | 89 | 31.7 | 3.1 | 2870 | 78.1 | 10.2 | 231 | 22.8 | NA |
| Line-61 | NA | 43.5 | 132.5 | 89 | 39.3 | 3.15 | 2582 | 70 | 12.5 | 269.7 | 21.6 | NA |
| Line-62 | NA | 42.5 | 125.5 | 83 | 39 | 3.3 | 2480 | 67.3 | 11.8 | 233.3 | 19.7 | NA |
| Line-63 | NA | 41.5 | 132.5 | 91 | 41.5 | 3.41 | 2419 | 65.8 | 12.2 | 257.3 | 21.1 | NA |
| Line-64 | NA | 40.5 | 122 | 81.5 | 33.7 | 3.02 | 2579 | 70.3 | 11.2 | 278 | 24.9 | NA |

Table 231.

TABLE 232
Measured parameters in Soybean varieties (lines 65-96)

| | Corr. ID | | | | | | | | | | | |
|---|---|---|---|---|---|---|---|---|---|---|---|---|
| Line | 1 | 2 | 3 | 4 | 5 | 6 | 7 | 8 | 9 | 10 | 11 | 12 |
| Line-65 | NA | 39 | 130.5 | 91.5 | 35 | 2.92 | 2584 | 70.2 | 12 | 234.8 | 19.6 | NA |
| Line-66 | NA | 40 | 123.5 | 83.5 | 31 | 2.78 | 1627 | 44.3 | 11.2 | 231.3 | 20.7 | NA |
| Line-67 | NA | 36.5 | 111.5 | 75 | 33.3 | 3.55 | 2940 | 80.2 | 9.3 | 239.3 | 25.8 | NA |
| Line-68 | 4.96 | 40 | 126.5 | 86.5 | 29.2 | 2.74 | 1870 | 50.8 | 10.7 | 243.5 | 23.1 | 0.533 |
| Line-69 | NA | 39 | 124 | 85 | 33.8 | 3.08 | 1658 | 45.1 | 11 | 234.5 | 21.4 | NA |
| Line-70 | 7.25 | 37 | 125.5 | 88.5 | 42.5 | 3.24 | 2280 | 62.2 | 13 | 227 | 17.6 | 0.217 |
| Line-71 | NA | 35 | 120.5 | 85.5 | 36 | 2.8 | 2464 | 67.5 | 12.8 | 241.5 | 18.8 | NA |
| Line-72 | 6.37 | 35 | 120.5 | 85.5 | 29.2 | 2.57 | 2419 | 65.7 | 11.3 | 252 | 22.1 | NA |
| Line-73 | NA | 38.5 | 126.5 | 88 | 45.3 | 3.39 | 2280 | 62.2 | 13.3 | 241.3 | 18.1 | NA |
| Line-74 | NA | 36 | 124 | 88 | 36.5 | 2.94 | 2587 | 70.2 | 12.3 | 246.3 | 20.1 | NA |
| Line-75 | 8.74 | 40 | 125.5 | 85.5 | 35.8 | 3.03 | 2484 | 67.4 | 11.8 | 252 | 21.4 | 0.333 |
| Line-76 | 7.35 | 53 | 132.5 | 79.5 | 28.3 | 3.04 | 1000 | 27.1 | 9.3 | 270.2 | 28.9 | 0.55 |
| Line-77 | NA | 38 | 119.5 | 81.5 | 33.2 | 3.06 | 2290 | 62.3 | 10.8 | 251.3 | 23.2 | NA |
| Line-78 | NA | 41 | 122.5 | 81.5 | 26.7 | 2.5 | 2386 | 64.5 | 10.7 | 237.3 | 22.2 | NA |
| Line-79 | NA | 37 | 123.5 | 86.5 | 43.3 | 3.67 | 2389 | 65 | 11.8 | 250.2 | 21.1 | NA |
| Line-80 | NA | 38 | 128.5 | 90.5 | 32.2 | 3.27 | 2375 | 63.8 | 9.8 | 242.5 | 24.7 | NA |
| Line-81 | NA | 42 | 121 | 79 | 30.3 | 2.81 | 1671 | 45.5 | 10.8 | 264.3 | 24.5 | NA |
| Line-82 | NA | 48 | 126.5 | 78.5 | 32.7 | 3.37 | 1477 | 40.1 | 9.7 | 244.3 | 25.4 | NA |
| Line-83 | NA | 39 | 123.5 | 84.5 | 33.5 | 2.85 | 2060 | 56.1 | 11.7 | 238 | 20.4 | NA |
| Line-84 | 6.47 | 38 | 127 | 89 | 40.5 | 3.86 | 1994 | 54.5 | 10.5 | 229.5 | 21.9 | 0.533 |
| Line-85 | 7.19 | 38.5 | 120 | 81.5 | 26.8 | 2.62 | 2280 | 62.1 | 10.2 | 224.3 | 22.1 | 0.2 |
| Line-86 | NA | 40 | 135.5 | 95.5 | 38.8 | 3.19 | 2561 | 69.7 | 12.2 | 268.5 | 22.2 | NA |
| Line-87 | 7.15 | 39 | 131 | 92 | 34 | 2.92 | 2292 | 62.3 | 11.7 | 254 | 21.8 | 0.433 |
| Line-88 | NA | 37 | 127 | 90 | 27.3 | 2.65 | 2453 | 67.1 | 10.3 | 220.3 | 21.3 | NA |
| Line-89 | NA | 42 | 128 | 86 | 33 | 3.14 | 2182 | 59.2 | 10.5 | 232.3 | 22.4 | NA |
| Line-90 | NA | 37 | 127.5 | 90.5 | 32.7 | 2.8 | 1972 | 53.6 | 11.7 | 214.7 | 18.5 | NA |
| Line-91 | 6.97 | 42 | 130 | 88 | 30.2 | 2.79 | 2019 | 54.9 | 10.8 | 216.3 | 20 | 0.433 |
| Line-92 | NA | 41 | 122.5 | 81.5 | 35 | 3.09 | 2059 | 55.8 | 11.3 | 240.7 | 22.6 | NA |
| Line-93 | NA | 42 | 126.5 | 84.5 | 28.2 | 2.53 | 1435 | 38.9 | 11.2 | 253 | 22.7 | NA |
| Line-94 | NA | 43 | 119.5 | 76.5 | 39.2 | 2.97 | 2412 | 65.4 | 13.2 | 244.7 | 18.7 | NA |
| Line-95 | 6.7 | 39.5 | 122 | 82.5 | 35.7 | 3.03 | 1743 | 47.5 | 11.7 | 245.7 | 21 | 0.267 |
| Line-96 | NA | 40 | 131.5 | 91.5 | 34.7 | 2.88 | 2390 | 65.1 | 12 | 248.5 | 20.8 | NA |

Table 232.

TABLE 233
Measured parameters in Soybean varieties (lines 97-128)

| | Corr. ID | | | | | | | | | | | |
|---|---|---|---|---|---|---|---|---|---|---|---|---|
| Line | 1 | 2 | 3 | 4 | 5 | 6 | 7 | 8 | 9 | 10 | 11 | 12 |
| Line-97 | NA | 41.5 | 127 | 85.5 | 24.7 | 2.39 | 2437 | 66.1 | 10.3 | 255.3 | 24.7 | NA |
| Line-98 | NA | 42 | 136.5 | 94.5 | 36.2 | 2.86 | 1405 | 38.1 | 12.7 | 276.2 | 21.9 | NA |
| Line-99 | 6.69 | 39 | 127 | 88 | 32.2 | 2.88 | 1891 | 51.2 | 11.2 | 226.2 | 20.3 | 0.867 |
| Line-100 | NA | 41 | 124 | 83 | 35.8 | 2.86 | 1814 | 49.1 | 12.5 | 253.3 | 20.3 | NA |
| Line-101 | 6.33 | 39.5 | 114 | 74.5 | 33.3 | 3.08 | 1831 | 49.3 | 10.8 | 252.7 | 23.3 | NA |
| Line-102 | 7.3 | 45 | 126 | 81 | 27.5 | 2.54 | 837 | 22.7 | 10.7 | 244.7 | 23.2 | 0.267 |
| Line-103 | 7.68 | 52 | 135.5 | 83.5 | 32.3 | 2.98 | 1059 | 28.7 | 10.8 | 252.7 | 23.3 | NA |
| Line-104 | NA | 36.5 | 101 | 64.5 | 31.2 | 3.12 | 1605 | 43.7 | 10 | 289.5 | 28.9 | NA |
| Line-105 | 7.75 | 40.5 | 125 | 84.5 | 31.7 | 3.17 | 2474 | 67.1 | 10 | 235.8 | 23.7 | 0.2 |
| Line-106 | 7.51 | 39 | 122 | 83 | 33.2 | 3.1 | 1402 | 38 | 10.7 | 255 | 24.2 | 0.6 |
| Line-107 | NA | 54 | 138 | 84 | 19.2 | 2.55 | 587 | 15.9 | 7.3 | 261.3 | 37.2 | NA |
| Line-108 | 6.72 | 35 | 101 | 66 | 26.8 | 2.82 | 1749 | 47.6 | 9.5 | 256.8 | 27.1 | 0.267 |
| Line-109 | NA | 41.5 | 127.5 | 86 | 34.3 | 2.94 | 2598 | 70.4 | 11.7 | 213.8 | 18.4 | NA |
| Line-110 | NA | 41 | 129 | 88 | 29.5 | 2.95 | 2407 | 65 | 10 | 246.2 | 24.6 | NA |
| Line-111 | NA | 37.5 | 101 | 63.5 | 28.2 | 2.91 | 1749 | 47.6 | 9.7 | 265.8 | 27.5 | NA |
| Line-112 | NA | 45 | 130.5 | 85.5 | 29 | 2.74 | 1208 | 32.8 | 10.5 | 244.3 | 23.5 | NA |
| Line-113 | NA | 47 | 124.5 | 77.5 | 26.8 | 2.71 | 1896 | 50.3 | 9.7 | 256.8 | 27.4 | NA |
| Line-114 | NA | 36.5 | 111 | 74.5 | 31.3 | 3.1 | 1722 | 46.7 | 10 | 247.7 | 25.9 | NA |
| Line-115 | NA | 40.5 | 127.5 | 87 | 34.3 | 3.03 | 2525 | 68.6 | 11.3 | 299.5 | 26.3 | NA |
| Line-116 | NA | 39.5 | 126.5 | 87 | 32 | 3.04 | 2319 | 63.2 | 10.5 | 221 | 21.1 | NA |
| Line-117 | 7.01 | 40.5 | 128 | 87.5 | 26.7 | 2.74 | 953 | 25.9 | 9.7 | 231.5 | 24.1 | 0.383 |
| Line-118 | NA | 36.5 | 117 | 80.5 | 41 | 3.23 | 2659 | 72.2 | 12.7 | 245.3 | 19.4 | NA |
| Line-119 | 5.59 | 35 | 112.5 | 77.5 | 31.8 | 2.71 | 1910 | 51.9 | 11.8 | 254.5 | 21.7 | 0.55 |
| Line-120 | NA | 40 | 120 | 80 | 32.5 | 2.6 | 1731 | 47.1 | 12.5 | 189.2 | 15.1 | NA |
| Line-121 | NA | 39 | 124 | 85 | 38.5 | 2.96 | 2648 | 71.8 | 13 | 245.5 | 18.9 | NA |
| Line-122 | NA | 38 | 124 | 86 | 38.2 | 3.16 | 2187 | 59.5 | 12 | 239.2 | 20 | NA |
| Line-123 | 6.04 | 35 | 126 | 91 | 29.5 | 2.63 | 2397 | 65.3 | 11.3 | 233.2 | 20.6 | 0.2 |
| Line-124 | NA | 38 | 127 | 89 | 32.3 | 2.94 | 2318 | 63.1 | 11 | 247.5 | 22.5 | NA |
| Line-125 | NA | 39 | 126.5 | 87.5 | 37.7 | 3.22 | 2549 | 69.2 | 11.7 | 206.7 | 17.7 | NA |
| Line-126 | NA | 38.5 | 129 | 90.5 | 29.3 | 2.71 | 2083 | 56.3 | 10.8 | 207.8 | 19.2 | NA |
| Line-127 | 7.41 | 38.5 | 127 | 88.5 | 30.3 | 2.68 | 1834 | 49.9 | 11.3 | 241.3 | 21.3 | 0.5 |
| Line-128 | 7.28 | 49.5 | 136 | 86.5 | 27.2 | 2.66 | 845 | 22.9 | 10.2 | 309.3 | 30.4 | 0.7 |

Table 233.

TABLE 234
Measured parameters in Soybean varieties (lines 129-142)

| | Corr. ID | | | | | | | | | | | |
|---|---|---|---|---|---|---|---|---|---|---|---|---|
| Line | 1 | 2 | 3 | 4 | 5 | 6 | 7 | 8 | 9 | 10 | 11 | 12 |
| Line-129 | NA | 43 | 129.5 | 86.5 | 25.7 | 2.17 | 1699 | 46.1 | 11.8 | 245.5 | 20.8 | NA |
| Line-130 | NA | 35 | 127 | 92 | 31.3 | 2.69 | 2534 | 68.7 | 11.7 | 233.7 | 20 | NA |
| Line-131 | 7.01 | 35 | 117.5 | 82.5 | 35.5 | 2.91 | 2391 | 65.3 | 12.2 | 239.3 | 19.8 | 0.267 |
| Line-132 | NA | 37 | 125.5 | 88.5 | 31.7 | 2.79 | 2792 | 75.7 | 11.3 | 231 | 20.4 | NA |
| Line-133 | NA | 35 | 116.5 | 81.5 | 37.3 | 3.06 | 2489 | 67.6 | 12.2 | 236.3 | 19.6 | NA |
| Line-134 | NA | 35 | 122 | 87 | 34.3 | 2.58 | 2912 | 79.4 | 13.3 | 234.2 | 17.7 | NA |
| Line-135 | NA | 39.2 | 126.8 | 87.5 | 33.7 | 2.82 | 2488 | 67.3 | 11.9 | 225 | 18.9 | NA |
| Line-136 | NA | 39.5 | 121 | 81.5 | 29.2 | 2.68 | 2085 | 56.3 | 10.9 | 215 | 20.1 | NA |
| Line-137 | NA | 41 | 129.5 | 88.5 | 25.7 | 2.56 | 1723 | 46.8 | 10 | 213.8 | 21.4 | NA |
| Line-138 | NA | 35 | 122.5 | 87.5 | 40.3 | 2.96 | 2811 | 76.6 | 13.7 | 241 | 17.7 | NA |
| Line-139 | NA | 40.5 | 133 | 92.5 | 31.5 | 2.7 | 2494 | 67.9 | 11.7 | 232 | 19.9 | NA |
| Line-140 | NA | 36 | 124.5 | 88.5 | 32.2 | 2.68 | 2874 | 78.4 | 12 | 238.7 | 19.9 | NA |
| Line-141 | NA | 35 | 127 | 92 | 32.8 | 2.77 | 2599 | 71.1 | 11.8 | 243.7 | 20.6 | NA |
| Line-142 | NA | 39 | 123 | 84 | 43.2 | 3.24 | 2250 | 61.5 | 13.3 | 245 | 18.4 | NA |

Table 234.

TABLE 235
Correlation between the expression level of selected genes of some
embodiments of the invention in various tissues and the phenotypic
performance under normal conditions across soybean varieties

| Gene | | | Exp. | Corr. | Gene | | | Exp. | Corr. |
|---|---|---|---|---|---|---|---|---|---|
| Name | R | P value | set | Set ID | Name | R | P value | set | Set ID |
| LBY534 | 0.84 | 1.10E−03 | 5 | 9 | LBY534 | 0.83 | 1.62E−03 | 5 | 5 |
| LYD1003 | 0.76 | 7.17E−03 | 5 | 9 | LYD1003 | 0.77 | 6.03E−03 | 5 | 5 |
| LYD1006 | 0.73 | 6.90E−03 | 1 | 7 | LYD1006 | 0.74 | 5.46E−03 | 1 | 12 |
| LYD1006 | 0.73 | 6.54E−03 | 1 | 8 | | | | | |

Table 235. Provided are the correlations (R) between the expression levels yield improving genes and their homologs in various tissues [Expression (Exp) sets, Table 227] and the phenotypic performance [yield, biomass, and plant architecture as described in Tables 230-234 using the Correlation vectors (Corr.) described in Table 229] under normal conditions across soybean varieties.
P = p value.

TABLE 236
Correlation between the expression level of selected genes of some
embodiments of the invention in various tissues and the phenotypic
performance under normal conditions across soybean varieties

| Gene | | | Exp. | Corr. | Gene | | | Exp. | Corr. |
|---|---|---|---|---|---|---|---|---|---|
| Name | R | P value | set | Set ID | Name | R | P value | set | Set ID |
| LBY496 | 0.91 | 1.28E−02 | 1 | 1 | LBY496 | 0.81 | 1.52E−02 | 3 | 10 |
| LBY497 | 0.76 | 2.84E−02 | 3 | 11 | LBY534 | 0.74 | 3.65E−02 | 2 | 1 |
| LYD1003 | 0.92 | 9.84E−03 | 1 | 10 | LYD1003 | 0.71 | 4.81E−02 | 3 | 3 |
| LYD1006 | 0.70 | 5.21E−02 | 3 | 7 | LYD1006 | 0.77 | 2.58E−02 | 3 | 3 |
| LYD1006 | 0.71 | 4.88E−02 | 3 | 4 | LYD1007 | 0.95 | 3.92E−04 | 3 | 6 |
| LYD1007 | 0.76 | 2.92E−02 | 3 | 5 | LYD1012 | 0.76 | 2.73E−02 | 3 | 11 |
| LYD1012 | 0.78 | 2.16E−02 | 2 | 11 | LYD1014 | 0.80 | 5.50E−02 | 1 | 12 |
| LYD1014 | 0.88 | 3.70E−03 | 3 | 11 | LYD1014 | 0.79 | 2.02E−02 | 2 | 1 |
| LYD1015 | 0.90 | 2.44E−03 | 3 | 11 | LYD1016 | 0.84 | 9.24E−03 | 3 | 3 |
| LYD1016 | 0.81 | 1.44E−02 | 3 | 4 | LYD1016 | 0.74 | 3.77E−02 | 2 | 6 |
| LYD1016 | 0.74 | 3.45E−02 | 2 | 5 | LYD1018 | 0.86 | 2.81E−02 | 1 | 1 |

Table 236. Provided are the correlations (R) between the expression levels yield improving genes and their homologs in various tissues [Expression (Exp) sets, Table 228] and the phenotypic performance [yield, biomass, and plant architecture as described in Tables 230-234 using the Correlation vectors (Corr.) described in Table 229] under normal conditions across soybean varieties.
P = p value.

### Example 23

### Production of Maize Transcriptome and High Throughput Correlation Analysis Using 60K Maize Oligonucleotide Micro-Array

[1603] To produce a high throughput correlation analysis, the present inventors utilized a Maize oligonucleotide micro-array, produced by Agilent Technologies [chem. (dot) agilent (dot) com/Scripts/PDS (dot) asp?1Page=50879]. The array oligonucleotide represents about 60K Maize genes and transcripts designed based on data from Public databases (Example 21). To define correlations between the levels of RNA expression and yield, biomass components or vigor related parameters, various plant characteristics of 149 different Maize inbreds were analyzed. Among them, 41 inbreds encompassing the observed variance were selected for RNA expression analysis. The correlation between the RNA levels and the characterized parameters was analyzed using Pearson correlation test [davidmlane (dot) com/hyperstat/A34739 (dot) html].

[1604] Experimental Procedures

[1605] 149 Maize inbred lines were grown in 4 repetitive plots in 2 fields. In field A Maize seeds were planted at density of 35K per acre and grown using dry fall commercial fertilization, little tillage and were preceded by Soybean crop. In Field B Maize seeds were planted at density of 35K per acre and grown using swine manure fertilization, tillage and were preceded by Maize crop.

[1606] Field A with 35K plants per acre—tissues were collected from field at different developmental stages including Ear (VT), Leaf (V9 and R2), Stem (V9, VT and R2) and Female (ear) Meristem (V9).

[1607] Field B with 35K plants per acre—tissues were collected from field at different developmental stages including Ear (VT), Leaf (V9 and R2), Stem (V9 and R2) and Female (ear) Meristem (V9).

[1608] These tissues, representing different plant characteristics, were sampled and RNA was extracted as described in “GENERAL EXPERIMENTAL AND BIOINFORMATICS METHODS”. For convenience, each micro-array expression information tissue type has received a Set ID as summarized in Table 237 below.

TABLE 237
Tissues used for Maize transcriptome expression sets of field A 35K

| Expression Set | Set ID |
|---|---|
| Leaf at reproductive stage R2 | 1 |
| Leaf at vegetative stage V9 | 2 |
| Stem at reproductive stage R2 | 3 |
| Stem at vegetative stage V9 | 4 |
| Stem at reproductive stage VT | 5 |
| Ear at reproductive stage VT | 6 |
| Female meristem at vegetative stage V9 | 7 |

Table 237: Provided are the maize transcriptome expression sets and identification numbers (IDs) for samples originating from field A.
Leaf = the leaf below the main ear;
Ear = Distal maize developing grains from the cob extreme area;
Stem = the stem tissue directly below the main ear;
FM = Female meristem (represented in separate correlation table).

TABLE 238
Tissues used for Maize transcriptome expression sets of field B 35K

| Expression Set | Set ID |
|---|---|
| Ear at reproductive stage VT | 1 |
| Leaf at reproductive stage R2 | 2 |
| Leaf at vegetative stage V9 | 3 |
| Stem at reproductive stage R2 | 4 |
| Stem at vegetative stage V9 | 5 |
| Ear at reproductive stage R2 | 6 |

Table 238: Provided are the maize transcriptome expression sets for samples originating from field B.
Leaf = the leaf below the main ear;
Female meristem = the female flower at the anthesis day.
Ear = Distal maize developing grains from the cob extreme area;
Stem = the stem tissue directly below the main ear;
FM = Female meristem.

[1609] The following parameters were collected:

[1610] Plant height [cm]—Plants were characterized for height at harvesting. In each measure, 6 plants were measured for their height using a measuring tape. Height was measured from ground level to top of the plant below the tassel.

[1611] NDVI (Normalized Difference Vegetation Index) [ratio]—Measure with portable NDVI sensor. One measurement per plot of a fixed duration (depending on plot size), approximately 5 seconds for a 5 m plot.

[1612] Main cob DW [gr]—dry weight of the cob of the main ear, without grains.

[1613] Num days to heading [num of days]—number of days from sowing until the day in which 50% or more of plants within the plot reached tassel emergence.

[1614] SPAD (VT) (R2) [SPAD units]—Chlorophyll content was determined using a Minolta SPAD 502 chlorophyll meter. SPAD meter readings were done on fully developed leaf. Three measurements per leaf were taken per plot.

[1615] % Yellow leaves number (VT) (SP) [%]—All leaves were classified as Yellow or Green. This is the percent of yellow leaves from the total leaves.

[1616] Middle stem width [cm]—Measurement of the width in the middle of the internode below the main ear with a caliper.

[1617] Num days to silk [num of days]—number of days from sowing until the day in which 50% or more of plants within the plot have emerged silks (Silks first emerge from the husk).

[1618] Ear row num—count of number of kernel rows per main ear (horizontal). Middle stem Brix [brix°]—applied pressure on the stem from the top (near the ear—shank) until a drop is secreted and then placed on a refractometer for Brix° analysis.

[1619] Lodging [1-3]—Plants were subjectively evaluated and categorized into 3 groups. 1=plant is erect; 2=plant is semi-lodged; 3=plant is fully lodged.

[1620] Num days to maturity [num of days]—number of days from sowing until the day in which the husks are dry and the grains in the ear are dry and tough

[1621] Ear Area [cm²]—At the end of the growing period, ears were photographed and images were processed using the below described image processing system. The Ear area was measured from those images and was divided by the number of ears.

[1622] Ear filled grain area [cm²]—At the end of the growing period, ears were photographed and images were processed using the below described image processing system. The Ear area filled with kernels was measured from those images and was divided by the number of Ears.

[1623] Specific leaf area [cm²/gr]—Calculated ratio of leaf area per gram of leaf dry weight.

[1624] % Canopy coverage (R4) [%]—percent Canopy coverage at R4 stage (24-28 days after silking). The % Canopy coverage is calculated using Formula 32 above.

[1625] Total ears DW per plant (SP) [gr]—The weight of all the main ears in the plot harvested at the end of the trial divided by the number of plants in that plot.

[1626] Ear growth rate (VT to R2) [gr/day]—Accumulated main ear dry weight between VT (tassel emergence) and R2 (10-14 days after silking) developmental stages, divided by number of days between these two stages.

[1627] Ear Length [cm]—At the end of the growing period, ears were photographed and images were processed using the below described image processing system. The Ear length was measured from those images and was divided by the number of ears.

[1628] Ear Width [cm]—At the end of the growing period ears were photographed and images were processed using the below described image processing system. The Ear width (longest axis) was measured from those images and was divided by the number of ears.

[1629] ⅓ ear Grain area [cm²]—At the end of the growing period, ears were photographed and images were processed using the below described image processing system. Only the top ⅓ of the Ear area was measured from those images and was divided by the number of ears.

[1630] ⅓ ear 1000 grains weight [gr]—Top ⅓ main ear grains were sampled, and a fraction (˜25 gr) of grains from this sample was used for grain number count using image processing system (described below). Calculation of 1000 grains weight was then applied (according to Formula 14).

[1631] Avr Leaf Area per plant [cm²]—total leaf area divided by the number of plants calculated using image processing system (described below).

[1632] Blisters number per ear—calculated using image processing system (described below). The total row number was multiplied by the number of kernels in each row.

[1633] Cob Area [cm²]—multiply between the width and the length of the cob without kernels, using image processing system (described below).

[1634] Cob density [gr/cm³]—calculated by dividing the dry cob dry weight (without kernels) by the volume of the cob using image processing system (described below)

[1635] Cob Length [cm]—measured using image processing system (described below) The image processing system was used, which consists of a personal desktop computer (Intel P4 3.0 GHz processor) and a public domain program—ImageJ 1.37, Java based image processing software, which was developed at the U.S. National Institutes of Health and is freely available on the internet at rsbweb (dot) nih (dot) gov/. Images were captured in resolution of 10 Mega Pixels (3888×2592 pixels) and stored in a low compression JPEG (Joint Photographic Experts Group standard) format. Next, image processing output data for—Cob length, density and area; Ear length and width; ⅓ ear 1000 grains weight and area; blisters number per ear; Avr. (average) Leaf Area per plant; was saved to text files and analyzed using the JMP statistical analysis software (SAS institute).

[1636] Additional parameters were collected either by sampling several plants per plot or by measuring the parameter across all the plants within the plot.

[1637] Ears per plant [num]—number of ears per plant was counted.

[1638] Total Leaf Area per plant [cm²]—Total measured leaf area in a plot divided by the number of plants in that plot.

[1639] 1000 grain weight [gr]—as described in Formula 14.

[1640] Grains per row [num]—The number of grains per row was counted.

[1641] Harvest Index (HI) [ratio]—The harvest index per plant was calculated using Formula 16 above.

[1642] Cob width [cm]—The diameter of the cob without grains was measured using a ruler.

[1643] Total plant biomass [kg]/Total N content [gr]—The ratio of the total plant material weight (including cob) divided by the total N content of the whole plant (including cob)

[1644] Total plant biomass [kg]/N content of Vegetative [gr]—The ratio of the total plant material weight (including cob) divided by the total N content of the vegetative material (without the cob).

[1645] Ear tip uniformity [ratio]—The yield of the ear tip (the top ⅓ of the ear) divided by the ear tip grain area CV (coefficient of variation)

[1646] Yield per ear filling rate [gr/day]—The ratio of grain yield per ear (g) to the grain fill duration in days.

[1647] 1000 grain weight filling rate [gr/day]—calculated using Formula 36.

[1648] Grain filling duration [num of days]—Calculation of the number of days to reach maturity stage subtracted by the number of days to reach silking stage.

[1649] Leaf carbon isotope discrimination [‰]—Leaves were dried, frozen and sent to lab for 13C isotope abundance analysis by EA-IRMS.

[1650] Plant height growth [cm/day]—plant height was measured once a week (as described above) and divided by the sum of days during the measurement period.

[1651] Main Ear Grains yield [gr]—ears were dried, grains were manually removed and weighed.

[1652] Anthesis silking interval [num of days]—A difference of the average number of days between the maize tassel emergence and the first visible silk (stigma) emergence.

[1653] Middle stem width [cm]—The width of the internode below the main ear was measured by a caliper.

[1654] Avr ⅓ ear Grains number—total number of grains counted in the upper ⅓ part of the main ear divided by the number of plants measured.

[1655] Avr Ears DW per plant [gr]—the dry weight of ears divided by the number of plants.

[1656] Avr internode length [cm]—average of the length of the lowest whole and visible internode, measured by caliper.

[1657] Avr Tassel DW per plant [gr]—total tassel dry weight divided by the number of plants

[1658] Avr Total plants biomass [kg]—total plant biomass (vegetative and reproductive) divided by the number of plants

[1659] Blisters number in one row—blisters were manually counted in entire row (top to bottom of ear)

[1660] Moisture [%]—the percent of moisture in the grains was obtained by the combine at harvest.

[1661] Bushels per acre [kg]—the amount of bushels per acre was obtained by the combine at harvest.

[1662] Bushels per plant [kg]—bushels per acre divided by the total stand count of the plants.

[1663] N content of whole plant (VT) [%]—plants (including ear) were fully dried and then sent to lab for analysis of nitrogen content

[1664] Calculated grains per ear [num]—calculated by dividing the 1000 grains weight by 1000 and multiply by the total grains weight.

[1665] Grains in tip*ratio tip vs. base TGW [ratio]—calculation, multiply the amount of grains in the top ⅓ of the ear with the ratio between 1000 grain weight of the top ⅓ and lower ⅔ of the ear.

TABLE 239
Maize correlated parameters Inbred Field A 35K per acre (vectors)
(parameters set 1)

| | Correlation |
|---|---|
| Correlated parameter with | ID |
| Average Tassel DW per plant (VT) [gr] | 1 |
| Average Total plants biomass (SP) [kg] | 2 |
| Grains in tip * ratio tip vs. base TGW [ratio] | 3 |
| SPAD (R2) [SPAD units] | 4 |
| % yellow leaves number (H) [%] | 5 |
| % yellow leaves number (R2) [%] | 6 |
| Grains per row [num] | 7 |
| SPAD (VT) [SPAD units] | 8 |
| ⅓ ear 1000 grains weight [gr] | 9 |
| Blisters number in one row (VT) [num] | 10 |
| Blisters number per ear [num] | 11 |
| Harvest index [ratio] | 12 |
| Leaf carbon isotope discrimination (H) [ [symbol] ] | 13 |
| Specific leaf area (VT) [cm²/g] | 14 |
| bushels per acre [kg] | 15 |
| bushels per plant [kg] | 16 |
| Lodging [1-3] | 17 |
| ⅓ ear Grain area [cm²] | 18 |
| Calculated grains per ear [num] | 19 |
| Cob Area [cm²] | 20 |
| Main cob DW [gr] | 21 |
| Main Ear Grains yield [gr] | 22 |
| Total ears DW per plant (SP) [kg] | 23 |
| Total Leaf Area per plant (VT) [cm²] | 24 |
| Cob density [gr/mm³] | 25 |
| Cob Length [cm] | 26 |
| Middle stem brix (R2) [ [symbol] ] | 27 |
| Middle stem width (R2) [mm] | 28 |
| Total plant biomass/Total N content (VT) [gr] | 29 |
| Total plant biomass/N content of Vegetative (H) [gr] | 30 |
| 1000 grain weight filling rate [gr/day] | 31 |
| 1000 grains weight [gr] | 32 |
| Cob width [cm] | 33 |
| Moisture [%] | 34 |
| N content of whole plant (VT) [%] | 35 |
| NDVI (V5) [ratio] | 36 |
| Yield per ear filling rate [gr/day] | 37 |
| Ear Area [cm²] | 38 |
| Ear Area (VT) [cm²] | 39 |
| Num days to Heading [num of days] | 40 |
| Num days to Maturity [num of days] | 41 |
| Ear Filled Grain Area [cm²] | 42 |
| Ear Filled Grain Area (VT) [cm²] | 43 |
| Num days to Silk [num of days] | 44 |
| Ear growth rate (VT to R2) [gr/day] | 45 |
| Plant height [cm] | 46 |
| Anthesis silking interval [num of days] | 47 |
| Ear length [cm] | 48 |
| Plant height growth [cm/day] | 49 |
| Avr ⅓ ear Grains number [num] | 50 |
| Avr Ears DW per plant (R2) [gr] | 51 |
| Ear row number (VT) | 52 |
| Ear tip uniformity [ratio] | 53 |
| Ear Width [cm] | 54 |
| Avr Ears DW per plant (VT) [gr] | 55 |
| Avr internode length [cm] | 56 |
| Avr Leaf area per plant (VT) [cm²] | 57 |
| Ear Width (VT) [cm] | 58 |
| Ears per plant (SP) [num] | 59 |
| % Canopy coverage (R4) [%] | 60 |
| Grain filling duration [num of days] | 61 |

Table 239. “Avr.” = Average,
⅓ Ear = the 3^{rd} most distant part of the Ear from the stem,
″VT″ = Tassel emergence,
″R2″ = 10-14 days after silking,
“SP” = selected plants,
″H″ = Harvest,
″R4″ = 24-28 days after silking,
″V5″ = 5 leaves appear and initiation of tassel and ear.
″DW″ = Dry Weight,
“num” = number,
“kg” = kilogram(s),
“cm” = centimeter(s),
“mm” = millimeter(s),
″gr″ = grams;
″%″ = percent;
″ratio″ = values between −1 and 1.

TABLE 240
Maize correlated parameters of Inbred Field B 35K per acre (vectors)
(parameters set 2)

| | Correlation |
|---|---|
| Correlated parameter with | ID |
| Ear Area [cm²] | 1 |
| Ear Area (VT) [cm²] | 2 |
| SPAD (R4) [SPAD units] | 3 |
| Specific leaf area (VT) [cm²/g] | 4 |
| % Canopy coverage (R4) [%] | 5 |
| Ear Filled Grain Area [cm²] | 6 |
| Ear Filled Grain Area (VT) [cm²] | 7 |
| Total ears DW per plant (SP) [kg] | 8 |
| % yellow leaves number (H) [%] | 9 |
| % yellow leaves number (R2) [%] | 10 |
| Ear growth rate (VT to R2) [gr/day] | 11 |
| Ear length [cm] | 12 |
| Total Leaf Area per plant (VT) [cm²] | 13 |
| ⅓ ear 1000 grains weight [gr] | 14 |
| Ear row number (VT) [num] | 15 |
| Total plant biomass [kg]/Total N content (VT) [gr] | 16 |
| Total plant biomass [kg]/N content of Vegetative (H) [gr] | 17 |
| ⅓ ear Grain area [cm²] | 18 |
| Ear tip uniformity [ratio] | 19 |
| Ear Width [cm] | 20 |
| Ear Width (VT) [cm] | 21 |
| Ears per plant (SP) [number] | 22 |
| Yield per ear filling rate [gr/day] | 23 |
| 1000 grain weight filling rate [gr/day] | 24 |
| Grain filling duration [num of days] | 25 |
| Grains in tip * ratio tip/base TGW [ratio] | 26 |
| 1000 grains weight [gr] | 27 |
| Grains per row [num] | 28 |
| Harvest index [gr] | 29 |
| Leaf carbon isotope discrimination (H) [ [symbol] ] | 30 |
| Lodging [1-3] | 31 |
| Main cob DW [gr] | 32 |
| Main Ear Grains yield [gr] | 33 |
| Middle stem brix (R2) [ [symbol] ] | 34 |
| Anthesis silking interval [num of days] | 35 |
| Avr ⅓ ear Grains number [num] | 36 |
| Middle stem width (R2) [mm] | 37 |
| Moisture [%] | 38 |
| Avr Ears DW per plant (R2) [gr] | 39 |
| Avr Ears DW per plant (VT) [gr] | 40 |
| Avr internode length [cm] | 41 |
| Avr Leaf Area per plant (VT) [cm²] | 42 |
| N content of whole plant (VT) [%] | 43 |
| NDVI (V5) [ratio] | 44 |
| Num days to Heading [num of days] | 45 |
| Num days to Maturity [num of days] | 46 |
| Num days to Silk [num of days] | 47 |
| Avr Tassel DW per plant (VT) [gr] | 48 |
| Avr Total plants biomass (SP) [kg] | 49 |
| Plant height [cm] | 50 |
| Plant height growth [cm/day] | 51 |
| Blisters number in one row (VT) [num] | 52 |
| Blisters number per ear [num] | 53 |
| bushels per acre [kg] | 54 |
| bushels per plant [kg] | 55 |
| Calculated grains per ear [num] | 56 |
| Cob Area [cm²] | 57 |
| Cob density [gr/mm³] | 58 |
| Cob Length [cm] | 59 |
| Cob width [cm] | 60 |
| SPAD (R2) [SPAD units] | 61 |

Table 240. “Avr.” = Average,
⅓ Ear = the 3^{rd} most distant part of the Ear from the stem,
″VT″ = Tassel emergence,
″R2″ = 10-14 days after silking,
“SP” = selected plants,
″H″ = Harvest,
″R4″ = 24-28 days after silking,
″V5″ = 5 leaves appear and initiation of tassel and ear.
″DW″ = Dry Weight,
“num” = number,
“kg” = kilogram(s),
“cm” = centimeter(s),
“mm” = millimeter(s),
″gr″ = grams;
″%″ = percent;
″ratio″ = values between −1 and 1.

[1666] Experimental Results

[1667] 41 maize varieties were characterized for parameters, as described above. The average for each parameter was calculated using the JMP software, and values are summarized in Tables below. Subsequent correlation between the various transcriptome sets for all or sub sets of lines was done by the bioinformatic unit and results were integrated into the database (Table 241 below).

TABLE 241
Measured parameters in Maize Inbred Field A 35K per acre (lines 1-8)

| | Line | | | | | | | |
|---|---|---|---|---|---|---|---|---|
| Correlation ID | Line-1 | Line-2 | Line-3 | Line-4 | Line-5 | Line-6 | Line-7 | Line-8 |
| 60 | 79.8 | NA | 72.8 | NA | 61.8 | 60.1 | NA | 80.9 |
| 5 | NA | 100 | 100 | 87.2 | 100 | 98.6 | 59 | 100 |
| 6 | 9.4 | 13.9 | NA | 14.7 | 8 | 16.9 | 13.1 | 14.2 |
| 31 | 5.35 | 3.32 | 4.64 | 9.83 | 3.31 | 4.08 | 7.85 | 7.5 |
| 32 | 237.3 | 143.6 | 219.8 | 263.8 | 165.7 | 196 | 220 | 205 |
| 9 | 216.5 | 128.3 | 213 | 246 | 141.4 | 170.4 | 209.5 | 191.3 |
| 18 | 0.508 | 0.34 | 0.514 | 0.52 | 0.404 | 0.47 | 0.46 | 0.417 |
| 47 | 1.67 | 9 | 7 | 22.67 | 0 | 6 | 19.67 | 23.67 |
| 50 | 54.7 | 131.1 | 81.3 | 75.6 | 89.5 | 81.4 | 67.3 | 48.1 |
| 51 | 29.9 | 25.5 | NA | 30.2 | 18.9 | 12.7 | 22.7 | 18.6 |
| 55 | 19.41 | NA | 4.28 | 4.82 | 4.54 | 4.06 | 1.62 | 1.34 |
| 57 | 27.4 | NA | 25.4 | 29.2 | NA | NA | 26.9 | 30.8 |
| 1 | 4.33 | NA | 7 | 2 | 7.79 | 5.91 | 4.15 | 3.43 |
| 2 | 0.268 | 0.304 | 0.312 | 0.375 | 0.18 | 0.363 | 0.54 | 0.296 |
| 56 | 12.3 | 14.3 | 12.1 | 11.9 | 11.2 | 14 | 12.4 | 11.4 |
| 10 | 44.9 | NA | 34.2 | 38.9 | 27.4 | 36.4 | 41.1 | 28.6 |
| 11 | 807.8 | NA | 461.2 | 534.2 | 362.8 | 573.8 | 643.3 | 420.8 |
| 19 | 178.6 | 416.4 | 267.5 | 269.9 | 258.9 | 294.2 | 280.7 | 225.9 |
| 20 | 24.8 | 35 | 28.2 | 32.4 | 21.5 | 31.9 | 34.3 | 34.2 |
| 26 | 10.6 | 15.4 | 12.9 | 14 | 9.7 | 12.5 | 15.3 | 13.8 |
| 33 | 2.89 | 2.89 | 2.78 | 2.95 | 2.81 | 3.24 | 2.84 | 3.15 |
| 38 | 48.2 | 61.6 | 49.5 | 53.5 | 35.6 | 57.8 | 63 | 51.3 |
| 39 | 57.25 | NA | 9.6 | 25.14 | 9.79 | 7.62 | 11.79 | 12.95 |
| 42 | 46.5 | 60.5 | 48.2 | 52.4 | 34.9 | 53.6 | 55.8 | 48.6 |
| 43 | 56.95 | NA | 9.58 | 25.07 | 9.73 | 7.6 | 11.79 | 12.88 |
| 54 | 4.39 | 4.48 | 4.36 | 4.52 | 4.34 | 5.12 | 4.46 | 4.38 |
| 58 | 3.72 | NA | 1.45 | 2.47 | 1.75 | 1.27 | 1.52 | 1.68 |
| 45 | 9.49 | NA | NA | 6.94 | 3.37 | 2.42 | 4.59 | 4.11 |
| 48 | 13.8 | 17.5 | 14.3 | 15.1 | 10.4 | 14.4 | 17.9 | 14.8 |
| 52 | 18 | NA | 13.5 | 13.7 | 13.2 | 15.8 | 15.7 | 14.8 |
| 53 | 2.83 | 6.69 | 4.67 | 4.93 | 4.71 | 3.47 | 5.26 | 2.34 |
| 59 | 1 | 1.21 | 1.08 | 1.47 | 1.19 | 1.06 | 1.74 | 1.08 |
| 61 | 47 | 41 | 47.3 | 26.3 | 50 | 50 | 29.7 | 29 |
| 3 | 42.7 | 102.9 | 75.6 | 65 | 65.7 | 60 | 60.9 | 41 |
| 7 | 13.7 | NA | 19.8 | 21.1 | 19.6 | 19 | 17.9 | 14.4 |
| 12 | 0.142 | NA | 0.222 | NA | 0.265 | NA | NA | 0.204 |
| 13 | 14.046 | 13.2284 | 11.779 | 11.9453 | 12.5584 | 12.9428 | 12.9099 | 13.9413 |
| 17 | 1 | 2 | 1.33 | 1 | 1.5 | 2 | 1 | 1 |
| 22 | 42.5 | 63.3 | 59.6 | 73.4 | 45.5 | 63 | 63.4 | 48.2 |
| 21 | 11.5 | 18.6 | 13.8 | 16.3 | 10 | 14.7 | 21.7 | 15.2 |
| 27 | 9.75 | 9.58 | NA | 8.17 | 9.94 | 8.94 | 11.12 | 11.42 |
| 28 | 18.1 | 16.6 | NA | 15.4 | 17.4 | 19.6 | 15.2 | 15.1 |
| 34 | 16.3 | 14.7 | 14.1 | 15.3 | NA | NA | 15.4 | 14.3 |
| 35 | 1.43 | NA | 1.65 | 1.46 | 1.82 | 1.47 | 1.27 | 1.4 |
| 36 | 0.31 | 0.475 | 0.375 | 0.442 | NA | NA | 0.38 | 0.462 |
| 40 | 86.3 | 72.7 | 61.7 | 75.5 | 66 | 66 | 72.7 | 69.3 |
| 41 | 135 | 122 | 116 | 127.2 | 116 | 122 | 122 | 122 |
| 44 | 88 | 81 | 68.7 | 98 | 66 | 72 | 92.3 | 93 |
| 46 | 156 | 186.7 | 133.1 | 154.6 | 133.8 | 149.4 | 171.2 | 160.5 |
| 49 | 0.91 | 1.77 | 1.45 | 1.51 | 1.83 | 1.92 | 1.53 | 1.68 |
| 4 | NA | 38.1 | NA | 47.1 | 48.9 | 46.8 | 46 | 51.4 |
| 8 | 47.8 | 39.3 | 55.5 | 42.9 | NA | NA | 49.8 | 52.1 |
| 14 | 114.4 | NA | 237.3 | 78.4 | NA | NA | 110.1 | 81.6 |
| 24 | 3446.6 | NA | 5565.6 | 2550.5 | NA | NA | 2901.7 | 1872.5 |
| 23 | 0.0535 | 0.0794 | 0.0669 | 0.0886 | 0.0553 | 0.0694 | 0.1002 | 0.0592 |
| 29 | 0.082 | NA | 0.174 | 0.285 | 0.103 | 0.198 | 0.438 | 0.181 |
| 30 | 0.102 | 0.164 | 0.137 | 0.187 | 0.183 | 0.159 | 0.176 | 0.178 |
| 37 | 1.03 | 1.51 | 1.26 | 2.95 | 0.91 | 1.31 | 2.29 | 1.74 |
| 15 | 45.9 | 50.1 | 37.7 | 71 | NA | NA | 73.9 | 47.3 |
| 16 | 0.747 | 0.864 | 0.599 | 1.253 | NA | NA | 1.196 | 0.769 |
| 25 | 0.169 | 0.184 | 0.179 | 0.171 | 0.165 | 0.142 | 0.224 | 0.141 |

Table 241. Provided are the values of each of the parameters (as described above) measured in maize accessions (Line). Growth conditions are specified in the experimental procedure section.

TABLE 242
Measured parameters in Maize Inbred Field A 35K per acre (lines 9-16)

| | Line | | | | | | | |
|---|---|---|---|---|---|---|---|---|
| Correlation | | Line- | | | | | Line- | Line- |
| ID | Line-9 | 10 | Line-11 | Line-12 | Line-13 | Line-14 | 15 | 16 |
| 60 | 62.4 | NA | 67.2 | 71.3 | NA | 81.1 | NA | 82.6 |
| 5 | 99.2 | NA | 99.6 | 96.4 | 99.4 | 88.8 | 100 | 97.4 |
| 6 | 16.4 | 13.1 | 10.5 | 6.8 | 9 | 16.6 | 12.4 | 9.2 |
| 31 | 4.16 | 4.96 | 3.46 | 3.76 | 4.18 | 5.06 | 4.95 | 3.78 |
| 32 | 112 | 218.2 | 163.2 | 169.5 | 186.6 | 243.1 | 265.6 | 172.4 |
| 9 | 67.4 | 193.2 | 150.9 | 145.4 | 167.7 | 215 | 248.6 | 159.2 |
| 18 | 0.262 | 0.538 | 0.403 | 0.411 | 0.436 | 0.493 | 0.602 | 0.447 |
| 47 | 19 | 17.5 | 5 | 2.67 | 10.33 | 4 | 7.33 | 10.33 |
| 50 | 63.4 | 74.3 | 87.9 | 138.2 | 109.2 | 79.5 | 106.1 | 104 |
| 51 | 11.4 | 30.7 | 19 | 37.1 | 28.6 | 16.7 | 22.2 | 11.2 |
| 55 | 3.64 | 5.21 | 4.6 | 4.1 | NA | 4.23 | 2.27 | 1.07 |
| 57 | NA | 13.1 | 19.9 | 24.8 | 30.1 | NA | 31 | 33.8 |
| 1 | 6.25 | 3.97 | 5.25 | 1.87 | NA | 6.2 | 4.34 | 3.73 |
| 2 | 0.221 | NA | 0.257 | 0.373 | 0.375 | 0.419 | 0.329 | 0.363 |
| 56 | 10.5 | NA | 12.7 | 13.8 | 13.7 | 13.7 | 10.7 | 11.9 |
| 10 | 30.5 | NA | 35.5 | 41.1 | NA | NA | NA | NA |
| 11 | 490.2 | NA | 596.6 | 696.6 | NA | NA | NA | NA |
| 19 | 304 | 348.2 | 318.8 | 508.6 | 419.3 | 270.6 | 320.2 | 392.8 |
| 20 | 29.4 | 38.1 | 26.7 | 37.5 | 34.8 | 32.6 | 36 | 39.2 |
| 26 | 13.9 | 14.4 | 11.6 | 14.7 | 14.3 | 15.9 | 13.7 | 14.8 |
| 33 | 2.69 | 3.37 | 2.91 | 3.25 | 3.1 | 2.61 | 3.35 | 3.36 |
| 38 | 45.6 | 55.8 | 46.3 | 63.2 | 59.4 | 60.6 | 58.1 | 64.2 |
| 39 | 4.71 | 28.5 | 9.6 | 20.58 | 18.85 | 10.97 | 17.28 | NA |
| 42 | 40.5 | 51.2 | 44.4 | 61.6 | 58.5 | 58.2 | 57.1 | 62.2 |
| 43 | 4.67 | 28.48 | 9.5 | 20.57 | 18.8 | 10.97 | 17.21 | NA |
| 54 | 4 | 4.89 | 4.61 | 5.09 | 4.84 | 4.21 | 5.02 | 5.02 |
| 58 | 0.87 | 2.65 | 1.48 | 2.18 | 2.12 | 1.28 | 1.88 | NA |
| 45 | 1.82 | 7.85 | 3.49 | 8.28 | 6.52 | 2.94 | 5.31 | 2.8 |
| 48 | 14.4 | 14.5 | 12.7 | 15.8 | 15.6 | 18.3 | 14.7 | 16.2 |
| 52 | 15.7 | 14.8 | 16.8 | 16.9 | NA | 11.3 | 15.2 | 16.7 |
| 53 | 2.5 | 4.17 | 4.6 | 8.41 | 8.28 | 5.26 | 6.85 | 6.13 |
| 59 | 1.12 | NA | 1.16 | 1.71 | 1.21 | 1.19 | 1.06 | 1.21 |
| 61 | 33 | 34 | 47.5 | 45.3 | 45.3 | 48 | 55.5 | 45.3 |
| 3 | 20.5 | 57.3 | 74.4 | 98.4 | 86.4 | 61.3 | 91.6 | 82.5 |
| 7 | 19.5 | 22.5 | 19 | 30 | NA | 24.6 | 21.8 | 23.7 |
| 12 | 0.222 | NA | 0.205 | NA | 0.261 | 0.131 | 0.308 | 0.212 |
| 13 | 12.7629 | NA | 12.2642 | 13.2253 | 13.7632 | 11.7345 | 13.27 | 13 |
| 17 | 1 | 1.5 | 1.25 | 1 | 1 | 1 | 1.17 | 1 |
| 22 | 46.4 | 83 | 54.7 | 95.7 | 84.3 | 70.1 | 87.1 | 67.9 |
| 21 | 11.4 | 24.8 | 15.6 | 21.7 | 18.5 | 14.6 | 24 | 18 |
| 27 | 11.08 | 15.62 | 10.25 | 10.17 | 11.38 | 11.58 | 11.96 | 12 |
| 28 | 15.6 | 19.2 | 14.4 | 16.8 | 19.4 | 17.8 | 18.1 | 18.5 |
| 34 | 12.7 | NA | 14.9 | 15.3 | 16 | 15.4 | 17.1 | 15.5 |
| 35 | 1.53 | 1.37 | 1.47 | NA | NA | 1.46 | 1.26 | 1.51 |
| 36 | 0.357 | 0.412 | 0.477 | 0.532 | 0.528 | 0.377 | 0.592 | 0.431 |
| 40 | 66 | 72 | 63.5 | 70 | 74.7 | 66 | 75.7 | 72 |
| 41 | 118 | 123.5 | 116 | 118 | 130.3 | 118 | 138.5 | 127.7 |
| 44 | 85 | 89.5 | 68.5 | 72.7 | 85 | 70 | 83 | 82.3 |
| 46 | 127.1 | NA | 146.7 | 169.5 | 182.7 | 157.6 | 152.7 | 172.7 |
| 49 | 1.33 | 1.29 | 2.04 | 1.66 | 1.7 | 1.87 | 1.31 | 1.4 |
| 4 | 46.8 | 43.9 | 30.9 | 48.8 | 47.9 | 44.7 | 44.4 | 49.2 |
| 8 | 48.6 | 45.3 | 24.8 | 47.1 | 49.5 | 35.5 | 45.2 | 49.9 |
| 14 | NA | 24.5 | 223.7 | 127.3 | NA | NA | 110.2 | 150.7 |
| 24 | NA | 797.7 | 5200.6 | 3135.3 | 2109 | NA | 3959.9 | 4729.1 |
| 23 | 0.0515 | NA | 0.0662 | 0.1166 | 0.1005 | 0.0805 | 0.1063 | 0.0838 |
| 29 | 0.15 | NA | 0.18 | NA | NA | 0.233 | 0.184 | NA |
| 30 | 0.147 | NA | 0.17 | 0.169 | 0.159 | 0.192 | 0.214 | 0.127 |
| 37 | 1.68 | 1.89 | 1.15 | 2.12 | 1.86 | 1.46 | 1.64 | 1.54 |
| 15 | 26.1 | NA | 51.3 | 85.8 | 76.5 | 66.1 | 83.1 | 58.6 |
| 16 | 0.673 | NA | 0.794 | 1.498 | 1.355 | 1.313 | 1.489 | 1.037 |
| 25 | 0.145 | 0.193 | 0.2 | 0.178 | 0.172 | 0.172 | 0.201 | 0.137 |

Table 242. Provided are the values of each of the parameters (as described above) measured in maize accessions (Line). Growth conditions are specified in the experimental procedure section.

TABLE 243
Measured parameters in Maize Inbred Field A 35K per acre (lines 17-24)

| Correlation | Line | | | | | | | |
|---|---|---|---|---|---|---|---|---|
| ID | Line-17 | Line-18 | Line-19 | Line-20 | Line-21 | Line-22 | Line-23 | Line-24 |
| 60 | NA | 82.5 | NA | 83 | 81.8 | NA | NA | NA |
| 5 | 100 | 93.9 | NA | NA | NA | 50.8 | 76.3 | NA |
| 6 | 14.1 | 17.7 | 1.9 | 21.1 | 15.6 | 14.1 | 23.4 | 17 |
| 31 | 5.25 | 5.87 | 5.75 | 3.94 | 4.51 | 5.16 | 4.28 | 4.91 |
| 32 | 208.3 | 150.2 | 251.5 | 269.2 | 239.1 | 221.9 | 173.2 | 264 |
| 9 | 192.1 | 131.7 | 238.4 | 245 | 213.4 | 204.1 | 163.4 | 249.3 |
| 18 | 0.497 | 0.346 | 0.48 | 0.468 | 0.488 | 0.531 | 0.417 | 0.536 |
| 47 | 18.33 | 19 | 10.5 | 5.25 | 6.67 | 16.67 | 5.25 | 13.33 |
| 50 | 99.5 | 98.4 | 62.5 | 33.9 | 69.1 | 112.2 | 104.3 | 52.6 |
| 51 | 23.3 | 15.5 | 17.2 | 12.8 | 16.3 | 32.3 | 24.1 | 14.7 |
| 55 | 1.51 | NA | 1.36 | 0.98 | 1.34 | 1.22 | 3.13 | 0.6 |
| 57 | 18.9 | 34.8 | 25.3 | 37.2 | 30.5 | 31.8 | 29.8 | 33.6 |
| 1 | 2.36 | NA | 5.15 | 4.6 | 5.33 | 2.28 | 1.87 | 3.04 |
| 2 | 0.349 | 0.318 | 0.605 | 0.339 | 0.319 | 0.522 | 0.619 | 0.375 |
| 56 | 12.2 | 12.7 | 13.7 | 12.1 | 11.5 | 13.7 | 13.3 | 13.4 |
| 10 | 36.1 | NA | NA | 28.2 | 33.1 | 44.2 | NA | 34.9 |
| 11 | 555.5 | NA | NA | 392.3 | 548.1 | 741.1 | NA | 511.7 |
| 19 | 384.8 | 360.3 | 239 | 116.8 | 274.4 | 421.1 | 420.6 | 223.1 |
| 20 | 33.8 | 28.4 | 33.9 | 32.9 | 39.6 | 39.8 | 36 | 27.1 |
| 26 | 13.6 | 13.6 | 13.9 | 14.8 | 16.8 | 14.7 | 13.6 | 12.7 |
| 33 | 3.17 | 2.67 | 3.09 | 2.81 | 2.98 | 3.46 | 3.37 | 2.71 |
| 38 | 53.7 | 46.9 | 63.3 | 46 | 58.5 | 63.8 | 58 | 41.3 |
| 39 | 11.06 | 9.66 | 16.63 | 10.28 | 11.94 | 8.09 | 21.15 | 5.77 |
| 42 | 52.7 | 45.7 | 58.6 | 42.8 | 50.1 | 61.4 | 56.1 | 39.7 |
| 43 | 11.06 | 9.65 | 16.63 | 10.26 | 11.89 | 8.09 | 21.09 | 5.77 |
| 54 | 4.86 | 4.11 | 4.54 | 3.69 | 4.16 | 5.25 | 4.9 | 4.25 |
| 58 | 1.59 | 1.39 | 1.86 | 1.36 | 1.39 | 1.38 | 2.22 | 1.11 |
| 45 | 5.25 | 2.9 | 4.22 | 3.22 | 3.88 | 6.89 | 4.1 | 3.76 |
| 48 | 14 | 14.3 | 17.6 | 15.7 | 17.9 | 15.4 | 15 | 12.2 |
| 52 | 15.3 | NA | 15.3 | 13.8 | 15.8 | 16.8 | 17 | 14.7 |
| 53 | 6.86 | 5.66 | 3.96 | 2.74 | 3.49 | 6.92 | 7.11 | 3.06 |
| 59 | 1.25 | 1.12 | 1.34 | 1.03 | 1.08 | 1.5 | 1.19 | 1 |
| 61 | 39.7 | 29 | 45 | 70 | 58 | 36.7 | 40.5 | 56 |
| 3 | 83.2 | 74.1 | 54.6 | 27.8 | 51.8 | 93.6 | 91.8 | 46.2 |
| 7 | 25.1 | NA | 17.1 | 9.4 | 17.7 | 24.6 | 24.2 | 15.3 |
| 12 | 0.285 | 0.182 | 0.143 | 0.094 | 0.279 | NA | NA | 0.168 |
| 13 | 12.9117 | 12.0596 | 12.6853 | 12.5432 | 14.0549 | 13.8286 | 13.9608 | 14.0242 |
| 17 | 1 | 1 | 1 | 1 | 1.67 | 1 | 1 | 1 |
| 22 | 84.1 | 59.8 | 59.7 | 33.2 | 69.4 | 98 | 75.6 | 61.1 |
| 21 | 16.2 | 11.9 | 26.6 | 18 | 19.4 | 53.7 | 20.5 | 13.3 |
| 27 | 12.38 | 10.85 | 10.38 | 9.62 | 10.83 | 13.6 | 13.67 | 12.54 |
| 28 | 17.8 | 19.6 | 19.6 | 16.2 | 16.6 | 18.4 | 19.7 | 18.7 |
| 34 | 18 | 12.6 | 17.1 | 12.2 | 17.1 | 16.4 | 18.1 | 18.4 |
| 35 | 1.63 | 1.55 | 1.35 | 1.53 | 1.33 | 1.39 | 1.14 | 1.51 |
| 36 | 0.477 | 0.473 | 0.354 | 0.464 | 0.456 | 0.436 | 0.449 | 0.424 |
| 40 | 74.7 | 71 | 76.2 | 79 | 78 | 75.7 | 76.2 | 74 |
| 41 | 132.7 | 119 | 131.8 | 154.7 | 143.5 | 129 | 122 | 143.3 |
| 44 | 93 | 90 | 86.8 | 84.2 | 84.7 | 92.3 | 81.5 | 87.3 |
| 46 | 190.2 | 170.9 | 194.9 | 170.2 | 165.2 | 187.2 | 187.2 | 162.8 |
| 49 | 1.58 | 1.6 | 1.63 | 1.6 | 1.35 | 1.76 | 1.81 | 1.71 |
| 4 | 54.8 | 48.4 | 49.7 | 50 | 50.4 | 52.1 | 50.5 | 40.2 |
| 8 | 55.9 | 41 | 46.9 | 40.2 | 43.9 | 46.9 | 49 | 43.5 |
| 14 | 72.8 | NA | 65.7 | 114.6 | 112.7 | 122 | 73.3 | 99.7 |
| 24 | 2375.3 | 2608.5 | 3248.6 | 3805.9 | 3427.7 | 3564.7 | 3013 | 2913.7 |
| 23 | 0.0993 | 0.061 | 0.0702 | 0.0475 | 0.0732 | 0.1058 | 0.0853 | 0.0635 |
| 29 | 0.184 | NA | 0.321 | 0.194 | 0.193 | 0.182 | 0.403 | 0.161 |
| 30 | 0.207 | 0.193 | 0.132 | 0.101 | 0.166 | 0.17 | 0.14 | 0.124 |
| 37 | 2.12 | 2.25 | 1.45 | 0.5 | 1.08 | 2.29 | 1.87 | 1.09 |
| 15 | 82.7 | 34.6 | 58.1 | 20.4 | 45.1 | 84.5 | 75.6 | 42.3 |
| 16 | 1.434 | 0.581 | 0.978 | 0.343 | 0.695 | 1.403 | 1.298 | 0.936 |
| 25 | 0.15 | 0.158 | 0.266 | 0.194 | 0.168 | 0.17 | 0.169 | 0.18 |

Table 243. Provided are the values of each of the parameters (as described above) measured in maize accessions (Line). Growth conditions are specified in the experimental procedure section.

TABLE 244
Measured parameters in Maize Inbred Field A 35K per acre (lines 25-32)

| | Line | | | | | | | |
|---|---|---|---|---|---|---|---|---|
| Correlation | | Line- | | | | | | |
| ID | Line-25 | 26 | Line-27 | Line-28 | Line-29 | Line-30 | Line-31 | Line-32 |
| 60 | NA | NA | 80.9 | NA | 83.4 | 79 | NA | 94.3 |
| 5 | 87.7 | 100 | 97.9 | 100 | 85 | 98.3 | 100 | NA |
| 6 | 3.3 | 23.9 | 11.4 | 15.7 | 17.1 | 18.8 | 16.3 | 8.5 |
| 31 | 7.31 | 3.85 | 5.16 | 4.87 | 5.94 | 8.71 | 5.26 | NA |
| 32 | 284.8 | 230.8 | 266.6 | 285.1 | 176 | 217.3 | 230.5 | 182.5 |
| 9 | 256 | 215.9 | 245 | 260.9 | 175.4 | 206.5 | 217.4 | 168.7 |
| 18 | 0.58 | 0.465 | 0.503 | 0.551 | 0.434 | 0.493 | 0.506 | 0.443 |
| 47 | 19 | 6.33 | 2.5 | 8 | 15 | 20 | 14.67 | 8.5 |
| 50 | 83.9 | 40.2 | 72.3 | 60.9 | 134.3 | 82.4 | 56.4 | 65.3 |
| 51 | 23.6 | 17.5 | 29.2 | 13.6 | 20.4 | 13.1 | 16.6 | 11.6 |
| 55 | 1.04 | NA | NA | 2.67 | NA | NA | NA | 2.86 |
| 57 | 30.5 | NA | NA | 16.5 | 27 | 29.5 | NA | 25.1 |
| 1 | 3.97 | NA | NA | 5.25 | NA | NA | NA | 6.03 |
| 2 | 0.481 | 0.418 | 0.349 | 0.342 | 0.504 | 0.442 | 0.323 | 0.262 |
| 56 | 12.1 | 10.1 | 12.1 | 13.6 | 13.6 | 12.5 | 10.2 | 14.4 |
| 10 | 42.7 | NA | NA | 34.5 | NA | NA | NA | 35.9 |
| 11 | 561.8 | NA | NA | 470.9 | NA | NA | NA | 609.9 |
| 19 | 290.4 | 233.7 | 280.6 | 232.6 | 448.6 | 304.6 | 223.7 | 279.7 |
| 20 | 34 | 32.5 | 34.8 | 33.8 | 39.5 | 28.5 | 25.2 | 28.8 |
| 26 | 13.1 | 11.8 | 14.5 | 14.7 | 17.1 | 14.9 | 11.4 | 12.5 |
| 33 | 3.29 | 3.44 | 3.04 | 2.91 | 2.93 | 2.42 | 2.81 | 2.86 |
| 38 | 63.2 | 52.1 | 57.7 | 53.3 | 69.8 | 55.6 | 44.8 | 45.9 |
| 39 | 9.72 | 9.8 | NA | 17.45 | 12.2 | 9.8 | NA | 18.88 |
| 42 | 61.2 | 44.5 | 55.2 | 50 | 68.9 | 54.2 | 40.9 | 43.1 |
| 43 | 9.71 | 9.8 | NA | 17.4 | 12.19 | 9.8 | NA | 18.58 |
| 54 | 5.1 | 4.73 | 4.65 | 4.4 | 4.55 | 4.17 | 4.63 | 4.44 |
| 58 | 1.41 | 1.71 | NA | 2 | 1.42 | 1.35 | NA | 2.15 |
| 45 | 7 | 2.45 | NA | 3.21 | 5.58 | 2.81 | NA | 3.51 |
| 48 | 15.7 | 14 | 15.6 | 15.3 | 19.4 | 16.9 | 12.3 | 13 |
| 52 | 13.2 | NA | NA | 13.7 | NA | NA | NA | 17 |
| 53 | 5.03 | 2.64 | 4.73 | 4.25 | 8.19 | 5.45 | 4.12 | 5.04 |
| 59 | 1.05 | 1.83 | 1.53 | 1.22 | 1.54 | 1.46 | 1.12 | 1 |
| 61 | 36 | 54 | 52.8 | 59 | 31.5 | 28 | 45.3 | NA |
| 3 | 66 | 36 | 60.6 | 50.3 | 128.5 | 74.3 | 49.8 | 55.5 |
| 7 | 22.8 | NA | NA | 18.1 | NA | NA | NA | 16.5 |
| 12 | 0.16 | NA | NA | NA | NA | NA | 0.229 | 0.207 |
| 13 | 13.0292 | 13.27 | 13.2261 | 13.7948 | 12.3016 | 12.5913 | 13.3612 | 14.5404 |
| 17 | 1 | 1.33 | 1.25 | 1.5 | 1 | 1 | 1 | NA |
| 22 | 81.2 | 57 | 74 | 70.5 | 79.6 | 67.9 | 53 | 53.5 |
| 21 | 20 | 16.2 | 22 | 16.6 | 21.7 | 11.6 | 14.9 | 22.5 |
| 27 | 10.46 | 9.79 | 10.9 | 10.38 | 12.33 | 12.45 | 14.04 | 10.19 |
| 28 | 19.6 | 16.1 | 17.6 | 18.9 | 17.5 | 15.4 | 17.4 | 17.6 |
| 34 | 16.8 | 17.3 | 17.2 | 17.2 | 15.8 | 15.7 | 17.5 | NA |
| 35 | 1.47 | NA | NA | 1.32 | 1.57 | 1.9 | NA | 1.46 |
| 36 | 0.398 | 0.48 | 0.346 | 0.491 | 0.436 | 0.526 | 0.384 | NA |
| 40 | 74 | 74.7 | 80 | 76.2 | 70 | 70 | 72.7 | 88 |
| 41 | 129 | 135 | 135.2 | 143.2 | 122 | 118 | 132.7 | NA |
| 44 | 93 | 81 | 82.5 | 84.2 | 85 | 90 | 87.3 | 96.5 |
| 46 | 156.7 | 160 | 171.9 | 178.4 | 150.6 | 158.7 | 134.2 | 202.3 |
| 49 | 1.55 | 1.43 | 1.2 | 1.26 | 1.27 | 1.46 | 1.2 | 1.12 |
| 4 | 52 | 43.9 | 56.4 | 48.9 | 46.3 | 47.1 | 48.8 | NA |
| 8 | 46.3 | 44.9 | 49.8 | 44.8 | 43.4 | 51.8 | 46.5 | 45.5 |
| 14 | 144.6 | NA | NA | 69.6 | NA | NA | NA | 91.2 |
| 24 | 4355.9 | NA | NA | 2507.1 | 2625.9 | 3737.3 | NA | 2667.3 |
| 23 | 0.098 | 0.103 | 0.101 | 0.084 | 0.0981 | 0.0778 | 0.0642 | 0.0664 |
| 29 | 0.248 | NA | NA | 0.189 | NA | NA | NA | 0.1 |
| 30 | 0.123 | 0.176 | 0.119 | 0.167 | 0.137 | 0.125 | 0.134 | 0.15 |
| 37 | 2.48 | 0.95 | 1.45 | 1.2 | 2.65 | 2.84 | 1.27 | NA |
| 15 | 88.4 | 59.9 | 72.6 | 70.3 | 68.8 | 51.2 | 44.1 | NA |
| 16 | 1.601 | 1.085 | 1.308 | 1.151 | 1.266 | 0.846 | 0.791 | NA |
| 25 | 0.172 | 0.152 | 0.207 | 0.169 | 0.189 | 0.168 | 0.21 | 0.257 |

Table 244. Provided are the values of each of the parameters (as described above) measured in maize accessions (Line). Growth conditions are specified in the experimental procedure section.

TABLE 245
Measured parameters in Maize Inbred Field A 35K per acre (lines 33-40)

| | Line | | | | | | | |
|---|---|---|---|---|---|---|---|---|
| Correlation | | | | | | Line- | Line- | |
| ID | Line-33 | Line-34 | Line-35 | Line-36 | Line-37 | 38 | 39 | Line-40 |
| 60 | 89.1 | 84.6 | 91 | 78.9 | 57.5 | NA | 85.6 | 98.5 |
| 5 | NA | 100 | NA | 100 | NA | 98.4 | NA | NA |
| 6 | 10.9 | 25.5 | 29 | 19.5 | NA | NA | 2.6 | 17.1 |
| 31 | 4.3 | 4.24 | 3.68 | 5.59 | NA | 3.15 | 5.22 | 3.02 |
| 32 | 296.4 | 212.5 | 224.2 | 231.4 | NA | 160.7 | 314.1 | 220.6 |
| 9 | 289.1 | 196.8 | 210.4 | 201.9 | NA | 133.9 | 297.1 | 215.3 |
| 18 | 0.6 | 0.492 | 0.472 | 0.507 | NA | 0.375 | 0.531 | 0.488 |
| 47 | 11.33 | 10 | 8.67 | 7.33 | 3 | 5.33 | 5.25 | 5 |
| 50 | 123.4 | 47.2 | 52.9 | 76.4 | NA | 61 | 63.9 | 43.1 |
| 51 | 16.4 | 8.7 | 11.1 | 24.3 | NA | NA | 12.8 | 13.3 |
| 55 | 0.33 | 0.49 | NA | 1.58 | 4.16 | 3.72 | NA | NA |
| 57 | 30.7 | 27.5 | NA | 26.2 | NA | 26.4 | NA | NA |
| 1 | 5.3 | 6.62 | NA | 4.28 | 5.45 | 5.11 | NA | NA |
| 2 | 0.609 | 0.434 | 0.23 | 0.358 | NA | 0.269 | 0.374 | 0.605 |
| 56 | 10.9 | 11.5 | 9.4 | 12.3 | NA | 12.2 | 9.8 | 10.6 |
| 10 | 29.8 | 21.9 | NA | 30.1 | 30.2 | 35.2 | NA | NA |
| 11 | 476.8 | 311 | NA | 443.4 | 454.4 | 535.1 | NA | NA |
| 19 | 414.6 | 287.1 | 201 | 273.1 | 193.4 | 281.5 | 226.6 | 182.3 |
| 20 | 48.1 | 33.7 | 21.1 | 30 | 38.5 | 37.3 | 40.1 | 25.8 |
| 26 | 17 | 13.3 | 9.2 | 13.9 | 17 | 15.7 | 15 | 10.2 |
| 33 | 3.6 | 3.22 | 2.88 | 2.72 | 2.88 | 3.03 | 3.4 | 3.22 |
| 38 | 68.7 | 45.4 | 38.3 | 64.8 | 51.7 | 53.7 | 58.1 | 52.7 |
| 39 | 4.77 | 5.63 | NA | 9.61 | 8.62 | 12.2 | NA | NA |
| 42 | 64.2 | 41.1 | 36.4 | 62.9 | 40.9 | 47 | 57.7 | 51.6 |
| 43 | 4.77 | 5.62 | NA | 9.55 | 8.25 | 12.17 | NA | NA |
| 54 | 5.2 | 4.49 | 4.21 | 4.6 | 4.12 | 4.26 | 4.63 | 4.55 |
| 58 | 0.96 | 1.17 | NA | 1.45 | 1.46 | 1.68 | NA | NA |
| 45 | 4.01 | 2.25 | NA | 6.17 | NA | NA | NA | NA |
| 48 | 16.6 | 12.7 | 11.4 | 17.9 | 15.9 | 16 | 15.9 | 14.6 |
| 52 | 16 | 14.2 | NA | 14.7 | 15 | 15.2 | NA | NA |
| 53 | 9.42 | 3.33 | 3.65 | 4.28 | NA | 2.66 | 3.84 | 2.75 |
| 59 | 1.04 | 1 | 1.14 | 1.46 | NA | 1.4 | 1 | 1.38 |
| 61 | 66 | 43.7 | 63.3 | 42.7 | 49 | 51.3 | 59.8 | 73 |
| 3 | 117.4 | 40.1 | 45.6 | 56.3 | NA | 38.6 | 56.6 | 41 |
| 7 | 25.9 | 20.5 | NA | 18.5 | 13.3 | 18.7 | NA | NA |
| 12 | 0.182 | 0.169 | 0.213 | 0.226 | NA | 0.307 | 0.185 | NA |
| 13 | 14.3634 | 13.2371 | 13.0652 | 13.2555 | 12.8298 | NA | NA | 14.4108 |
| 17 | 1 | 1 | 1.33 | 1.33 | NA | 1.67 | 1 | 1 |
| 22 | 124 | 65.4 | 45.9 | 68.9 | 51.1 | 51.8 | 73 | 40.8 |
| 21 | 31.3 | 25.9 | 10.2 | 18.3 | 18.5 | 20 | 18.4 | 15.5 |
| 27 | 11.11 | 9.62 | 9.88 | 10.71 | NA | NA | 10.84 | 8.25 |
| 28 | 20.8 | 17 | 14.4 | 17.5 | NA | NA | 16.5 | 14.9 |
| 34 | 24.9 | 15 | 25.6 | 15.2 | NA | 14.8 | 18.8 | 34.5 |
| 35 | 1.54 | 1.2 | NA | 1.42 | 1.75 | 1.92 | NA | NA |
| 36 | 0.361 | 0.437 | 0.438 | 0.386 | NA | 0.414 | 0.338 | NA |
| 40 | 79.7 | 79 | 86.3 | 79 | 64 | 61.3 | 79 | 93 |
| 41 | 157 | 132.7 | 158.3 | 129 | 116 | 118 | 144 | 171 |
| 44 | 91 | 89 | 95 | 86.3 | 67 | 66.7 | 84.2 | 98 |
| 46 | 169.7 | 166.8 | 120.9 | 175.3 | NA | 128.7 | 125.7 | 174.9 |
| 49 | 1.12 | 1.28 | 0.91 | 1.43 | 2.17 | 2.03 | 1.19 | 1.11 |
| 4 | 55.5 | 35.2 | NA | 48.1 | NA | NA | 52.4 | NA |
| 8 | 53.8 | 27.8 | 33.6 | 40.1 | NA | 31.5 | 41.7 | 53.5 |
| 14 | 115.6 | 134.7 | NA | 128 | NA | 218.9 | NA | NA |
| 24 | 5193.6 | 4171.6 | NA | 3181.1 | NA | 4424.7 | NA | NA |
| 23 | 0.1041 | 0.0626 | 0.0443 | 0.0975 | NA | 0.0701 | 0.0778 | 0.0931 |
| 29 | 0.21 | 0.272 | NA | 0.231 | NA | 0.143 | NA | NA |
| 30 | 0.134 | 0.165 | 0.157 | 0.126 | NA | NA | NA | 0.157 |
| 37 | 1.87 | 1.3 | 0.79 | 1.68 | 1.06 | 1.01 | 1.21 | 0.56 |
| 15 | 73.1 | 39.3 | 44.2 | 64 | NA | 57.1 | 58.4 | 66 |
| 16 | 1.49 | 0.619 | 0.764 | 1.118 | NA | 1.054 | 1.158 | 1.388 |
| 25 | 0.182 | 0.235 | 0.175 | 0.232 | 0.168 | 0.178 | 0.134 | 0.187 |

Table 245. Provided are the values of each of the parameters (as described above) measured in maize accessions (Line). Growth conditions are specified in the experimental procedure section.

TABLE 246
Measured parameters in Maize Inbred Field A 35K per acre (lines 41-48)

| | Line | | | | | | | |
|---|---|---|---|---|---|---|---|---|
| Correlation | | | | | | Line- | | |
| ID | Line-41 | Line-42 | Line-43 | Line-44 | Line-45 | 46 | Line-47 | Line-48 |
| 60 | 89 | 93.5 | NA | 78.2 | NA | 88.7 | 87.2 | 79.9 |
| 5 | NA | NA | NA | NA | 98.5 | NA | NA | NA |
| 6 | 7.2 | 8.7 | NA | 10.7 | 1.5 | 15.5 | 19.7 | 11.1 |
| 31 | 3.49 | NA | 3.77 | 4.03 | 6.98 | 3.52 | 3.91 | 3.76 |
| 32 | 234.3 | NA | 275.4 | 182.6 | 288.2 | 258.4 | 307 | 254.2 |
| 9 | 211.4 | NA | 243 | 154.1 | 248.5 | 240 | 303.8 | 237 |
| 18 | 0.407 | NA | 0.571 | 0.436 | 0.655 | 0.554 | 0.562 | 0.569 |
| 47 | 10 | 6 | NA | 2.67 | 8 | 10.33 | 4.75 | 12 |
| 50 | 75.8 | NA | 80 | 54.1 | 73.9 | 77.8 | 80.9 | 62.5 |
| 51 | 10.4 | 12.4 | NA | 16.5 | 23.5 | 6.1 | 10.9 | 10.9 |
| 55 | 5.74 | NA | NA | NA | NA | 0.72 | NA | 0.75 |
| 57 | 37.3 | NA | NA | NA | 22.5 | 33.6 | NA | 34.5 |
| 1 | 4.4 | NA | NA | NA | NA | 7.48 | NA | 3.18 |
| 2 | 0.374 | 0.401 | 0.52 | 0.212 | 0.531 | 0.35 | 0.438 | 0.352 |
| 56 | 11.2 | 12.4 | 11.2 | 13.6 | 13.1 | 11.6 | 10.9 | 14.5 |
| 10 | 34.9 | NA | NA | NA | NA | 46.8 | NA | 39.3 |
| 11 | 462.1 | NA | NA | NA | NA | 528.5 | NA | 609.3 |
| 19 | 323.8 | 92.7 | 233.4 | 175 | 270.7 | 274.7 | 251.9 | 340.2 |
| 20 | 38.2 | 31.6 | 31.5 | 25.5 | 46 | 29.8 | 34 | 40.7 |
| 26 | 15.1 | 12.1 | 13.8 | 11.4 | 16.3 | 15.1 | 14.3 | 15.9 |
| 33 | 3.21 | 3.33 | 2.9 | 2.81 | 3.59 | 2.49 | 3.02 | 3.27 |
| 38 | 61.5 | 45 | 48.5 | 45.2 | 71.1 | 55.9 | 57.4 | 64 |
| 39 | 21.66 | NA | NA | NA | NA | 7.93 | NA | 6.86 |
| 42 | 60.7 | 42.4 | 40 | 42.6 | 67.6 | 50.9 | 55.9 | 61 |
| 43 | 21.45 | NA | NA | NA | NA | 7.92 | NA | 6.86 |
| 54 | 4.68 | 4.68 | 4.3 | 4.22 | 5.62 | 4.13 | 4.5 | 4.67 |
| 58 | 2.08 | NA | NA | NA | NA | 1 | NA | 1.08 |
| 45 | 4.7 | NA | NA | NA | 4.78 | 1.73 | NA | 2.72 |
| 48 | 16.7 | 12.1 | 14.2 | 13.6 | 16.1 | 17 | 16.2 | 17.4 |
| 52 | 13.2 | NA | NA | NA | NA | 11.2 | NA | 15.4 |
| 53 | 4.1 | NA | 4.43 | 2.99 | 4.33 | 4.21 | 5.59 | 4.82 |
| 59 | 1.19 | 1.29 | 1.12 | 1.04 | 1.5 | 1 | 1 | 1 |
| 61 | 67.5 | 64.7 | 76.5 | 50.3 | 46 | 73.7 | 79.2 | 71.3 |
| 3 | 61.1 | NA | 61 | 36.7 | 59.4 | 65.2 | 79.3 | 53.5 |
| 7 | 24.5 | NA | NA | NA | NA | 24.4 | NA | 21.9 |
| 12 | 0.268 | 0.054 | 0.13 | 0.236 | NA | 0.208 | 0.178 | 0.275 |
| 13 | 13.7023 | 13.6365 | 11.9151 | 13.6717 | 12.5777 | 13.655 | 13.0256 | 15.8302 |
| 17 | 1 | 1 | 1 | 1 | 1 | 2 | 1 | 1 |
| 22 | 81.4 | 24.4 | 68.3 | 35 | 76.3 | 72.9 | 77.5 | 90 |
| 21 | 19.4 | 40.9 | 32.7 | 22 | 37.5 | 12.9 | 14.6 | 17.8 |
| 27 | 10.81 | 8.54 | NA | 9 | 12.25 | 9.12 | 9.28 | 9.83 |
| 28 | 16.7 | 17.6 | NA | 14.8 | 17.8 | 19.1 | 18 | 17.7 |
| 34 | 25.4 | 21.3 | 31.9 | 15.3 | 16.6 | 26.8 | 25.4 | 18.2 |
| 35 | 1.35 | NA | NA | NA | NA | 1.59 | NA | 1.42 |
| 36 | NA | NA | NA | NA | 0.356 | 0.415 | 0.372 | 0.47 |
| 40 | 83 | 86.3 | NA | 82 | 74.7 | 84.7 | 78.2 | 83 |
| 41 | 160.5 | 157 | 171 | 135 | 131.3 | 168.7 | 162.2 | 166.3 |
| 44 | 93 | 92.3 | 94.5 | 84.7 | 83 | 95 | 83 | 95 |
| 46 | 147.5 | 170.8 | 181.1 | 179 | 169.7 | 170.4 | 151.9 | 235 |
| 49 | 1.13 | 1.27 | 1.01 | 1.29 | 1.21 | 0.87 | 1.06 | 1.66 |
| 4 | NA | NA | NA | 53.1 | 54.9 | NA | 47.1 | NA |
| 8 | 41.3 | 44.9 | NA | 44.9 | 49.2 | 37 | 49.4 | 45.5 |
| 14 | 105.1 | NA | NA | NA | NA | 115.3 | NA | 97 |
| 24 | 4344.9 | NA | NA | NA | 814.7 | 4492.1 | NA | 3429.1 |
| 23 | 0.1092 | 0.0514 | 0.0759 | 0.0571 | 0.1369 | 0.0705 | 0.0846 | 0.1035 |
| 29 | 0.17 | NA | NA | NA | NA | 0.117 | NA | 0.102 |
| 30 | 0.156 | 0.223 | 0.119 | 0.145 | 0.149 | 0.201 | 0.169 | 0.182 |
| 37 | 1.2 | 0.37 | 0.94 | 0.77 | 1.43 | 1 | 0.98 | 1.31 |
| 15 | 72.6 | 46.8 | 38.4 | 36.3 | 83.1 | 48.8 | 64.2 | 61.7 |
| 16 | 1.411 | 0.914 | 0.782 | 0.634 | 1.723 | 0.826 | 1.027 | 1.432 |
| 25 | 0.159 | 0.389 | 0.168 | 0.274 | 0.224 | 0.176 | 0.143 | 0.134 |

Table 246. Provided are the values of each of the parameters (as described above) measured in maize accessions (Line). Growth conditions are specified in the experimental procedure section.

TABLE 247
Measured parameters in Maize Inbred Field A 35K per acre (lines 49-56)

| | Line | | | | | | | |
|---|---|---|---|---|---|---|---|---|
| Correlation ID | Line-49 | Line-50 | Line-51 | Line-52 | Line-53 | Line-54 | Line-55 | Line-56 |
| 60 | 79 | 89.3 | 83.8 | NA | 78.7 | NA | 78.4 | 75.5 |
| 5 | 71.9 | NA | 77.3 | 100 | 100 | 51.4 | NA | 100 |
| 6 | 14.4 | 10.5 | NA | 0 | 20.1 | 19.6 | 5.6 | 5.7 |
| 31 | 4.55 | 4.25 | 7.58 | 3.77 | 5.75 | 5.3 | 4.66 | 2.54 |
| 32 | 237.8 | 293.9 | 180.6 | 193.9 | 265.9 | 222.3 | 356.8 | 118.3 |
| 9 | 223.1 | 320.3 | 157.5 | 170.7 | 243.3 | 170.7 | 360.1 | 109 |
| 18 | 0.501 | 0.52 | 0.412 | 0.437 | 0.514 | 0.434 | 0.726 | 0.256 |
| 47 | 5.62 | 13.33 | 30 | 8 | 8.5 | 10.25 | 5.67 | 6.67 |
| 50 | 34.6 | 57.4 | 123.1 | 120.2 | 26.9 | 53.4 | 33 | 92.1 |
| 51 | 14 | 13.9 | NA | 15.2 | 13.6 | 16.8 | 7.3 | 9.8 |
| 55 | 1.58 | NA | NA | 0.58 | 1.43 | 0.36 | NA | NA |
| 57 | 19 | NA | 32.8 | 27.4 | 33.8 | 25.1 | NA | NA |
| 1 | 2.21 | NA | NA | 3.19 | 5.53 | 5.98 | NA | NA |
| 2 | 0.336 | 0.757 | 0.476 | 0.3 | 0.282 | 0.447 | 0.457 | 0.293 |
| 56 | 12.7 | 14 | 11 | 10.2 | 10.3 | 11.2 | 11.1 | 9.1 |
| 10 | NA | NA | NA | 41.8 | NA | 36.2 | NA | NA |
| 11 | NA | NA | NA | 626.2 | NA | 574.1 | NA | NA |
| 19 | 191.9 | 201.9 | 395.6 | 373.6 | 136.3 | 278.5 | 146.4 | 287.9 |
| 20 | 20.7 | 36.4 | 48.9 | 33.8 | 34.4 | 35.3 | 23.3 | 25.7 |
| 26 | 10.9 | 14.2 | 17.5 | 14.9 | 15.3 | 14.6 | 11.8 | 13.6 |
| 33 | 2.42 | 3.29 | 3.55 | 2.88 | 2.87 | 3.07 | 2.44 | 2.43 |
| 38 | 35.4 | 48.2 | 76.2 | 55.4 | 42.8 | 57.1 | 38.4 | 39 |
| 39 | 8.01 | NA | 16.39 | 5.44 | 11.06 | 4.45 | NA | NA |
| 42 | 32.2 | 43.9 | 71.5 | 51.9 | 35.7 | 49.1 | 36.9 | 38.6 |
| 43 | 8 | NA | 16.37 | 5.44 | 11.06 | 4.45 | NA | NA |
| 54 | 4.07 | 3.97 | 4.9 | 4.56 | 3.65 | 4.48 | 4.02 | 3.21 |
| 58 | 1.38 | NA | 1.87 | 1.08 | 1.42 | 1.02 | NA | NA |
| 45 | 2.92 | NA | NA | 3.4 | 3.57 | 3.4 | NA | NA |
| 48 | 11 | 14.6 | 19.7 | 15.4 | 14.2 | 16.1 | 11.9 | 15.3 |
| 52 | 11.8 | NA | NA | 15.2 | 14.7 | 15.8 | NA | NA |
| 53 | 1.91 | 3.11 | 8.18 | 6.27 | 2.02 | 3.43 | 1.88 | 8.63 |
| 59 | 1.56 | 1.28 | 1.12 | 1.5 | 1.09 | 1.19 | 1 | 1.42 |
| 61 | 52.1 | 70.7 | 26.7 | 53 | 48 | 37.3 | 76.7 | 47.7 |
| 3 | 30.3 | 50.2 | 91.6 | 88.2 | 22.6 | 39.3 | 31.7 | 77.2 |
| 7 | 17.1 | NA | NA | 24.5 | 8.8 | 16.6 | NA | NA |
| 12 | 0.258 | 0.093 | NA | 0.306 | 0.123 | NA | 0.118 | 0.153 |
| 13 | 12.6048 | 12.1484 | 14.1534 | 12.2006 | 15.0086 | 13.3284 | 12.6647 | 12.3616 |
| 17 | 1.14 | 1.25 | 1 | 1 | 1.5 | 1 | 1 | 1 |
| 22 | 47.7 | 56.5 | 77.5 | 77.5 | 37 | 61 | 52.3 | 35.4 |
| 21 | 13.9 | 25.5 | 27.1 | 20.8 | 17.3 | 18.5 | 12 | 8.9 |
| 27 | 14.44 | 8.62 | NA | 15.08 | 9.72 | 11.08 | 9.12 | 10.25 |
| 28 | 13.8 | 17.2 | NA | 17 | 15 | 17.4 | 18 | 15 |
| 34 | 18 | 31.1 | 14.7 | 16.4 | 12.1 | 16.1 | 29 | 11.3 |
| 35 | 1.37 | 1.28 | NA | 1.54 | 1.43 | 1.54 | NA | NA |
| 36 | 0.379 | 0.511 | 0.469 | 0.423 | 0.433 | 0.41 | 0.382 | 0.346 |
| 40 | 77.5 | 81.5 | 68 | 75 | 77 | 74 | 86.3 | 78 |
| 41 | 135.6 | 167.5 | 124.7 | 136 | 133.5 | 122 | 168.7 | 132.3 |
| 44 | 83.1 | 95.7 | 98 | 83 | 85.5 | 84.2 | 92 | 84.7 |
| 46 | 165.1 | 234.9 | 155 | 156.5 | 166.8 | 146.4 | 146.3 | 114 |
| 49 | 1.31 | 2.07 | 1.53 | 1.42 | 1.29 | 1.25 | 1.05 | 0.93 |
| 4 | 42.6 | NA | 45.1 | 53.4 | 44.5 | 36.4 | NA | 39.5 |
| 8 | 34.4 | 49.4 | 51.1 | 49.6 | 38.4 | 37.5 | 32.8 | 39.9 |
| 14 | 67.6 | NA | NA | 51.1 | 96.4 | 101.6 | NA | NA |
| 24 | 1813.9 | NA | 830 | 2257.9 | 2599 | 3084.9 | NA | NA |
| 23 | 0.0702 | 0.0556 | 0.0872 | 0.1026 | 0.0455 | 0.0723 | 0.0463 | 0.0423 |
| 29 | 0.191 | NA | NA | 0.144 | 0.21 | 0.173 | NA | NA |
| 30 | 0.137 | 0.17 | 0.168 | 0.187 | 0.132 | 0.15 | 0.109 | 0.136 |
| 37 | 0.94 | 0.79 | 3.32 | 1.52 | 0.8 | 1.63 | 0.68 | 0.76 |
| 15 | 52.3 | 38.8 | 59.2 | 66.6 | 26.9 | 72.7 | 37 | 20.5 |
| 16 | 0.907 | 0.714 | 1.138 | 1.344 | 0.45 | 1.209 | 0.645 | 0.379 |
| 25 | 0.28 | 0.176 | 0.157 | 0.215 | 0.176 | 0.17 | 0.219 | 0.14 |

Table 247. Provided are the values of each of the parameters (as described above) measured in maize accessions (Line). Growth conditions are specified in the experimental procedure section.

TABLE 248
Measured parameters in Maize Inbred Field A 35K per acre (lines 57-64)

| Correlation | Line | | | | | | | |
|---|---|---|---|---|---|---|---|---|
| ID | Line-57 | Line-58 | Line-59 | Line-60 | Line-61 | Line-62 | Line-63 | Line-64 |
| 60 | 90.4 | 86.2 | 88.8 | 85.2 | NA | 82.6 | NA | 81.9 |
| 5 | NA | NA | NA | NA | 99.2 | NA | 100 | 87 |
| 6 | 19.4 | 18 | 9 | 16.5 | 11.9 | 21.1 | 10 | 12.2 |
| 31 | 2.69 | 3.7 | 3.01 | 5.19 | 4.51 | 3.42 | 3.52 | 7.08 |
| 32 | 182.7 | 248.3 | 241.2 | 332.8 | 202.1 | 249.8 | 180.6 | 228.8 |
| 9 | 176.3 | 235.3 | 222.5 | 332.8 | 186.5 | 237.8 | 164.3 | 211.4 |
| 18 | 0.433 | 0.557 | 0.515 | 0.671 | 0.402 | 0.528 | 0.496 | 0.513 |
| 47 | 5.5 | 12.33 | 3.67 | 8.67 | 8 | 9 | 11.42 | 14.67 |
| 50 | 43.1 | 69.5 | 81.8 | 32.5 | 78.3 | 75.2 | 76.6 | 91.4 |
| 51 | 6.6 | 14.6 | 11.6 | 11.1 | 14.3 | 7.1 | 14.2 | 16.5 |
| 55 | 3.43 | 2.32 | 3.13 | NA | NA | 1.68 | 0.42 | 1.47 |
| 57 | 26.6 | 32.3 | 32.8 | NA | 21.2 | 34.9 | 28.4 | 20.5 |
| 1 | 8.76 | 6.48 | 7.02 | NA | NA | 6.39 | 8.45 | 7.22 |
| 2 | 0.238 | 0.345 | 0.391 | 0.372 | 0.411 | 0.33 | 0.245 | 0.363 |
| 56 | 11.6 | 11.3 | 13.1 | 11.2 | 11.8 | 11.4 | 11.2 | 13.7 |
| 10 | 42.3 | 34.8 | 32.7 | NA | NA | 36.4 | 38.4 | 27.8 |
| 11 | 629.3 | 505.9 | 365.2 | NA | NA | 454.7 | 658.5 | 435.4 |
| 19 | 203.7 | 282.1 | 257.6 | 124.6 | 248.6 | 253.1 | 312 | 316.9 |
| 20 | 26.2 | 38.1 | 28.9 | 29.3 | 32 | 32.6 | 26.4 | 33.6 |
| 26 | 12.7 | 14.3 | 13.2 | 12.2 | 13.9 | 13.2 | 10 | 13.9 |
| 33 | 2.56 | 3.38 | 2.77 | 3.06 | 2.95 | 3.13 | 3.34 | 3.06 |
| 38 | 26.4 | 54.5 | 48.7 | 43 | 56.1 | 41.4 | 36.1 | 61.1 |
| 39 | 23.45 | 10.93 | 12.94 | NA | NA | 11.32 | 4.98 | 3.8 |
| 42 | 24.7 | 52.8 | 47.2 | 42.4 | 53.8 | 39.4 | 34.6 | 60.5 |
| 43 | 23.25 | 10.9 | 12.94 | NA | NA | 11.23 | 4.98 | 3.8 |
| 54 | 3.3 | 4.82 | 4.41 | 4.25 | 4.52 | 3.96 | 4.53 | 5.01 |
| 58 | 2.01 | 1.58 | 1.7 | NA | NA | 1.34 | 1.14 | 0.92 |
| 45 | 2.07 | 3.27 | 3.46 | NA | 5.18 | 2.05 | 3.68 | 3.6 |
| 48 | 9.2 | 14.2 | 14 | 12.7 | 15.7 | 12.7 | 9.9 | 15.4 |
| 52 | 14.8 | 14.5 | 11.2 | NA | NA | 13 | 17.1 | 15.7 |
| 53 | 3.25 | 4.13 | 4.55 | 2.17 | 3.62 | 4.67 | 4.01 | 5.32 |
| 59 | 1.12 | 1.12 | 1.17 | 1 | 1.08 | 1 | 1.01 | 1.26 |
| 61 | 63.2 | 67 | 77.3 | 66.7 | 46 | 76.3 | 51.8 | 39.7 |
| 3 | 41.8 | 60.7 | 69.1 | 32.7 | 60.4 | 68 | 63.1 | 76.8 |
| 7 | 13.7 | 19.5 | 22.4 | NA | NA | 20.2 | 20.9 | 20.2 |
| 12 | 0.178 | NA | NA | 0.102 | 0.128 | 0.179 | 0.267 | NA |
| 13 | 13.0251 | 13.5444 | 14.1593 | 12.8535 | 14.0662 | 14.4775 | 12.3054 | 12.9265 |
| 17 | 1 | 1.33 | 1 | 2 | 1 | 1.33 | 1.08 | 1 |
| 22 | 37.7 | 70.3 | 64.5 | 41 | 53.5 | 57.2 | 59.7 | 75.6 |
| 21 | 31.1 | 28.2 | 11.7 | 73.1 | 19.6 | 13.3 | 17.9 | 14.1 |
| 27 | 8.5 | 8.5 | 8.29 | 9.79 | 10.12 | 7.59 | 10.83 | 10 |
| 28 | 16.2 | 16.5 | 15.5 | 17.8 | 18.1 | 20.4 | 18 | 16.1 |
| 34 | 22.2 | 22 | 28.9 | 20.7 | 16.3 | 21 | 17.8 | 15.2 |
| 35 | 1.46 | 1.31 | 1.52 | NA | NA | 1.56 | 1.32 | 1.44 |
| 36 | 0.387 | 0.392 | 0.379 | 0.355 | 0.378 | 0.469 | 0.352 | 0.509 |
| 40 | 87.5 | 82.3 | 90 | 86.3 | 74.7 | 83.3 | 76.6 | 66 |
| 41 | 156.2 | 161.7 | 171 | 161.7 | 129 | 168.7 | 139.8 | 120.3 |
| 44 | 93 | 94.7 | 93.7 | 95 | 83 | 92.3 | 88 | 80.7 |
| 46 | 152.2 | 171.6 | 181.5 | 161.2 | 153.1 | 158.8 | 147.4 | 174.8 |
| 49 | 0.91 | 1.03 | 1.25 | 1.45 | 1.29 | 1.09 | 1.21 | 2.11 |
| 4 | NA | NA | NA | NA | 46.8 | NA | 35.1 | 45.9 |
| 8 | 32.9 | 38.8 | 40.8 | 35.6 | 41.7 | 29.4 | 38.2 | 42.8 |
| 14 | 100.3 | 102.7 | 105.1 | NA | NA | 108.9 | 46 | 196.2 |
| 24 | 3687.4 | 4097.6 | 4776.2 | NA | 1625.2 | 4305.4 | 3948.8 | 4792.1 |
| 23 | 0.0255 | 0.0848 | 0.0715 | 0.0592 | 0.0674 | 0.0449 | 0.0442 | 0.0825 |
| 29 | 0.1 | 0.147 | 0.13 | NA | NA | 0.156 | 0.248 | 0.299 |
| 30 | 0.124 | 0.204 | 0.12 | 0.141 | 0.101 | 0.109 | 0.153 | 0.153 |
| 37 | 0.55 | 1.05 | 0.81 | 0.69 | 1.3 | 0.77 | 1.16 | 2.33 |
| 15 | 33.9 | 68.1 | 59.1 | 32.9 | 58.9 | 30.8 | 37.2 | 67.9 |
| 16 | 0.627 | 1.276 | 0.994 | 0.638 | 0.987 | 0.552 | 0.759 | 1.185 |
| 25 | 0.352 | 0.218 | 0.146 | 0.818 | 0.205 | 0.13 | 0.165 | 0.138 |

Table 248. Provided are the values of each of the parameters (as described above) measured in maize accessions (Line). Growth conditions are specified in the experimental procedure section.

TABLE 249
Measured parameters in Maize Inbred Field A 35K per acre (lines 65-72)

| Correlation | Line | | | | | | | |
|---|---|---|---|---|---|---|---|---|
| ID | Line-65 | Line-66 | Line-67 | Line-68 | Line-69 | Line-70 | Line-71 | Line-72 |
| 60 | NA | NA | NA | 80.3 | NA | 83.6 | 82.2 | NA |
| 5 | NA | 96.3 | 60.6 | 86.3 | NA | 100 | 100 | 82.4 |
| 6 | 14.4 | 23.8 | 14.6 | 15.6 | 21.2 | 24 | 19.3 | 14.5 |
| 31 | 5.34 | 2.12 | 5.36 | 3.23 | 4.97 | 4.38 | 5.03 | 3.57 |
| 32 | 277.6 | 78.3 | 198.3 | 168.1 | 193.9 | 220.1 | 206.8 | 152.8 |
| 9 | 282.9 | 57.6 | 191.6 | 149.8 | 178.1 | 184.9 | 185.7 | 134.1 |
| 18 | 0.618 | 0.217 | 0.455 | 0.377 | 0.42 | 0.521 | 0.434 | 0.378 |
| 47 | 11.25 | 10.5 | 14 | 3 | 11.75 | 7.75 | 4 | 5.5 |
| 50 | 71.8 | 143.5 | 79.9 | 112.3 | 82.1 | 87.8 | 66.6 | 125.4 |
| 51 | 13.1 | 17.4 | 10.8 | 23.2 | 21.1 | 17.8 | 15.2 | 18.5 |
| 55 | 0.92 | NA | 1.36 | 0.83 | 0.66 | 0.74 | NA | 1.68 |
| 57 | 28.7 | NA | 31.8 | 32.3 | 38.5 | 29 | NA | 27.8 |
| 1 | 3.74 | NA | 3.19 | 5.21 | 6.92 | 6.78 | NA | 3.66 |
| 2 | 0.286 | 0.512 | 0.534 | 0.353 | 0.327 | 0.517 | 0.335 | 0.499 |
| 56 | 13.5 | 15 | 12.6 | 13.3 | 12.8 | 12.9 | 11.9 | 11 |
| 10 | 42.4 | NA | NA | 24.8 | 34.5 | 38 | NA | 35.5 |
| 11 | 445.4 | NA | NA | 355.4 | 459.6 | 797 | NA | 625.5 |
| 19 | 245.5 | 514.7 | 244.9 | 353.4 | 267.7 | 229.1 | 248.7 | 476.9 |
| 20 | 35.7 | 42.1 | 33.2 | 35.9 | 26.7 | 34.8 | 35.9 | 34.2 |
| 26 | 17.1 | 16.2 | 14.9 | 14.7 | 12.4 | 12.9 | 14 | 14.6 |
| 33 | 2.66 | 3.27 | 2.85 | 3.11 | 2.73 | 3.43 | 3.21 | 2.98 |
| 38 | 55.2 | 69.2 | 55.8 | 58 | 46.7 | 53.1 | 50.5 | 61.8 |
| 39 | 11.14 | NA | 10.12 | 7.51 | 5.88 | 9.09 | NA | 13.86 |
| 42 | 53.4 | 61.9 | 48.5 | 55.8 | 44.8 | 48 | 46 | 60.8 |
| 43 | 11.14 | NA | 10.12 | 7.51 | 5.88 | 9.08 | NA | 13.85 |
| 54 | 4.23 | 4.74 | 4.24 | 4.41 | 4.28 | 4.98 | 4.34 | 4.86 |
| 58 | 1.29 | NA | 1.33 | 1.16 | 1.13 | 1.32 | NA | 1.86 |
| 45 | 2.74 | NA | 2.51 | 5.6 | 4.25 | 4.38 | NA | 4.54 |
| 48 | 16.5 | 18.4 | 16.7 | 16.7 | 13.9 | 13.5 | 14.8 | 16.1 |
| 52 | 10.6 | NA | 18.2 | 13.5 | 13.3 | 21 | NA | 17.7 |
| 53 | 5.18 | 4.96 | 5.29 | 7.33 | 4.43 | 7.88 | 4.33 | 6.43 |
| 59 | 1.09 | 1 | 1.5 | 1.06 | 1.48 | 1 | 1.12 | 1.69 |
| 61 | 53.5 | 39 | 43.2 | 52.8 | 44 | 51.5 | 42 | 49 |
| 3 | 57.6 | 85.4 | 74.5 | 86.3 | 68.2 | 48 | 53.7 | 94.8 |
| 7 | 23.4 | NA | 13.9 | 29.4 | 19.4 | 12.9 | NA | 27.4 |
| 12 | 0.346 | 0.099 | 0.165 | 0.269 | 0.174 | 0.114 | 0.167 | NA |
| 13 | 13.9317 | 15.0363 | 12.9732 | 13.5166 | 12.3814 | 14.2434 | 12.0391 | 13.1738 |
| 17 | 1.25 | 1 | 1 | 1 | 1 | 2 | 1 | 1 |
| 22 | 81.4 | 44.2 | 49 | 63.5 | 54.2 | 53.3 | 55.6 | 80 |
| 21 | 17.8 | 25.1 | 20.5 | 18.7 | 11.9 | 41.9 | 19 | 20.2 |
| 27 | 12.83 | 9.56 | 11.97 | 8.63 | 7.83 | 7.46 | 11.8 | 10.12 |
| 28 | 15.8 | 19.5 | 15.7 | 15.7 | 15.7 | 18.3 | 17.6 | 15.9 |
| 34 | 17.6 | 18.6 | 15 | 17.9 | 16.6 | 23.3 | 14.8 | 18.1 |
| 35 | 1.64 | NA | 1.5 | 1.31 | 1.41 | 1.91 | NA | 1.52 |
| 36 | 0.432 | NA | 0.392 | 0.48 | 0.511 | 0.43 | 0.464 | 0.482 |
| 40 | 75 | 77.5 | 76.2 | 79.5 | 74 | 80.5 | 69 | 75.5 |
| 41 | 139.8 | 127 | 133.5 | 135.2 | 129.8 | 139.8 | 116 | 130 |
| 44 | 86.2 | 88 | 90.2 | 82.5 | 85.8 | 88.2 | 74 | 81 |
| 46 | 167.7 | 206.8 | 170.6 | 173 | 151.8 | 187.3 | 139.7 | 164.7 |
| 49 | 1.57 | 1.54 | 1.43 | 1.53 | 1.34 | 1.54 | 1.58 | 1.5 |
| 4 | 41.2 | 50.6 | 46.5 | 41.3 | 41.2 | 49.5 | 45 | 49.2 |
| 8 | 40.3 | 38.8 | 48.7 | 43.8 | 42.4 | 51.8 | 48.2 | 49.2 |
| 14 | 76.4 | NA | 79 | 86.7 | 108.3 | 84.8 | NA | 128.4 |
| 24 | 3036.9 | NA | 2374 | 2943.4 | 2790.4 | 3155.1 | NA | 4360.5 |
| 23 | 0.0866 | 0.0581 | 0.0688 | 0.0787 | 0.0699 | 0.0674 | 0.0594 | 0.0907 |
| 29 | 0.129 | NA | 0.333 | 0.154 | 0.292 | 0.171 | NA | 0.225 |
| 30 | 0.232 | 0.11 | 0.122 | 0.159 | 0.138 | 0.081 | 0.174 | 0.123 |
| 37 | 1.56 | 1.19 | 1.35 | 1.19 | 1.35 | 1.05 | 1.39 | 1.87 |
| 15 | 78.6 | 31.8 | 35 | 56.9 | 53.4 | 50.6 | 55.4 | 56.2 |
| 16 | 1.43 | 0.722 | 0.72 | 1.081 | 0.895 | 0.866 | 0.975 | 1.128 |
| 25 | 0.186 | 0.184 | 0.215 | 0.172 | 0.163 | 0.298 | 0.165 | 0.197 |

Table 249. Provided are the values of each of the parameters (as described above) measured in maize accessions (Line). Growth conditions are specified in the experimental procedure section.

TABLE 250
Measured parameters in Maize Inbred Field A 35K per acre (lines 73-80)

| | Line | | | | | | | |
|---|---|---|---|---|---|---|---|---|
| Correlation | | | | | | | | Line- |
| ID | Line-73 | Line-74 | Line-75 | Line-76 | Line-77 | Line-78 | Line-79 | 80 |
| 60 | NA | NA | 85 | 88.8 | NA | 83.2 | 85.7 | 87.3 |
| 5 | 56.6 | NA | 100 | NA | 100 | NA | 100 | NA |
| 6 | 21.5 | 5.8 | 10 | 21.5 | 10.5 | 15.2 | 6.9 | 26.9 |
| 31 | 4.73 | 5.22 | 3.55 | 3.15 | 3.89 | 3.6 | 3.06 | 3.77 |
| 32 | 185.1 | 225.5 | 199.8 | 167.8 | 198.9 | 201.7 | 160.8 | 291.4 |
| 9 | 166.9 | 194.6 | 183.9 | 154.5 | 188 | 185.8 | 145.4 | 277.7 |
| 18 | 0.443 | 0.491 | 0.473 | 0.465 | 0.485 | 0.46 | 0.371 | 0.556 |
| 47 | 8.25 | 12.67 | 8.25 | 2.5 | 9 | 11.75 | 6 | 6.67 |
| 50 | 112.4 | 51.2 | 73.8 | 60.5 | 91.9 | 89.3 | 95.6 | 34.8 |
| 51 | 21.5 | 19.5 | 15.9 | 16.4 | 16 | 10 | 20.2 | 9.1 |
| 55 | 1.62 | NA | 1.03 | NA | NA | 0.38 | 1.47 | 2.23 |
| 57 | 32.8 | NA | 28.7 | NA | 26.6 | 30.5 | 26.5 | 29.5 |
| 1 | 3.81 | NA | 6.86 | NA | NA | 5.2 | 2.45 | 6.14 |
| 2 | 0.538 | 0.273 | 0.386 | 0.21 | 0.283 | 0.332 | 0.304 | 0.308 |
| 56 | 10 | 12.3 | 9 | 10.5 | 11.1 | 11.9 | 11.8 | 11 |
| 10 | 43 | NA | 31.9 | NA | NA | 22.5 | 40.4 | 32.7 |
| 11 | 677.4 | NA | 763.8 | NA | NA | 353.1 | 703.5 | 318.3 |
| 19 | 371.3 | 333.8 | 402.1 | 254.8 | 320.3 | 321.4 | 409 | 168.8 |
| 20 | 34.4 | 30.3 | 36.2 | 29.2 | 32.6 | 36.2 | 33.9 | 29.3 |
| 26 | 14.8 | 13.8 | 13.2 | 13.1 | 12.6 | 12.9 | 14.1 | 13.5 |
| 33 | 2.95 | 2.79 | 3.5 | 2.83 | 3.28 | 3.56 | 3.06 | 2.78 |
| 38 | 68.9 | 51.8 | 53.7 | 42.4 | 47 | 35.5 | 49.3 | 40.8 |
| 39 | 15.07 | 13.43 | 6.46 | NA | 22.81 | 5.44 | 10.09 | 14.84 |
| 42 | 64.2 | 49.4 | 51.1 | 40.2 | 43.9 | 33.1 | 47.5 | 38.4 |
| 43 | 15.07 | 13.39 | 6.46 | NA | 22.77 | 5.42 | 10.09 | 14.77 |
| 54 | 4.94 | 4.76 | 5.41 | 4.13 | 4.65 | 4.19 | 4.34 | 3.77 |
| 58 | 1.76 | 1.75 | 1.28 | NA | 2.29 | 1.11 | 1.41 | 1.61 |
| 45 | 5.31 | 4.9 | 4.05 | NA | 2.4 | 2.42 | 4.29 | 1.76 |
| 48 | 17.7 | 13.8 | 12.5 | 13 | 12.7 | 10.1 | 14.4 | 13.4 |
| 52 | 14.6 | NA | 23.8 | NA | NA | 15.5 | 17.4 | 9.8 |
| 53 | 5.33 | 2.77 | 4.07 | 3.71 | 5.59 | 4.72 | 6.03 | 2.55 |
| 59 | 1.04 | 1.17 | 1 | 1.06 | 1.04 | 1.12 | 1.25 | 1.14 |
| 61 | 39.5 | 49 | 52.8 | 53.5 | 51.7 | 68.5 | 53 | 78 |
| 3 | 89.7 | 39 | 61.7 | 51.9 | 80.4 | 72.2 | 77 | 31.2 |
| 7 | 25.9 | NA | 15.7 | NA | NA | 26.7 | 22.8 | 17.5 |
| 12 | 0.145 | 0.315 | 0.297 | 0.14 | 0.229 | 0.186 | NA | 0.135 |
| 13 | 12.4493 | 13.0235 | 13.0238 | 12.7792 | 12.4061 | 12.3927 | 14.1154 | NA |
| 17 | 1 | 1 | 1 | 1 | 1 | 1 | 1.25 | 1 |
| 22 | 72.7 | 83.9 | 85.1 | 45.8 | 64.3 | 67.6 | 69.9 | 50.8 |
| 21 | 19.4 | 14.3 | 26.6 | 14.2 | 12.7 | 15.2 | 15.3 | 11.3 |
| 27 | 8.62 | 13 | 11.29 | 8.69 | 9.21 | 8.34 | 12.18 | 7.94 |
| 28 | 17.2 | 18.6 | 18.6 | 15.2 | 19.5 | 20.4 | 18.5 | 15.9 |
| 34 | 16.5 | 16.8 | 22.4 | 16.8 | 18.7 | 22.2 | 18.2 | 22.7 |
| 35 | 1.32 | NA | 1.44 | NA | NA | 1.52 | 1.22 | 1.29 |
| 36 | 0.436 | 0.408 | 0.475 | NA | 0.411 | 0.426 | 0.447 | NA |
| 40 | 76 | 74.7 | 82.2 | 85.5 | 72 | 77.8 | 81.5 | 84.7 |
| 41 | 123.8 | 131 | 143.2 | 141.5 | 132.7 | 158 | 140.5 | 167.5 |
| 44 | 84.2 | 87.3 | 90.5 | 88 | 81 | 89.5 | 87.5 | 91.3 |
| 46 | 153.2 | 155.5 | 119 | 121.2 | 135.3 | 150.8 | 185 | 138.1 |
| 49 | 1.4 | 1.59 | 0.99 | 0.85 | 1.02 | 1.14 | 1.52 | 1.01 |
| 4 | 43 | 52.1 | 40.6 | NA | 30 | 35.6 | NA | NA |
| 8 | 41.5 | 47.6 | 40.7 | 31.6 | 33.5 | 29.6 | 41.7 | 33.6 |
| 14 | 55.7 | NA | 112.9 | NA | NA | 107.9 | 94.5 | 102.6 |
| 24 | 2530.4 | NA | 4824.6 | NA | 2573.4 | 3793.3 | 3043.5 | 3314.4 |
| 23 | 0.0851 | 0.093 | 0.0763 | 0.047 | 0.0644 | 0.0387 | 0.079 | 0.0346 |
| 29 | 0.404 | NA | 0.215 | NA | NA | 0.178 | 0.191 | 0.185 |
| 30 | 0.126 | 0.216 | 0.103 | 0.13 | 0.137 | 0.14 | 0.168 | NA |
| 37 | 1.86 | 1.9 | 1.5 | 0.87 | 1.3 | 1.21 | 1.34 | 0.66 |
| 15 | 66.2 | 81.2 | 56.5 | 37.2 | 63.7 | 51.8 | 66.9 | 35.4 |
| 16 | 1.122 | 1.698 | 1.155 | 0.773 | 1.103 | 0.824 | 1.136 | 0.57 |
| 25 | 0.192 | 0.171 | 0.21 | 0.169 | 0.119 | 0.118 | 0.146 | 0.14 |

Table 250. Provided are the values of each of the parameters (as described above) measured in maize accessions (Line). Growth conditions are specified in the experimental procedure section.

TABLE 251
Measured parameters in Maize Inbred Field A 35K per acre (lines 81-88)

| | Line | | | | | | | |
|---|---|---|---|---|---|---|---|---|
| Correlation | | Line- | | | | | | |
| ID | Line-81 | 82 | Line-83 | Line-84 | Line-85 | Line-86 | Line-87 | Line-88 |
| 60 | 90.7 | 84 | NA | 80.6 | NA | 84.8 | 87.1 | 84.6 |
| 5 | 35.4 | NA | 80.6 | NA | NA | NA | NA | NA |
| 6 | 16.9 | 9.1 | 8.5 | 15.3 | 6.1 | 10.9 | 3.9 | NA |
| 31 | 3.27 | 2.97 | 3.61 | 3.65 | 4.59 | 3.81 | 3.33 | 2.97 |
| 32 | 168.5 | 226 | 189.1 | 212.1 | 247.5 | 215.7 | 270.2 | 243.5 |
| 9 | 149 | 210.1 | 178.4 | 197.2 | 225 | 196.3 | 250.4 | 224.4 |
| 18 | 0.395 | 0.411 | 0.447 | 0.447 | 0.455 | 0.479 | 0.498 | 0.46 |
| 47 | 4.93 | 9.67 | 4.67 | 3.67 | 8 | 8.33 | 3.75 | 6.5 |
| 50 | 65.4 | 26.3 | 71 | 62.2 | 89.3 | 102.3 | 41.7 | 64.8 |
| 51 | 16.9 | 9.1 | 21.3 | 18.7 | 16.9 | 21.4 | 16.2 | NA |
| 55 | 1.81 | NA | 1.47 | 3.29 | 1.06 | NA | 1.7 | 1.95 |
| 57 | 28 | NA | 26.9 | 27.4 | 30.2 | NA | 29.6 | 32.3 |
| 1 | 1.82 | NA | 2.82 | 0.98 | 5.33 | NA | 5.33 | 5.68 |
| 2 | 0.288 | 0.327 | 0.421 | 0.232 | 0.41 | 0.501 | 0.439 | 0.298 |
| 56 | 12 | 10.3 | 13.1 | 13.3 | 11.6 | 12.6 | 12.8 | 10.9 |
| 10 | 39.2 | NA | NA | 38.5 | 35.7 | NA | 34.8 | 21.8 |
| 11 | 821.5 | NA | NA | 655.9 | 537.7 | NA | 372 | 246.4 |
| 19 | 355.9 | 172.2 | 408.6 | 311.1 | 307.1 | 365.9 | 135.9 | 236.9 |
| 20 | 32.9 | 26.6 | 39.8 | 31.6 | 37 | 36.2 | 31.9 | 27.4 |
| 26 | 12.5 | 12.3 | 14.7 | 12.3 | 15.7 | 13.7 | 14.9 | 12.4 |
| 33 | 3.33 | 2.76 | 3.45 | 3.26 | 3 | 3.36 | 2.72 | 2.81 |
| 38 | 46 | 31.1 | 59.7 | 47.9 | 57 | 59.1 | 47.7 | 43.5 |
| 39 | 13.08 | NA | 8.04 | 20.48 | 9.33 | NA | 11.8 | 4.64 |
| 42 | 42.8 | 24.1 | 53.2 | 46.2 | 54.8 | 57.5 | 47.1 | 43 |
| 43 | 13.08 | NA | 8.03 | 20.23 | 9.32 | NA | 11.79 | 4.64 |
| 54 | 4.56 | 3.5 | 4.95 | 4.7 | 4.43 | 4.86 | 3.92 | 4.15 |
| 58 | 1.85 | NA | 1.38 | 2.17 | 1.35 | NA | 1.51 | 0.92 |
| 45 | 4.29 | NA | 5.4 | 4.1 | 3.62 | NA | 4.03 | NA |
| 48 | 12.7 | 11.1 | 15.3 | 12.9 | 16.3 | 15.4 | 15.5 | 13.3 |
| 52 | 19.9 | NA | 17.3 | 17 | 15 | NA | 10.7 | 11.2 |
| 53 | 4.65 | 1.58 | 4.71 | 3.99 | 6.05 | 9.16 | 2.5 | 3.42 |
| 59 | 1.2 | 1.04 | 1.21 | 1 | 1.25 | 1 | 1.66 | 1.38 |
| 61 | 54.2 | 76.3 | 54.3 | 58 | 55.8 | 58.7 | 81.2 | 82 |
| 3 | 54.9 | 22.3 | 62.7 | 52.4 | 73.2 | 83.1 | 34.7 | 54.7 |
| 7 | 19.3 | NA | 23.8 | 18.4 | 20.4 | NA | 12.9 | 21.2 |
| 12 | 0.324 | 0.144 | 0.271 | 0.301 | 0.203 | 0.163 | NA | 0.174 |
| 13 | 13.2978 | NA | 13.4241 | 14.1606 | 12.7096 | 13.5493 | 14.1042 | 12.2705 |
| 17 | 1 | 1 | 1 | 1 | 1 | 1 | 1.25 | 1 |
| 22 | 61 | 41.4 | 80.3 | 69.3 | 78.9 | 83.4 | 38.3 | 60.4 |
| 21 | 15.5 | 14.8 | 19.8 | 14.9 | 21.4 | 49.7 | 21 | 11.1 |
| 27 | 12.12 | 9.23 | 13.17 | 12.42 | 8.58 | 11.08 | 9.66 | NA |
| 28 | 15.3 | 18.7 | 18 | 15.8 | 17.9 | 17 | 15.7 | NA |
| 34 | 18.3 | 13.1 | 17.5 | 19.6 | 20.9 | 28.1 | 26.5 | 22.6 |
| 35 | 1.35 | NA | 1.39 | 1.37 | 1.28 | NA | 1.33 | 1.8 |
| 36 | 0.403 | 0.41 | 0.446 | 0.4 | 0.483 | 0.452 | 0.419 | 0.381 |
| 40 | 78.5 | 80.3 | 77 | 78 | 75 | 83 | 84.2 | 79 |
| 41 | 137.9 | 166.3 | 136 | 139.7 | 138.8 | 150 | 169.2 | 167.5 |
| 44 | 83.4 | 90 | 81.7 | 81.7 | 83 | 91.3 | 88 | 85.5 |
| 46 | 162.8 | 161.6 | 189.8 | 171.4 | 165 | 172.9 | 188.6 | 157.4 |
| 49 | 1.37 | 1.13 | 1.54 | 1.36 | 1.51 | 1.23 | 1.16 | 1.17 |
| 4 | 48.8 | NA | 50 | 47.8 | 33.5 | NA | NA | NA |
| 8 | 44.6 | 33.6 | 51.9 | 39.7 | 34.6 | 43.4 | 43.8 | 33.9 |
| 14 | 76.3 | NA | 111.4 | 121.1 | 83.6 | NA | 111.4 | 114.2 |
| 24 | 2973.6 | NA | 3132.9 | 3106.8 | 3246.3 | NA | 4286.9 | 3380.3 |
| 23 | 0.0704 | 0.0355 | 0.098 | 0.0821 | 0.0878 | 0.097 | 0.0789 | 0.0774 |
| 29 | 0.259 | NA | 0.252 | 0.148 | 0.207 | NA | 0.167 | 0.185 |
| 30 | 0.168 | NA | 0.135 | 0.146 | 0.212 | 0.14 | 0.128 | 0.158 |
| 37 | 1.14 | 0.54 | 1.54 | 1.2 | 1.49 | 1.46 | 0.47 | 0.74 |
| 15 | 66.3 | 24 | 93.3 | 87.5 | 85.4 | 89 | 62.5 | 57.8 |
| 16 | 1.126 | 0.489 | 1.45 | 1.441 | 1.349 | 1.415 | 1.185 | 1.376 |
| 25 | 0.141 | 0.202 | 0.144 | 0.146 | 0.193 | 0.172 | 0.243 | 0.144 |

Table 251. Provided are the values of each of the parameters (as described above) measured in maize accessions (Line). Growth conditions are specified in the experimental procedure section.

TABLE 252
Measured parameters in Maize Inbred Field A 35K per acre (lines 89-96)

| | Line | | | | | | | |
|---|---|---|---|---|---|---|---|---|
| Correlation | | | | | Line- | Line- | | |
| ID | Line-89 | Line-90 | Line-91 | Line-92 | 93 | 94 | Line-95 | Line-96 |
| 60 | 82.6 | 97.4 | 67.1 | 76.4 | NA | 29.5 | NA | NA |
| 5 | 100 | NA | 98.3 | 77.3 | 80.8 | NA | 76.7 | 75.2 |
| 6 | 14.3 | 10 | 25.1 | 7.1 | 16.9 | NA | 5.2 | 15.9 |
| 31 | 3.54 | 4.31 | 5.06 | 6.14 | 9.33 | NA | 8.11 | 5.17 |
| 32 | 185.4 | 290.7 | 154.4 | 196.7 | 232.2 | 123.9 | 240.3 | 213.5 |
| 9 | 173 | 276.2 | 142.2 | 174.5 | 207.7 | 118 | 208.6 | 202.7 |
| 18 | 0.444 | 0.586 | 0.366 | 0.439 | 0.543 | 0.382 | 0.536 | 0.562 |
| 47 | 7.25 | 2 | 20 | 25.67 | 19 | 5.5 | 18.33 | 7.67 |
| 50 | 66.8 | 51.8 | 92.6 | 133.9 | 107.6 | 94.2 | 151 | 90.4 |
| 51 | 7.2 | 29 | 25.2 | 15.2 | 30.1 | NA | 27.7 | 13 |
| 55 | 0.37 | 4.71 | 1.24 | 1.72 | NA | 4.43 | NA | 1.13 |
| 57 | 31.7 | 30.5 | 35.2 | 21.3 | NA | 11.9 | 25.3 | 30.8 |
| 1 | 4.74 | 4.04 | 9.33 | 5.8 | NA | 7.52 | NA | 3.69 |
| 2 | 0.224 | 0.401 | 0.256 | 0.501 | 0.339 | NA | 0.629 | 0.501 |
| 56 | 11.8 | 12.3 | 14.7 | 13.9 | 12.3 | NA | 14.3 | 11.3 |
| 10 | 23.8 | 45 | 45.8 | 32.8 | NA | 41.6 | NA | 43.9 |
| 11 | 349.8 | 528.8 | 571.9 | 480.2 | NA | 666 | NA | 622.3 |
| 19 | 243.3 | 204.5 | 442.2 | 493 | 336.2 | 362.1 | 525.4 | 345.7 |
| 20 | 30.8 | 26 | 34.2 | 46 | 31.6 | 25.5 | 45.2 | 32.2 |
| 26 | 13.2 | 12.3 | 15.6 | 18.3 | 13.5 | 11.3 | 17.7 | 13.2 |
| 33 | 2.96 | 2.69 | 2.76 | 3.2 | 2.95 | 2.86 | 3.24 | 3.09 |
| 38 | 44.2 | 45.1 | 58.7 | 81 | 54.7 | 42.6 | 78.2 | 58.5 |
| 39 | 4.57 | 19.88 | 10.83 | 6.63 | NA | 8.7 | 22.79 | 6.7 |
| 42 | 41.5 | 43.4 | 54.5 | 79.8 | 53.7 | 42.6 | 76.9 | 56.1 |
| 43 | 4.57 | 19.88 | 10.83 | 6.63 | NA | 8.69 | 22.79 | 6.7 |
| 54 | 4.1 | 4.21 | 3.9 | 4.96 | 4.76 | 3.86 | 5.25 | 4.89 |
| 58 | 1.02 | 2.11 | 1.23 | 1.14 | NA | 1.37 | 2.24 | 1.2 |
| 45 | 1.83 | 8.84 | 5.21 | 3.03 | NA | NA | 6.66 | 2.45 |
| 48 | 13.6 | 13.6 | 18.9 | 20.8 | 14.6 | 14 | 18.8 | 15.2 |
| 52 | 14.7 | 11.8 | 12.5 | 14.7 | NA | 16 | NA | 14.2 |
| 53 | 4 | 3.32 | 4.92 | 7.58 | 5.87 | 4.24 | 7.14 | 4.9 |
| 59 | 1.09 | 1.94 | 1.08 | 1.29 | 1.17 | NA | 1.5 | 1.46 |
| 61 | 53 | 67.5 | 31 | 30 | 27 | NA | 36 | 41.3 |
| 3 | 56.5 | 45.2 | 74.3 | 99.6 | 83.9 | 85.2 | 108.4 | 81 |
| 7 | 15.5 | 17.4 | 24.6 | 34 | NA | 22.6 | NA | 24.4 |
| 12 | 0.195 | NA | 0.323 | NA | NA | NA | NA | 0.251 |
| 13 | 13.2001 | 13.8804 | 12.5828 | 13.1474 | 12.729 | NA | 12.4465 | 12.9323 |
| 17 | 1.25 | 1.5 | 1 | 1 | 1 | NA | 1 | 1 |
| 22 | 44.5 | 60.9 | 69.7 | 104.6 | 82.3 | 46.1 | 141.6 | 75.7 |
| 21 | 12.4 | 13.2 | 1.8 | 19 | 14.4 | 9 | 51.7 | 16.2 |
| 27 | 7.83 | 9.12 | 11.12 | 9.28 | 10.21 | NA | 10.82 | 10 |
| 28 | 18.1 | 16.1 | 17.9 | 18 | 15.4 | NA | 16.9 | 17.9 |
| 34 | 17.2 | 25.1 | 13.2 | 16.2 | 15.1 | 8.4 | 18.5 | 14.7 |
| 35 | 1.33 | 1.36 | 1.55 | 1.88 | NA | 1.58 | NA | 1.99 |
| 36 | 0.469 | NA | 0.511 | 0.339 | 0.349 | NA | 0.348 | 0.409 |
| 40 | 79.5 | 91 | 68 | 67.3 | 74 | 61.5 | 74.7 | 74 |
| 41 | 139.8 | 160.5 | 119 | 123 | 120 | NA | 129 | 123 |
| 44 | 86.8 | 93 | 88 | 93 | 93 | 67 | 93 | 81.7 |
| 46 | 166 | 187.6 | 153.6 | 155.2 | 135.1 | NA | 150.5 | 163.2 |
| 49 | 1.17 | 0.99 | 1.69 | 1.44 | 0.96 | 1.59 | 1.55 | 1.41 |
| 4 | 38 | NA | 48.5 | 41.2 | 43.5 | NA | 40.1 | 37 |
| 8 | 33.2 | 45.8 | 34.6 | 40.1 | 44.5 | NA | 36.5 | 29.1 |
| 14 | 54.5 | 100.9 | 142.7 | 177.6 | NA | 111.4 | NA | 103.5 |
| 24 | 3241.7 | 4886 | 3167 | 4655.7 | NA | 1836.3 | 1911.3 | 3050.1 |
| 23 | 0.0543 | 0.1053 | 0.0533 | 0.1242 | 0.0921 | NA | 0.1404 | 0.0791 |
| 29 | 0.165 | 0.168 | 0.15 | 0.258 | NA | NA | NA | 0.114 |
| 30 | 0.174 | 0.146 | 0.165 | 0.189 | 0.175 | NA | 0.177 | 0.116 |
| 37 | 0.84 | 0.9 | 2.23 | 3.37 | 3.4 | NA | 4.9 | 1.83 |
| 15 | 62.6 | 69.8 | 35.9 | 84 | 68.2 | 6.1 | 75.9 | 46.6 |
| 16 | 1.009 | 1.268 | 0.736 | 1.621 | 1.152 | 0.111 | 1.28 | 0.972 |
| 25 | 0.136 | 0.191 | 0.242 | 0.129 | 0.159 | 0.124 | 0.151 | 0.164 |

Table 252. Provided are the values of each of the parameters (as described above) measured in maize accessions (Line). Growth conditions are specified in the experimental procedure section.

TABLE 253
Measured parameters in Maize Inbred Field A 35K per acre (lines 97-104)

| | Line | | | | | | | |
|---|---|---|---|---|---|---|---|---|
| Correlation | | | | Line- | Line- | Line- | Line- | Line- |
| ID | Line-97 | Line-98 | Line-99 | 100 | 101 | 102 | 103 | 104 |
| 60 | 86.8 | NA | 77.6 | 82.5 | 81 | 80.5 | 76.8 | NA |
| 5 | NA | NA | 100 | 68.4 | NA | NA | 87.2 | NA |
| 6 | 15.6 | 16.4 | 19.7 | 19.1 | 7.7 | 26.6 | 19.3 | 18.6 |
| 31 | 3.29 | 3.91 | 4.61 | 6.35 | 4.94 | 4.41 | 3.88 | 4.66 |
| 32 | 179.9 | 225.8 | 128.6 | 298.8 | 249.1 | 228.7 | 145.3 | 268.8 |
| 9 | 166 | 213.9 | 112.3 | 290.5 | 231.6 | 220.2 | 140.6 | 248.1 |
| 18 | 0.418 | 0.464 | 0.295 | 0.544 | 0.479 | 0.535 | 0.365 | 0.549 |
| 47 | 5.67 | 9.33 | 17.5 | 16.25 | 11.67 | 4 | 10 | 6.75 |
| 50 | 57.7 | 91.3 | 116.1 | 36.3 | 52.9 | 76.3 | 89 | 81.9 |
| 51 | 14.8 | 15.6 | 19.2 | 13.4 | 10.3 | 21.7 | 10.7 | 15.7 |
| 55 | 0.42 | 1.38 | 2.07 | NA | 0.72 | 2.1 | NA | 3.09 |
| 57 | 33.2 | 36.7 | 31.2 | NA | 31.6 | 28.9 | NA | 29.3 |
| 1 | 4.92 | 7.11 | 4.65 | NA | 8.34 | 1.44 | NA | 5.55 |
| 2 | 0.259 | 0.25 | 0.219 | 0.347 | 0.232 | 0.203 | 0.3 | 0.426 |
| 56 | 11.6 | 15 | 13.7 | 13.3 | 10 | NA | 11.3 | 13.2 |
| 10 | 29.8 | 34.5 | NA | NA | 36.2 | 42.3 | NA | 40.3 |
| 11 | 497.2 | 551.8 | NA | NA | 468.3 | 613.6 | NA | 564.4 |
| 19 | 264.6 | 356.4 | 344.7 | 107.5 | 219.5 | 272.9 | 300.8 | 299.7 |
| 20 | 35.5 | 44.4 | 25.9 | 28.7 | 27 | 29.4 | 30.5 | 32.4 |
| 26 | 13.6 | 17.7 | 13.4 | 13 | 13.4 | 11.3 | 14 | 14 |
| 33 | 3.33 | 3.17 | 2.45 | 2.82 | 2.56 | 3.29 | 2.78 | 2.83 |
| 38 | 43.5 | 50.8 | 46.2 | 37.8 | 42.9 | 45.9 | 49.5 | 58.1 |
| 39 | 5.84 | 12.7 | 12.37 | NA | 7.73 | 12.55 | NA | 18.61 |
| 42 | 41.2 | 47.1 | 46.1 | 30.3 | 40 | 43.7 | 46.7 | 56.1 |
| 43 | 5.84 | 12.67 | 12.36 | NA | 7.72 | 12.55 | NA | 18.54 |
| 54 | 4.25 | 4.18 | 3.92 | 3.53 | 3.9 | 4.8 | 3.98 | 4.66 |
| 58 | 1.18 | 1.51 | 1.55 | NA | 1.05 | 1.71 | NA | 1.89 |
| 45 | 3.83 | 3.18 | 4.53 | NA | 2.43 | 5.59 | NA | 3.36 |
| 48 | 12.6 | 15.2 | 14.9 | 13.5 | 13.9 | 12.1 | 15.6 | 15.7 |
| 52 | 16.8 | 16 | 16.5 | NA | 12.9 | 14.5 | NA | 14.5 |
| 53 | 3.62 | 6.27 | 6.59 | 2.85 | 3.85 | 6.37 | 5 | 4.97 |
| 59 | 1.38 | 1 | 1.19 | 1.06 | 1.04 | 1.04 | 1.25 | 1.12 |
| 61 | 55 | 55.7 | 29 | 43.5 | 50.7 | 55.3 | 38 | 57.8 |
| 3 | 48.2 | 81.7 | 89.1 | 34.5 | 45.5 | 70.6 | 81.5 | 69.7 |
| 7 | 16.1 | 17.2 | 22.1 | NA | 17.1 | 19 | NA | 23.6 |
| 12 | 0.159 | 0.301 | 0.205 | 0.088 | 0.246 | 0.3 | 0.213 | 0.176 |
| 13 | 13.7464 | 14.0444 | 13.6673 | 12.9128 | 14.5337 | 12.1276 | 13.0667 | 13.0934 |
| 17 | 1 | 1 | 1 | 1 | 1 | 1.33 | 1.25 | 1.25 |
| 22 | 45.4 | 80.7 | 47 | 29.4 | 56.8 | 64 | 44.4 | 83.9 |
| 21 | 42.9 | 20.2 | 11.7 | 11.2 | 8.8 | 19.7 | 12.2 | 24.5 |
| 27 | 10.71 | 9.92 | 10.15 | 12.71 | 6.96 | 12.75 | 12.12 | 12.29 |
| 28 | 17.3 | 16.7 | 15 | 16.5 | 18.4 | 18.2 | 15.7 | 16.5 |
| 34 | 15.3 | 18.2 | 13.2 | 11.9 | 17 | 22.1 | 15 | 19.8 |
| 35 | 1.23 | 1.47 | 1.25 | NA | 1.37 | 1.09 | NA | 1.36 |
| 36 | 0.416 | 0.353 | 0.442 | 0.464 | 0.307 | 0.489 | 0.349 | 0.472 |
| 40 | 79 | 77 | 72.5 | 72 | 79.7 | 79 | 78.2 | 76.2 |
| 41 | 139.7 | 142 | 119 | 131.8 | 142 | 138.3 | 126.2 | 140.8 |
| 44 | 84.7 | 86.3 | 90 | 88.2 | 91.3 | 83 | 88.2 | 83 |
| 46 | 169.3 | 168.5 | 159.4 | 168.1 | 123.3 | NA | 154.4 | 201 |
| 49 | 1.63 | 1.32 | 1.52 | 1.39 | 1.34 | 1.37 | 1.07 | 1.93 |
| 4 | 37 | 40.3 | 47.2 | 47.6 | 43.5 | 46.3 | 42 | 45.2 |
| 8 | 29.9 | 39.6 | 42 | 45.2 | 37.2 | 45.3 | 40.7 | 38 |
| 14 | 70.5 | 107.1 | 120.5 | NA | 106.5 | 118.8 | NA | 89 |
| 24 | 4002.8 | 3384.9 | 2610.4 | NA | 3411.6 | 3205.5 | NA | 3312 |
| 23 | 0.0675 | 0.0549 | 0.0556 | 0.0327 | 0.0601 | 0.0674 | 0.0497 | 0.1129 |
| 29 | 0.176 | 0.149 | 0.195 | NA | 0.14 | 0.175 | NA | 0.211 |
| 30 | 0.149 | 0.134 | 0.18 | 0.107 | 0.147 | 0.168 | 0.135 | 0.17 |
| 37 | 0.82 | 1.41 | 1.71 | 0.65 | 1.13 | 1.25 | 1.2 | 1.46 |
| 15 | 32.1 | 74.5 | 28.2 | 22 | 43.8 | 71.3 | 45.9 | 72.7 |
| 16 | 0.514 | 1.364 | 0.501 | 0.36 | 0.854 | 1.16 | 0.784 | 1.182 |
| 25 | 0.364 | 0.145 | 0.183 | 0.133 | 0.123 | 0.207 | 0.146 | 0.324 |

Table 253. Provided are the values of each of the parameters (as described above) measured in maize accessions (Line). Growth conditions are specified in the experimental procedure section.

TABLE 254
Measured parameters in Maize Inbred Field A 35K per acre (lines 105-112)

| Line/Correlation | Line- | Line- | Line- | Line- | Line- | Line- | Line- | Line- |
|---|---|---|---|---|---|---|---|---|
| ID | 105 | 106 | 107 | 108 | 109 | 110 | 111 | 112 |
| 60 | 76.2 | NA | 74.3 | 80.2 | 82.7 | NA | NA | NA |
| 5 | NA | 53.6 | 99.5 | 63 | NA | NA | NA | NA |
| 6 | 11.7 | 12.2 | 3.1 | 22.5 | 6.8 | 5.1 | 15.5 | 11.8 |
| 31 | 2.93 | 5.64 | 4.95 | 3.45 | 4.67 | 3.36 | 3.8 | NA |
| 32 | 156 | 242.6 | 202.6 | 135.1 | 251.7 | 263.8 | 226.3 | NA |
| 9 | 153.7 | 228.8 | 185.9 | 120 | 245.9 | 236.6 | 216.5 | NA |
| 18 | 0.314 | 0.517 | 0.54 | 0.262 | 0.521 | 0.53 | 0.427 | NA |
| 47 | 11.25 | 7 | 11 | 8.5 | 9.67 | 9.33 | 14 | 10.5 |
| 50 | 70.3 | 93.7 | 135.5 | 77.3 | 45.9 | 60.4 | 41.5 | NA |
| 51 | 12.9 | 15.5 | 21.7 | 12.2 | 6.4 | 14 | 13 | 9.5 |
| 55 | 1.6 | NA | NA | NA | 0.58 | 0.65 | 2.19 | 0.44 |
| 57 | 29.9 | NA | NA | NA | 29.8 | 29.6 | 22.4 | 29.9 |
| 1 | 11.91 | NA | NA | NA | 6.68 | 3.26 | 5.05 | 3.66 |
| 2 | 0.226 | 0.533 | 0.411 | 0.461 | 0.315 | 0.353 | 0.2 | 0.28 |
| 56 | 11.7 | 12.2 | 12.8 | 12.8 | 12 | 14.4 | 12.8 | 12.4 |
| 10 | 39.2 | NA | NA | NA | 36.6 | NA | NA | 28.4 |
| 11 | 548 | NA | NA | NA | 390.6 | NA | NA | 401.8 |
| 19 | 250.4 | 327.9 | 516.8 | 278.2 | 193.6 | 233.9 | 144.3 | NA |
| 20 | 34.4 | 35.1 | 40 | 27.9 | 20.6 | 32.1 | 31.1 | 35.3 |
| 26 | 17.8 | 15.3 | 15.6 | 13.4 | 11.1 | 14.6 | 14.1 | 15.4 |
| 33 | 2.46 | 2.91 | 3.25 | 2.65 | 2.35 | 2.79 | 2.75 | 2.92 |
| 38 | 49.3 | 62 | 72.7 | 39.7 | 44.9 | 53.2 | 43.1 | 38.5 |
| 39 | 11.21 | NA | NA | NA | 5.78 | 9.66 | NA | 4.97 |
| 42 | 46.7 | 60.3 | 67.4 | 39.1 | 44.1 | 45.4 | 39.1 | 32.9 |
| 43 | 11.2 | NA | NA | NA | 5.77 | 9.65 | NA | 4.97 |
| 54 | 3.41 | 4.56 | 5.29 | 3.53 | 4.02 | 4.37 | 3.69 | 3.81 |
| 58 | 1.32 | NA | NA | NA | 0.89 | 1.32 | NA | 1.01 |
| 45 | 3.19 | NA | NA | NA | 1.65 | 3.56 | 3.33 | 2.6 |
| 48 | 18.4 | 17.3 | 17.5 | 14.1 | 14.1 | 15.5 | 14.8 | 12.7 |
| 52 | 14 | NA | NA | NA | 10.8 | 11.2 | 16.2 | 14.2 |
| 53 | 6.1 | 6.02 | 8.05 | 5.77 | 2.97 | 3.27 | 2.44 | NA |
| 59 | 1.41 | 1.25 | 1.44 | 1.34 | 1 | 1 | 1 | 1 |
| 61 | 54 | 43.3 | 44.5 | 42.8 | 52.3 | 81.7 | 51.5 | 55 |
| 3 | 63.6 | 83.2 | 111.5 | 60.9 | 43.9 | 47.9 | 36.7 | NA |
| 7 | 17.3 | NA | NA | NA | 16.8 | 21.8 | 8.1 | NA |
| 12 | 0.286 | NA | NA | NA | 0.161 | 0.202 | 0.205 | 0.078 |
| 13 | 12.296 | 12.953 | 11.9592 | 12.3858 | 14.6698 | 13.0298 | 13.8831 | 13.8157 |
| 17 | 2 | 1 | 1 | 1.25 | 1 | 1 | 1 | 1 |
| 22 | 40.7 | 82.2 | 109.6 | 39.6 | 49.3 | 66.3 | 31.7 | 25.2 |
| 21 | 19.7 | 15.3 | 21.9 | 14.5 | 8.8 | 19.4 | 15 | 12.1 |
| 27 | 12.31 | 13.42 | 11.38 | 9.9 | 8.75 | 10.62 | 11.29 | 8.83 |
| 28 | 13.9 | 15.7 | 17.4 | 13.5 | 14.9 | 16 | 17.6 | 17.1 |
| 34 | 15.6 | 17.8 | 15.6 | 12.8 | 18.1 | 21.4 | 15.6 | 15.9 |
| 35 | 1.85 | NA | NA | NA | 1.7 | 1.6 | 1.24 | 1.56 |
| 36 | 0.459 | 0.428 | 0.322 | 0.427 | 0.499 | 0.322 | NA | 0.353 |
| 40 | 79 | 74 | 68 | 79.5 | 80.3 | 75.3 | 76.3 | 77.5 |
| 41 | 144.2 | 124.3 | 123.5 | 130.8 | 142.3 | 166.3 | 139.5 | 143 |
| 44 | 90.2 | 81 | 79 | 88 | 90 | 84.7 | 90.3 | 88 |
| 46 | 139.9 | 164.8 | 167 | 182 | 182.4 | 164.3 | 142.9 | 147.9 |
| 49 | 1.1 | 1.3 | 1.73 | 1.43 | 1.37 | 1.22 | 0.96 | 1.19 |
| 4 | 36.4 | 43.1 | 44.1 | 36.7 | 33.5 | 42.8 | 43 | 47.5 |
| 8 | 33 | 40.1 | 46.8 | 33.5 | 33.5 | 34 | 42 | 44.8 |
| 14 | 97.7 | NA | NA | NA | 103.1 | 63.1 | 76.5 | 139.8 |
| 24 | 3129.2 | NA | NA | NA | 3218.6 | 2656 | 2174.1 | 4366.5 |
| 23 | 0.0583 | 0.0966 | 0.1218 | 0.0473 | 0.0573 | 0.0777 | 0.0437 | 0.0327 |
| 29 | 0.115 | NA | NA | NA | 0.143 | 0.232 | 0.16 | 0.184 |
| 30 | 0.112 | 0.156 | 0.202 | 0.156 | 0.129 | 0.105 | 0.139 | 0.107 |
| 37 | 0.77 | 1.91 | 2.7 | 1.06 | 0.92 | 0.84 | 0.68 | NA |
| 15 | 29.2 | 66.5 | 69.8 | 28.3 | 35.7 | 80.2 | 32.1 | 33.2 |
| 16 | 0.548 | 1.064 | 1.543 | 0.44 | 0.542 | 1.495 | 0.574 | 0.586 |
| 25 | 0.226 | 0.149 | 0.198 | 0.201 | 0.181 | 0.218 | 0.172 | 0.117 |

Table 254. Provided are the values of each of the parameters (as described above) measured in maize accessions (Line). Growth conditions are specified in the experimental procedure section.

TABLE 255
Measured parameters in Maize Inbred Field A 35K per acre
(lines 113-117)

| Line/ | | | | | |
|---|---|---|---|---|---|
| Correlation | | | | | |
| ID | Line-113 | Line-114 | Line-115 | Line-116 | Line-117 |
| 60 | 85.1 | 86.2 | NA | 70.6 | NA |
| 5 | NA | 92.4 | NA | 100 | 83.6 |
| 6 | NA | 3.2 | 2.8 | NA | 23.1 |
| 31 | 4.58 | 4.86 | 4.27 | 3.62 | 4.83 |
| 32 | 261 | 237.6 | 273.3 | 175.9 | 202.2 |
| 9 | 243.3 | 219.3 | 245.4 | 160.1 | 189 |
| 18 | 0.526 | 0.493 | 0.54 | 0.394 | 0.437 |
| 47 | 6.5 | 3 | 9.67 | 4.33 | 9 |
| 50 | 105.2 | 67.7 | 58.9 | 116.8 | 84.9 |
| 51 | NA | 19.7 | 19.1 | NA | 19.8 |
| 55 | NA | 1.29 | NA | 3.11 | 1.44 |
| 57 | NA | 23.2 | NA | 13.9 | 30.7 |
| 1 | NA | 2.54 | NA | 6.27 | 6.86 |
| 2 | 0.35 | 0.353 | 0.243 | 0.295 | 0.499 |
| 56 | 11.1 | 11.7 | 13.7 | 13.4 | 11.9 |
| 10 | NA | 42.2 | NA | 30.1 | 33.6 |
| 11 | NA | 522 | NA | 451.3 | 521.2 |
| 19 | 410.9 | 216.4 | 241.9 | 308.1 | 344.6 |
| 20 | 52.5 | 33.5 | 29.8 | 33.4 | 32.5 |
| 26 | 21.1 | 14.5 | 13.6 | 15.5 | 14.6 |
| 33 | 3.17 | 2.93 | 2.79 | 2.73 | 2.83 |
| 38 | 52.1 | 63.8 | 47.4 | 57.7 | 59.3 |
| 39 | NA | 12.99 | NA | 12.48 | 11.49 |
| 42 | 50.7 | 62.8 | 45.1 | 56.1 | 56.3 |
| 43 | NA | 12.99 | NA | 12.47 | 11.48 |
| 54 | 3.8 | 4.52 | 4.35 | 4.11 | 4.67 |
| 58 | NA | 1.42 | NA | 1.52 | 1.63 |
| 45 | NA | 5.27 | NA | 4.59 | 3.12 |
| 48 | 16.8 | 17.9 | 13.8 | 17.8 | 16 |
| 52 | NA | 12 | NA | 14.5 | 15.8 |
| 53 | 9.37 | 4.61 | 3.91 | 6.63 | 5.39 |
| 59 | 1 | 1 | 1 | 1.46 | 1.19 |
| 61 | 56 | 51.3 | 65.7 | 48.7 | 39.7 |
| 3 | 90.8 | 58 | 46.9 | 94.2 | 71.7 |
| 7 | NA | 10.5 | NA | 21.7 | 20.5 |
| 12 | 0.317 | 0.194 | 0.293 | NA | 0.134 |
| 13 | 13.6167 | 13.1699 | 13.7009 | 12.7458 | 13.3004 |
| 17 | 1 | 1 | 1 | 1.33 | 1.25 |
| 22 | 111.7 | 53.4 | 70.9 | 55.7 | 68.7 |
| 21 | 39.3 | 35.2 | 18.8 | 24.9 | 23.2 |
| 27 | NA | 11.42 | 12.17 | NA | 11 |
| 28 | NA | 17.8 | 16.1 | NA | 21.5 |
| 34 | 18.1 | 18 | 19.2 | 14.9 | 16.6 |
| 35 | NA | 1.27 | NA | 1.79 | 1.56 |
| 36 | NA | 0.466 | 0.384 | 0.372 | 0.436 |
| 40 | 79 | 78 | 72.7 | 63 | 73 |
| 41 | 141.5 | 132.3 | 148 | 116 | 122 |
| 44 | 85.5 | 81 | 82.3 | 67.3 | 82 |
| 46 | 141.1 | 165.3 | 156.6 | 151.5 | 141.2 |
| 49 | 1.25 | 1.18 | 1.2 | 2.08 | 1.3 |
| 4 | NA | 43.8 | 42.9 | NA | 43 |
| 8 | 48.2 | 38.5 | 37.3 | 36.9 | 44.1 |
| 14 | NA | 81.9 | NA | 170.8 | 126.5 |
| 24 | NA | 2303 | NA | 3552.7 | 3966.9 |
| 23 | 0.0681 | 0.0994 | 0.0775 | 0.0837 | 0.0872 |
| 29 | NA | 0.258 | NA | 0.178 | NA |
| 30 | 0.08 | 0.189 | 0.119 | 0.163 | 0.113 |
| 37 | 1.96 | 1.04 | 1.1 | 1.15 | 1.88 |
| 15 | 41.3 | 84.3 | 78.5 | 48.4 | 57.8 |
| 16 | 1.225 | 1.441 | 1.567 | 1.001 | 1.102 |
| 25 | 0.256 | 0.358 | 0.228 | 0.284 | 0.253 |

Table 255. Provided are the values of each of the parameters (as described above) measured in maize accessions (Line). Growth conditions are specified in the experimental procedure section.

TABLE 256
Measured parameters in Maize Inbred Field B 35K per acre (lines 1-8)

| Line/Correlation ID | Line-1 | Line-2 | Line-3 | Line-4 | Line-5 | Line-6 | Line-7 | Line-8 |
|---|---|---|---|---|---|---|---|---|
| 5 | 77.2 | 77.2 | 74.7 | 81.6 | 73.3 | NA | 89.7 | 75.3 |
| 9 | 89.5 | 100 | 87.2 | 92.9 | 98.8 | 98.8 | 95.5 | 94 |
| 10 | 24.3 | 17.5 | 9.2 | NA | 2.3 | NA | 6.8 | NA |
| 24 | 5.72 | 6.44 | 4.4 | 5.05 | 6.13 | 5.22 | 6.12 | 6.73 |
| 27 | 248.8 | 180.3 | 219.6 | 208.5 | 226.9 | 160.5 | 221.2 | 247.2 |
| 14 | 231.5 | 156.5 | 185.6 | 180.9 | 194.7 | 142.7 | 191.1 | 211.9 |
| 18 | 0.522 | 0.428 | 0.547 | 0.414 | 0.474 | 0.409 | 0.481 | 0.521 |
| 35 | 6.3 | 22 | 6 | 14 | 16 | 26 | 13.3 | 14 |
| 36 | 74.3 | 89.3 | 88.5 | 45.8 | 59.5 | 134.3 | 93.2 | 107.7 |
| 39 | 30.4 | 17.9 | 26.3 | NA | 16.1 | NA | 28.7 | NA |
| 40 | 3.46 | 4.88 | 4.23 | NA | 1.55 | 0.54 | NA | NA |
| 42 | 169.7 | 82 | 115.6 | NA | 177.3 | 205.7 | NA | NA |
| 48 | 1.97 | 7.6 | 6.64 | NA | 4.37 | 5.64 | NA | NA |
| 49 | 0.346 | 0.217 | 0.501 | 0.321 | 0.382 | 0.251 | 0.521 | 0.306 |
| 41 | 11.5 | 12.4 | 14.6 | 12.6 | 16.2 | 13.5 | 14.6 | 14 |
| 52 | 32.2 | 29.1 | 41.8 | NA | 38.5 | NA | NA | NA |
| 53 | 460 | 386.4 | 626.1 | NA | 587.1 | NA | NA | NA |
| 56 | 260.8 | 269.2 | 362.2 | 206.3 | 261.3 | 393.5 | 431.5 | 289.9 |
| 57 | 31.6 | 22.1 | 37.2 | 31.8 | NA | 29.2 | 35.2 | 35.6 |
| 59 | 14.49 | 9.84 | 14.56 | 13 | NA | 12.46 | 14.29 | 16.75 |
| 60 | 2.77 | 2.84 | 3.25 | 3.13 | NA | 2.96 | 3.13 | 2.7 |
| 1 | 48.1 | 38.5 | 72.9 | 52.2 | 60.6 | 50.4 | 64.5 | 59.5 |
| 2 | 22.6 | 13 | 9.8 | NA | 16.1 | 7.4 | NA | NA |
| 6 | 47.6 | 38.1 | 68.7 | 48.7 | 55.6 | 49.5 | 62.6 | 58.7 |
| 7 | 22.4 | 12.9 | 9.8 | NA | 16.1 | 7.4 | NA | NA |
| 20 | 4.41 | 4.53 | 5.41 | 4.43 | 5 | 4.7 | 5.24 | 4.23 |
| 21 | 2.28 | 2 | 1.4 | NA | 1.97 | 1.29 | NA | NA |
| 11 | 6.46 | 3 | 4.64 | NA | 3.6 | NA | NA | NA |
| 12 | 13.8 | 10.8 | 17.2 | 15 | 15.4 | 13.6 | 15.6 | 17.9 |
| 15 | 14.2 | 13.3 | 15 | NA | 15.2 | 17.2 | NA | NA |
| 19 | 4.68 | 4.39 | 4.22 | 2.27 | 2.8 | 6.75 | 6.29 | 6.33 |
| 22 | 1.17 | 1.04 | 1 | 1.06 | 1.31 | 1 | 1.46 | 1 |
| 25 | 44.3 | 28 | 50 | 41 | 37 | 31 | 38.3 | 38 |
| 26 | 63.7 | 65.2 | 61.1 | 31 | 42.6 | 104.9 | 67.4 | 73.6 |
| 28 | 18.3 | 20.3 | 24.1 | NA | 17.1 | 22.8 | NA | NA |
| 29 | 0.189 | 0.231 | 0.181 | 0.172 | NA | 0.266 | NA | 0.251 |
| 30 | 12.7979 | 13.0718 | 13.4839 | 13.3043 | 12.5988 | 12.667 | 12.4484 | 12.3725 |
| 31 | 1 | 1 | 1 | 1 | 1 | 1 | 1 | 1 |
| 33 | 67 | 52.4 | 90.2 | 47.5 | 66.3 | 66.7 | 106.3 | 76.4 |
| 32 | 14.3 | 10.4 | 10.6 | 9.4 | 24 | 12.9 | 21 | 12.9 |
| 34 | 7.62 | 9.06 | 7 | NA | NA | NA | 10.12 | NA |
| 37 | 15.5 | 16.9 | 21.3 | NA | NA | NA | 17.6 | NA |
| 38 | 15.6 | 14.6 | 16.7 | 14.6 | 15.2 | 15.5 | 15.8 | 15.5 |
| 43 | 1.23 | 1.31 | 1.58 | NA | 1.28 | 1.48 | NA | NA |
| 44 | 0.41 | 0.459 | 0.473 | 0.484 | 0.354 | 0.449 | 0.506 | 0.452 |
| 45 | 77 | 64.7 | 66 | 67 | 72 | 62 | 67.3 | 67 |
| 46 | 127.7 | 116 | 122 | 122 | 125 | 119 | 119 | 119 |
| 47 | 83.3 | 88 | 72 | 81 | 88 | 88 | 80.7 | 81 |
| 50 | 145.8 | 142.8 | 151.6 | 167.8 | 188.2 | 152.7 | 181.3 | 173.6 |
| 51 | 1.5 | 2.1 | 2.1 | 2.3 | 1.29 | 2.66 | 2.36 | 2.12 |
| 61 | 40.8 | 50.5 | 49.5 | 49 | NA | NA | 51.8 | NA |
| 3 | 41.2 | 36.3 | 50.7 | 58.6 | 45.9 | 33.7 | 54 | 42.9 |
| 4 | 122.1 | 124.1 | 150.8 | NA | 94.7 | 271.6 | NA | NA |
| 13 | 3023.7 | 2584.4 | 3518.1 | NA | 2660.1 | 6992.7 | NA | NA |
| 8 | 0.075 | 0.0565 | 0.1 | 0.0594 | 0.0879 | 0.0755 | 0.1207 | 0.0766 |
| 16 | 0.318 | 0.154 | 0.287 | NA | 0.256 | 0.175 | NA | NA |
| 17 | 0.102 | 0.17 | 0.136 | 0.144 | 0.08 | 0.172 | 0.085 | 0.234 |
| 23 | 1.51 | 1.79 | 1.81 | 1.2 | 1.79 | 2.19 | 2.95 | 2.17 |
| 54 | 53.8 | 38.8 | 69.9 | 47.2 | 54.7 | 63.8 | 101 | 77.7 |
| 55 | 0.936 | 0.704 | 1.21 | 0.794 | 1.116 | 1.003 | 1.612 | 1.33 |
| 58 | 0.183 | 0.166 | 0.089 | 0.095 | 0.217 | 0.152 | 0.187 | 0.148 |

Table 256. Provided are the values of each of the parameters (as described above) measured in maize accessions (Line). Growth conditions are specified in the experimental procedure section.

TABLE 257
Measured parameters in Maize Inbred Field B 35K per acre (lines 9-16)

| Line/Correlation | | | | | | | | |
|---|---|---|---|---|---|---|---|---|
| ID | Line-9 | Line-10 | Line-11 | Line-12 | Line-13 | Line-14 | Line-15 | Line-16 |
| 5 | 84.3 | 82.5 | 86.3 | NA | 90.3 | 81.5 | 87.3 | 81.8 |
| 9 | NA | 100 | 100 | 95.4 | 95.6 | NA | 100 | 68.7 |
| 10 | 12.1 | 13.4 | 15.8 | NA | 4.9 | 16.3 | 14.7 | 14 |
| 24 | 4.08 | 4.12 | 4.15 | 5.39 | 5.67 | 3.44 | 3.98 | 5.16 |
| 27 | 245.6 | 255.6 | 216.6 | 175.1 | 277.8 | 285.2 | 210.3 | 202 |
| 14 | 229.6 | 254.8 | 203.2 | 159.2 | 263.2 | 261.3 | 165.4 | 187 |
| 18 | 0.561 | 0.563 | 0.508 | 0.379 | 0.493 | 0.501 | 0.323 | 0.478 |
| 35 | 9.3 | 7 | 14 | 19.5 | 10 | 12 | 10 | 8.7 |
| 36 | 93.8 | 27.7 | 109.1 | 94.9 | 46 | 33.7 | 62.2 | 121.1 |
| 39 | 24.1 | 20.1 | 31.6 | NA | 20.1 | 13.8 | 21.6 | 26.8 |
| 40 | 1.94 | 0.48 | 2.02 | NA | NA | 1.48 | 1.59 | 2.95 |
| 42 | 173.1 | 159.3 | 153.9 | NA | 160.5 | 155.5 | 161.8 | 203 |
| 48 | 4.04 | 2.25 | 2.54 | NA | NA | 4.83 | 4.28 | 2.03 |
| 49 | 0.318 | 0.288 | 0.377 | 0.372 | 0.554 | 0.335 | 0.359 | 0.605 |
| 41 | 11.2 | 12.6 | 13.4 | 12.9 | 13.5 | 14.4 | 11.5 | 13.9 |
| 52 | 42.9 | 26.1 | 41.4 | NA | NA | 44.9 | 41.9 | 41 |
| 53 | 621.7 | NA | 662 | NA | NA | 640.8 | 632.4 | 706.4 |
| 56 | 293.2 | 200.3 | 416 | 297.9 | 221 | 154.1 | 291.7 | 408.7 |
| 57 | 34.4 | 36 | 33.8 | 30.8 | 33.6 | 34.9 | 44.8 | 33.5 |
| 59 | 13.14 | 13.49 | 13.85 | 14.84 | 13.82 | 15.77 | 19.16 | 13.12 |
| 60 | 3.33 | 3.39 | 3.1 | 2.64 | 3.06 | 2.8 | 2.98 | 3.24 |
| 1 | 51.5 | 49.3 | 52.2 | 49 | 53.8 | 54.9 | 54.3 | 60.4 |
| 2 | 15.2 | 8 | 13.8 | NA | 12.7 | 13 | 14.2 | 19.3 |
| 6 | 50.3 | 45.6 | 51.8 | 46.6 | 43.5 | 52.3 | 49.9 | 58.6 |
| 7 | 15.2 | 8 | 13.7 | NA | 12.7 | 13 | 14.2 | 19.1 |
| 20 | 4.9 | 4.61 | 4.8 | 4.13 | 4.37 | 4.25 | 3.97 | 5.19 |
| 21 | 1.8 | 1.36 | 1.8 | NA | 1.59 | 1.51 | 1.49 | 2.19 |
| 11 | 6.05 | 2.38 | 6.59 | NA | 4.35 | 3.28 | 6.38 | 6.11 |
| 12 | 13.3 | 13.5 | 13.8 | 14.9 | 15.3 | 16.5 | 17 | 14.8 |
| 15 | 14.5 | NA | 16 | NA | NA | 14.2 | 15.1 | 17.2 |
| 19 | 6.3 | 2.59 | 8.68 | 5.71 | 2.89 | 2.79 | 3.07 | 9.57 |
| 22 | 1.04 | 1 | 1.12 | 1.12 | 1.08 | 1.06 | 1.04 | 1.17 |
| 25 | 61 | 56.3 | 52 | 32.5 | 55.7 | 69 | 62 | 39.7 |
| 26 | 81.1 | 27.5 | 95.4 | 77.6 | 40.8 | 28 | 42.7 | 102.8 |
| 28 | 19.1 | NA | 26 | NA | NA | 10.6 | 16.5 | 25 |
| 29 | 0.217 | 0.115 | 0.221 | NA | 0.11 | 0.142 | 0.161 | 0.129 |
| 30 | 13.113 | 13.0704 | 13.4898 | 12.9801 | 13.4971 | 14.237 | 14.5133 | 12.3574 |
| 31 | 1 | 1 | NA | 1 | 1 | 1 | 1 | 1 |
| 33 | 74 | 51.3 | 93.7 | 55.2 | 62.1 | 61.6 | 67.9 | 85.9 |
| 32 | 20.2 | 14.3 | 15.3 | 11.3 | 22.6 | 22.7 | 33.9 | 19.7 |
| 34 | 11.46 | 11.33 | NA | NA | 11.08 | 9.19 | 8.04 | 13.21 |
| 37 | 18 | 17.2 | 17.2 | NA | 19.7 | 16.6 | 17.8 | 17.3 |
| 38 | 19 | 14.6 | 19.8 | 12.3 | 17.4 | 15.8 | 13.5 | 17.4 |
| 43 | 1.03 | 1.38 | 1.24 | NA | 0.89 | 1.45 | 1.01 | 0.99 |
| 44 | 0.427 | 0.487 | 0.501 | 0.474 | 0.457 | 0.437 | 0.45 | 0.498 |
| 45 | 76.3 | 74 | 74 | 70 | 78 | 76 | 78 | 74.7 |
| 46 | 146.7 | 139.7 | 140 | 122 | 143.7 | 157 | 150 | 123 |
| 47 | 85.7 | 83.3 | 88 | 89.5 | 88 | 88 | 88 | 83.3 |
| 50 | 160.8 | 166.1 | 197 | 173.9 | 205.1 | 185.7 | 166 | 202.8 |
| 51 | 1.34 | 1.79 | 2.19 | 1.98 | 2.11 | 1.54 | 1.52 | 2.08 |
| 61 | 48.9 | NA | NA | 42.4 | 55.2 | 53.4 | 50.8 | NA |
| 3 | 49.3 | 47.2 | 61.3 | 47.2 | 48.6 | 57.6 | 47.1 | 57.1 |
| 4 | 76.4 | 81.8 | 95.8 | NA | NA | 117.2 | 101.8 | 109.2 |
| 13 | 2922.1 | 2583.3 | 2937.7 | NA | 3852.8 | 4273.6 | 3160.2 | 3534.9 |
| 8 | 0.093 | 0.0544 | 0.0998 | 0.0607 | 0.0635 | 0.0751 | 0.0695 | 0.0868 |
| 16 | 0.231 | 0.205 | 0.232 | NA | NA | 0.134 | 0.256 | 0.358 |
| 17 | 0.159 | 0.115 | 0.158 | 0.143 | 0.113 | 0.134 | 0.196 | 0.121 |
| 23 | 1.23 | 0.83 | 1.79 | 1.68 | 1.27 | 0.98 | 1 | 2.22 |
| 54 | 82.9 | 39.5 | 92.8 | 25.9 | 38.3 | 31.6 | 21.8 | 90.7 |
| 55 | 1.508 | 0.726 | 1.417 | 0.421 | 0.614 | 0.548 | 0.357 | 1.511 |
| 58 | 0.184 | 0.118 | 0.145 | 0.174 | 0.223 | 0.212 | 0.26 | 0.184 |

Table 257. Provided are the values of each of the parameters (as described above) measured in maize accessions (Line). Growth conditions are specified in the experimental procedure section.

TABLE 258
Measured parameters in Maize Inbred Field B 35K per acre (lines 17-24)

| Line/Correlation | | | | | | | | |
|---|---|---|---|---|---|---|---|---|
| ID | Line-9 | Line-10 | Line-11 | Line-12 | Line-13 | Line-14 | Line-15 | Line-16 |
| 5 | 81.3 | 81.8 | 77.4 | 84.3 | 87.3 | 92.6 | 95.6 | 89 |
| 9 | 100 | 100 | 49.6 | 100 | 99.4 | NA | NA | 99.4 |
| 10 | 26.9 | 20.4 | 13 | NA | 11.4 | 15.8 | 16.2 | 24.2 |
| 24 | 4.73 | 3.9 | 7.42 | 4.79 | 4.58 | 2.74 | 3.69 | NA |
| 27 | 213.6 | 244.8 | 262.4 | 206.7 | 192.4 | 208.5 | 295.2 | NA |
| 14 | 204.6 | 225.2 | 230.2 | 200.4 | 169.8 | 193.1 | 296.2 | NA |
| 18 | 0.45 | 0.518 | 0.546 | 0.466 | 0.457 | 0.479 | 0.606 | NA |
| 35 | 7 | 10.3 | 11.7 | 18 | 6 | 5 | 6.3 | 7 |
| 36 | 49.1 | 69.8 | 68.1 | 92.3 | 98.6 | 79.4 | 45.9 | NA |
| 39 | 17 | 13.5 | 14.9 | NA | 31.7 | 13.1 | 13.3 | 9.6 |
| 40 | 2.39 | 2.16 | NA | NA | NA | 3.97 | 1.3 | 0.14 |
| 42 | 149 | 182.9 | 173 | NA | NA | 156.4 | 207.5 | 164.5 |
| 48 | 1.25 | 2.16 | NA | NA | NA | 4.97 | 3.71 | 5.54 |
| 49 | 0.282 | 0.366 | 0.575 | 0.285 | 0.356 | 0.195 | 0.541 | 0.436 |
| 41 | 13.4 | 14.4 | 13.1 | 14.3 | 14.5 | 13.8 | 11.6 | 10.6 |
| 52 | 41.5 | 32.2 | NA | NA | NA | 41.1 | NA | 21 |
| 53 | 726.5 | 444.8 | NA | NA | NA | 628.2 | NA | 306.5 |
| 56 | 259 | 257.8 | 263.9 | 333.7 | 320.8 | 256.2 | 283.6 | NA |
| 57 | 25.8 | 24 | NA | 31.1 | 25.7 | 15.3 | NA | NA |
| 59 | 10.44 | 12.01 | NA | 12.81 | 13.43 | 6.9 | NA | NA |
| 60 | 3.07 | 2.54 | NA | 3.08 | 2.42 | 2.49 | NA | NA |
| 1 | 44.3 | 43.1 | 54.6 | 48.6 | 51.5 | 36.1 | 40.7 | 32.3 |
| 2 | 17.6 | 16.8 | 11.9 | NA | NA | 22.5 | 13 | 3.2 |
| 6 | 42.6 | 42.2 | 51.5 | 47.3 | 50 | 34 | 34.2 | 26.1 |
| 7 | 17.5 | 16.7 | 11.9 | NA | NA | 22.4 | 13 | 3.2 |
| 20 | 4.64 | 4.18 | 4.4 | 4.24 | 4.22 | 4.02 | 3.89 | 3.5 |
| 21 | 2.08 | 1.8 | 1.53 | NA | NA | 2.28 | 1.61 | 0.92 |
| 11 | 3.9 | 3.25 | 4.55 | NA | NA | 3.11 | 2.98 | 2.93 |
| 12 | 12 | 12.9 | 14.3 | 14.4 | 15.4 | 11.1 | 12.5 | 11 |
| 15 | 17.5 | 13.7 | NA | NA | NA | 15.2 | 15.2 | 14.6 |
| 19 | 3.97 | 4.21 | 3.71 | 6.04 | 5.62 | 5.18 | 5.14 | NA |
| 22 | 1.06 | 1.04 | 1.21 | 1 | 1.19 | 1 | 1.25 | 1.04 |
| 25 | 49.5 | 65.7 | 35.5 | 44.5 | 42 | 66.7 | 80 | 49 |
| 26 | 44.4 | 59 | 51.5 | 86.5 | 74.5 | 67.7 | 46.5 | NA |
| 28 | 14.5 | 18.7 | NA | NA | NA | 19.1 | 11.6 | NA |
| 29 | 0.062 | 0.224 | NA | 0.247 | NA | 0.24 | NA | NA |
| 30 | 13.9622 | 13.4116 | 13.263 | 12.9152 | 12.5174 | 13.941 | 12.7539 | 13.4184 |
| 31 | 1 | 1 | 1 | 1 | 1 | 1 | 1 | 1 |
| 33 | 52.6 | 66.2 | 75.9 | 70.2 | 66 | 54.7 | 82.1 | NA |
| 32 | 14.1 | 14 | 31.5 | 22.7 | 12.1 | 14.4 | 24.5 | 12.6 |
| 34 | 12.56 | 11.5 | 10.96 | NA | 12.81 | 9.96 | 10.5 | 9.04 |
| 37 | 17.5 | 15.6 | 16.7 | NA | 16.4 | 14.6 | 18.5 | 15.9 |
| 38 | 18.1 | 18.4 | 16.8 | 16 | 15.3 | 20 | 27.4 | 11.5 |
| 43 | 0.78 | 1.24 | 1.13 | NA | NA | 1.3 | 0.94 | 1.15 |
| 44 | 0.43 | 0.439 | 0.38 | 0.445 | 0.446 | 0.354 | 0.351 | 0.393 |
| 45 | 77.5 | 75.3 | 74 | 70 | 68 | 90 | 84.7 | 80.3 |
| 46 | 134 | 151.3 | 123.5 | 132.5 | 116 | 161.7 | 171 | 136.7 |
| 47 | 84.5 | 85.7 | 85.7 | 88 | 74 | 95 | 91 | 88 |
| 50 | 181.3 | 174.1 | 164.3 | 159.1 | 170 | 185 | 173.2 | 160.2 |
| 51 | 1.8 | 1.82 | 1.51 | 1.64 | 2.14 | 0.99 | 1.24 | 1.31 |
| 61 | 42.6 | 49.1 | NA | NA | NA | NA | NA | 35.6 |
| 3 | 44.1 | 47.6 | 51.3 | 44.9 | NA | 45.9 | 50.2 | 29.5 |
| 4 | 99.2 | 119.5 | NA | NA | NA | 115.1 | 93.4 | 143.6 |
| 13 | 2577.9 | 3219.7 | 3114.3 | NA | NA | 3285 | 3514.4 | 3698.8 |
| 8 | 0.065 | 0.062 | 0.0756 | 0.0644 | 0.0704 | 0.0466 | 0.0467 | 0.0266 |
| 16 | 0.286 | 0.239 | NA | NA | NA | 0.082 | 0.308 | 0.366 |
| 17 | 0.159 | 0.089 | 0.13 | 0.15 | 0.192 | 0.09 | 0.119 | 0.108 |
| 23 | 0.93 | 1.09 | 2.16 | 1.62 | 1.57 | 0.72 | 1.03 | NA |
| 54 | 59.3 | 41.8 | 71.2 | 55.1 | 57.2 | 33.1 | 39.3 | 13.7 |
| 55 | 1.012 | 0.735 | 1.228 | 1.141 | 0.859 | 0.582 | 0.76 | 0.214 |
| 58 | 0.164 | 0.216 | 0.262 | 0.181 | 0.196 | 0.306 | 0.181 | NA |

Table 258. Provided are the values of each of the parameters (as described above) measured in maize accessions (Line). Growth conditions are specified in the experimental procedure section.

TABLE 259
Measured parameters in Maize Inbred Field B 35K per acre (lines 25-32)

| Line/Correlation | | | | | | | | |
|---|---|---|---|---|---|---|---|---|
| ID | Line-25 | Line-26 | Line-27 | Line-28 | Line-29 | Line-30 | Line-31 | Line-32 |
| 5 | 89.2 | 76 | 72.3 | 89.8 | 87.7 | 78.1 | 83.2 | 89.4 |
| 9 | 99.4 | 100 | 98.6 | NA | NA | 99.6 | NA | NA |
| 10 | 26.4 | NA | NA | 5.3 | 16 | 1.3 | 19.9 | 5.7 |
| 24 | 5.29 | 6.17 | 3.89 | 3.96 | 4.04 | 7.62 | 3.36 | 4.01 |
| 27 | 259.2 | 225.1 | 204.4 | 233.7 | 295 | 303.4 | 255 | 277.2 |
| 14 | 225.6 | 212.7 | 190.4 | 232.8 | 265.1 | 258.3 | 249.9 | 315 |
| 18 | 0.58 | 0.447 | 0.466 | 0.413 | 0.55 | 0.638 | 0.566 | 0.521 |
| 35 | 6.3 | 15 | 4 | 8.5 | 5 | 14 | 10.7 | 12 |
| 36 | 128.1 | 66.2 | 47.2 | 18.4 | 40.5 | 67 | 83.6 | 50.9 |
| 39 | 30.8 | NA | NA | 5.1 | 9.8 | 29.2 | 5.9 | 10.6 |
| 40 | 5.43 | 0.44 | 1.03 | NA | NA | 1.59 | 3.83 | 0.88 |
| 42 | 141.6 | 87.5 | 177.4 | NA | NA | 229.3 | 185.2 | 162.2 |
| 48 | 3.78 | 5.1 | 5.72 | NA | NA | 6.2 | 5.34 | 3.26 |
| 49 | 0.516 | 0.354 | 0.326 | 0.491 | 0.532 | 0.556 | 0.253 | 0.411 |
| 41 | 13.6 | 12.1 | 13.3 | 9.9 | 14.1 | 13.4 | 11.8 | 14.6 |
| 52 | NA | 26.8 | 36.6 | NA | NA | NA | 45 | NA |
| 53 | NA | 405.1 | 522.1 | NA | NA | NA | 555.8 | NA |
| 56 | 419.6 | 287 | 240 | 97.3 | 233.8 | 302.6 | 152.9 | 237.7 |
| 57 | 57.9 | NA | 33.2 | NA | NA | NA | NA | NA |
| 59 | 22.49 | NA | 14.02 | NA | NA | NA | NA | NA |
| 60 | 3.28 | NA | 3.01 | NA | NA | NA | NA | NA |
| 1 | 70.2 | 53.5 | 50.9 | 35.6 | 46.4 | 66.5 | 27.1 | 40.4 |
| 2 | 25.5 | 5.8 | 10.8 | NA | NA | 11.7 | 22.5 | 11.5 |
| 6 | 68.2 | 50.5 | 46.1 | 34.8 | 45.9 | 63.9 | 25.5 | 39.6 |
| 7 | 25.5 | 5.8 | 10.8 | NA | NA | 11.7 | 22.4 | 11.5 |
| 20 | 4.7 | 4.46 | 4.49 | 3.66 | 4.23 | 5.69 | 2.75 | 3.73 |
| 21 | 2.36 | 1.23 | 1.6 | NA | NA | 1.6 | 1.93 | 1.42 |
| 11 | 7.38 | NA | NA | NA | NA | 7.36 | 2.01 | 2.87 |
| 12 | 18.4 | 15.1 | 14.4 | 12.1 | 13.6 | 14.8 | 11.8 | 13 |
| 15 | 16.1 | 15.2 | 14.2 | NA | NA | 15.2 | 12.5 | 15.8 |
| 19 | 8.66 | 3.5 | 2.87 | 1.47 | 2.79 | 3.87 | 6.1 | 3 |
| 22 | 1.3 | 1.25 | 1.28 | 1 | 1.19 | 1.71 | 1.08 | 1 |
| 25 | 48.7 | 39 | 53 | 67.5 | 76.5 | 46 | 74 | 71 |
| 26 | 97.2 | 57.6 | 39 | 18.3 | 34.3 | 52.7 | 80.2 | 57.2 |
| 28 | 25.5 | 18.8 | 16.9 | NA | NA | 20.2 | 12.8 | 15.1 |
| 29 | 0.145 | NA | NA | 0.048 | NA | NA | 0.222 | 0.156 |
| 30 | 13.3545 | 13.119 | 13.7642 | 12.7265 | 3.9067 | 12.6279 | 12.9047 | 15.0186 |
| 31 | 2 | 1 | 1.5 | 1 | 1 | 1 | 1 | 1 |
| 33 | 129.2 | 67.3 | 51.7 | 22.8 | 71.3 | 94.6 | 39.1 | 65.9 |
| 32 | 28.8 | 18.9 | 28.4 | 39.4 | 21.9 | 28 | 25.5 | 26.8 |
| 34 | 8.51 | NA | NA | 8.19 | 7.88 | 12.29 | 9.33 | 9.45 |
| 37 | 15.2 | NA | NA | 18.4 | 16.6 | 17 | 18 | 18.2 |
| 38 | 14.9 | 15.4 | 14.4 | 12.3 | 29.8 | 16.8 | 24.7 | NA |
| 43 | 0.85 | 1.49 | 1.61 | NA | NA | 1.37 | 0.93 | 1.11 |
| 44 | 0.461 | 0.472 | 0.43 | 0.332 | 0.415 | 0.343 | 0.413 | 0.432 |
| 45 | 81.7 | 62 | 62 | 88 | 89.5 | 74 | 86.3 | 81 |
| 46 | 136.7 | 116 | 119 | 164 | 171 | 134 | 171 | 164 |
| 47 | 88 | 77 | 66 | 96.5 | 94.5 | 88 | 97 | 93 |
| 50 | 192.7 | 149.7 | 145.2 | 188.1 | 213.2 | 178.9 | 161.7 | 254.2 |
| 51 | 1.55 | 3.25 | 3.25 | 2.01 | 1.59 | 1.46 | 0.94 | 2.27 |
| 61 | NA | NA | NA | NA | NA | NA | NA | NA |
| 3 | 45.7 | 47.3 | 48.9 | 35.8 | 49.6 | 52.2 | 38.8 | 48.2 |
| 4 | 80.9 | 113.3 | 222.3 | NA | NA | 100.7 | 96.7 | 82.8 |
| 13 | 2384.3 | 2888.8 | 4612.2 | NA | NA | 3495.2 | 3611.4 | 3737.6 |
| 8 | 0.1233 | 0.0841 | 0.0745 | 0.0196 | 0.0349 | 0.1305 | 0.0193 | 0.0911 |
| 16 | 0.332 | 0.221 | 0.213 | NA | NA | 0.274 | 0.169 | 0.117 |
| 17 | 0.214 | 0.147 | 0.161 | 0.068 | 0.093 | 0.14 | 0.134 | 0.145 |
| 23 | 2.64 | 1.82 | 0.99 | 0.39 | 0.98 | 1.93 | 0.52 | 0.96 |
| 54 | 41.5 | 53.2 | 49.3 | 13 | 40.9 | 86.1 | 27.6 | NA |
| 55 | 0.638 | 1.158 | 0.922 | 0.371 | 0.907 | 1.882 | 0.48 | NA |
| 58 | 0.227 | 0.171 | 0.293 | 0.453 | 0.17 | 0.198 | 0.332 | 0.197 |

Table 259. Provided are the values of each of the parameters (as described above) measured in maize accessions (Line). Growth conditions are specified in the experimental procedure section.

TABLE 260
Measured parameters in Maize Inbred Field B 35K per acre (lines 33-40)

| Line/Correlation | | | | | | | | |
|---|---|---|---|---|---|---|---|---|
| ID | Line-33 | Line-34 | Line-35 | Line-36 | Line-37 | Line-38 | Line-39 | Line-40 |
| 5 | 69.7 | 74.8 | 74.5 | 90.9 | 74.6 | 74.5 | 86.2 | 91 |
| 9 | NA | NA | 72.7 | NA | 96.7 | 100 | NA | NA |
| 10 | 10.7 | 8.8 | 17.9 | 16.1 | NA | 19 | 13.6 | 9.1 |
| 24 | 5.08 | 3.97 | 5.22 | 2.95 | NA | 3.25 | 2.95 | NA |
| 27 | 248.5 | 218.8 | 219.7 | 223.9 | NA | 260 | 235.8 | NA |
| 14 | 228.6 | 196.1 | 204.8 | 209.3 | NA | 256.4 | 211.3 | NA |
| 18 | 0.521 | 0.431 | 0.444 | 0.481 | NA | 0.454 | 0.512 | NA |
| 35 | 9.5 | 9.5 | 11 | 3.7 | 16.3 | 3 | 7.7 | 7 |
| 36 | 36.9 | 71.3 | 48.8 | 61 | NA | 15.1 | 71.5 | NA |
| 39 | 15.2 | 13.8 | 17 | 12.5 | NA | 8.2 | 20.9 | 13.2 |
| 40 | 2.27 | NA | NA | 4.96 | 0.15 | 2.35 | 1.71 | 2.17 |
| 42 | 195.2 | 124 | 183.9 | 157.6 | 189.5 | 166.5 | 165.1 | 158.7 |
| 48 | 1.84 | NA | NA | 7.61 | 7.74 | 7.4 | 6.18 | 6.5 |
| 49 | 0.268 | 0.469 | 0.361 | 0.267 | 0.277 | 0.234 | 0.318 | 0.347 |
| 41 | 13.1 | 10.4 | 11.7 | 12.3 | 11.4 | 12 | 10.6 | 13.5 |
| 52 | 27 | NA | 28.1 | 38.5 | NA | 44.5 | NA | 31.8 |
| 53 | 330.6 | NA | 444.5 | 654.1 | NA | 611.5 | NA | 364.2 |
| 56 | 168.6 | 274.5 | 226.8 | 343.7 | NA | 146.6 | 358.3 | NA |
| 57 | 21 | 31.8 | 33.7 | NA | NA | 28.4 | NA | NA |
| 59 | 11.14 | 14.42 | 14.08 | NA | NA | 13.68 | NA | NA |
| 60 | 2.4 | 2.81 | 3.04 | NA | NA | 2.65 | NA | NA |
| 1 | 33 | 49.3 | 47.7 | 40.9 | 36.3 | 43.6 | 56.4 | 47.3 |
| 2 | 15.4 | 2.8 | 5.2 | 19.3 | 4.9 | 21.4 | 11 | 14.3 |
| 6 | 29.6 | 46.9 | 42.7 | 38.5 | 30.7 | 40.3 | 49.9 | 44.9 |
| 7 | 15.3 | 2.8 | 5.2 | 19.3 | 4.9 | 21.4 | 11 | 14.3 |
| 20 | 3.84 | 4.27 | 4.33 | 3.69 | 4.28 | 3.44 | 4.49 | 4.43 |
| 21 | 1.89 | 0.82 | 1.08 | 2.11 | 0.91 | 1.97 | 1.59 | 1.71 |
| 11 | 3.68 | 1.68 | 3.82 | 3.96 | NA | 3.6 | 5.59 | 4 |
| 12 | 10.9 | 14 | 13.7 | 14.2 | 10.5 | 14.4 | 15.7 | 13.5 |
| 15 | 12.2 | NA | 15.8 | 17 | 19 | 13.8 | 14.5 | 11.5 |
| 19 | 2.33 | 3.86 | 3.06 | 4 | NA | 1.61 | 4.47 | NA |
| 22 | 1.56 | 1.56 | 1.12 | 1.54 | 1 | 1 | 1.21 | 1.38 |
| 25 | 51.5 | 62 | 43.3 | 77.3 | 44.7 | 67.3 | 78.7 | 73 |
| 26 | 30.9 | 57.8 | 43.4 | 54.5 | NA | 14.8 | 58.6 | NA |
| 28 | 13.8 | NA | 17.4 | 20.8 | NA | 10.9 | 24.7 | NA |
| 29 | NA | NA | 0.195 | NA | NA | 0.212 | NA | NA |
| 30 | 13.3308 | 12.5934 | 13.341 | 12.6129 | 12.6592 | 13.8362 | 14.592 | 13.9201 |
| 31 | 1.5 | 1 | 1 | 1.67 | 2 | 1.67 | 2.33 | 1 |
| 33 | 44.3 | 64 | 53.3 | 79 | NA | 38.1 | 92.4 | NA |
| 32 | 12.4 | 20.9 | 14.1 | 19.2 | NA | 42.3 | 23.9 | 52.4 |
| 34 | 16.31 | 15.06 | 11.21 | 8.33 | NA | 10.12 | 7.88 | 7.94 |
| 37 | 15.2 | 15.6 | 16.5 | 13.3 | NA | 16.2 | 16.4 | 15.6 |
| 38 | 17.8 | 16.6 | 16.3 | 17.2 | 9.3 | 16.2 | 16.8 | 29.8 |
| 43 | NA | 1.46 | 1.66 | 1.35 | 2.09 | 1.21 | 1.36 | 1.43 |
| 44 | 0.394 | 0.393 | 0.366 | 0.327 | 0.37 | 0.401 | 0.339 | 0.384 |
| 45 | 75 | 75 | 75.7 | 90 | 62 | 88 | 84.7 | 91 |
| 46 | 136 | 146.5 | 130 | 171 | 123 | 158.3 | 171 | 171 |
| 47 | 84.5 | 84.5 | 86.7 | 93.7 | 78.3 | 91 | 92.3 | 98 |
| 50 | 168.4 | 156.6 | 140.6 | 166.4 | 123.6 | 160 | 164 | 185.9 |
| 51 | 1.9 | 1.86 | 1.26 | 0.96 | 1.61 | 1.06 | 0.96 | 1.39 |
| 61 | 42.5 | NA | NA | NA | NA | NA | NA | NA |
| 3 | 32.9 | 40 | 37.1 | 42.1 | 37.6 | 35.6 | 38.8 | 42.1 |
| 4 | 98.4 | NA | NA | 105.1 | 233.3 | 123.9 | 97.2 | 98.9 |
| 13 | 3698.2 | 992.2 | 3250.3 | 4029.6 | 6064.7 | 3718.7 | 3970.4 | 4132.6 |
| 8 | 0.0716 | 0.0772 | 0.064 | 0.037 | 0.0237 | 0.0347 | 0.0673 | 0.0717 |
| 16 | NA | NA | NA | 0.121 | 0.149 | 0.162 | 0.206 | 0.121 |
| 17 | 0.162 | 0.138 | 0.09 | 0.124 | 0.067 | 0.101 | 0.14 | 0.129 |
| 23 | 0.9 | 1.22 | 1.3 | 1.04 | NA | 0.48 | 1.16 | NA |
| 54 | 51.5 | 47.7 | 62.4 | 25.5 | 8.5 | 25.7 | 28 | 38.4 |
| 55 | 1.226 | 1.065 | 1.102 | 0.553 | 0.2 | 0.47 | 0.546 | 0.772 |
| 58 | 0.245 | 0.252 | 0.159 | 0.174 | NA | 0.229 | 0.148 | NA |

Table 260. Provided are the values of each of the parameters (as described above) measured in maize accessions (Line). Growth conditions are specified in the experimental procedure section.

TABLE 261
Measured parameters in Maize Inbred Field B 35K per acre (lines 41-48)

| Line/Correlation | | | | | | | | |
|---|---|---|---|---|---|---|---|---|
| ID | Line-41 | Line-42 | Line-43 | Line-44 | Line-45 | Line-46 | Line-47 | Line-48 |
| 5 | 76.4 | 95.5 | 77.1 | 81.5 | 75.9 | 76.6 | 91.6 | NA |
| 9 | 97.9 | NA | 93.7 | 78.5 | 84.9 | 69.7 | 94.3 | 100 |
| 10 | 27 | 13.2 | 3 | 7.3 | 9.1 | 11 | 7.9 | 11.8 |
| 24 | 5.07 | 3.94 | 3.68 | NA | 6.27 | 5.35 | 4.73 | NA |
| 27 | 202.1 | 315.6 | 206 | 233.6 | 283.5 | 211.4 | 191 | 199.6 |
| 14 | 183.8 | 292.1 | 186.8 | 209.8 | 257.9 | 201.4 | 169.7 | 183.2 |
| 18 | 0.398 | 0.557 | 0.521 | 0.512 | 0.573 | 0.48 | 0.409 | 0.428 |
| 35 | 14 | 10 | 9.2 | NA | 12.7 | 13.7 | 9 | 14 |
| 36 | 46.8 | 28 | 96.3 | 117.6 | 78.1 | 135.4 | 124 | 76.5 |
| 39 | 16.6 | 6.3 | 24.3 | 31.8 | 14.9 | 13 | 26.5 | 20.4 |
| 40 | 0.68 | 0.39 | 2.21 | 2.93 | 1.45 | 0.94 | 2.04 | 1.34 |
| 42 | 132.3 | 209.9 | 166.9 | 102.9 | 167.4 | 137.1 | 168.2 | 154.2 |
| 48 | 5.85 | 5.75 | 7.27 | 8.47 | 2.93 | 2.9 | 3.82 | 5.32 |
| 49 | 0.372 | 0.395 | 0.345 | 0.472 | 0.372 | 0.543 | 0.458 | 0.248 |
| 41 | 11.3 | 12.6 | 10.4 | 14.1 | 12.8 | 13.7 | 13.2 | 11.9 |
| 52 | 36.8 | 27.2 | 42.5 | 38.7 | 40.1 | 34.1 | 34.4 | 29.4 |
| 53 | 579.1 | 348.4 | 731.7 | 639.2 | 440.3 | 514.3 | 507.8 | 390.8 |
| 56 | 176 | 163.3 | 356.3 | 390.1 | 274.6 | 331.7 | 356.8 | 277.2 |
| 57 | 22.1 | NA | 25.7 | 30 | 33.6 | NA | 36.8 | 27.5 |
| 59 | 10.48 | NA | 10.39 | 12.17 | 16.66 | NA | 16.06 | 12.57 |
| 60 | 2.69 | NA | 3.12 | 3 | 2.56 | NA | 2.92 | 2.78 |
| 1 | 40 | 51.1 | 53.3 | 67.4 | 60.1 | 60.3 | 63 | 39.3 |
| 2 | 7.9 | 5.5 | 14.7 | 8.9 | 15.5 | 8.6 | 13.6 | 6.7 |
| 6 | 38.1 | 48.9 | 51.2 | 66 | 58.5 | 53 | 58.6 | 35.9 |
| 7 | 7.9 | 5.5 | 14.7 | 8.9 | 15.4 | 8.5 | 13.6 | 6.7 |
| 20 | 3.89 | 4.48 | 5.31 | 5.23 | 4.25 | 4.26 | 4.5 | 3.99 |
| 21 | 1.21 | 0.97 | 1.89 | 1.34 | 1.63 | 1.17 | 1.81 | 1.21 |
| 11 | 3.64 | 1.77 | 6.58 | 6.08 | 3.88 | 3.32 | 6.56 | 3.99 |
| 12 | 12.8 | 14.3 | 12.6 | 16.4 | 17.9 | 17.7 | 17.8 | 12.5 |
| 15 | 15.8 | 12.7 | 17.2 | 16.5 | 11 | 15 | 14.8 | 13.2 |
| 19 | 2.79 | 1.58 | 5.02 | 6.07 | 6.71 | 10.59 | 8.47 | 4.24 |
| 22 | 1 | NA | 1.22 | 1.31 | 1.04 | 1.38 | 1.42 | 1.38 |
| 25 | 41.5 | 80 | 52.2 | NA | 46 | 43.7 | 41 | 48 |
| 26 | 38.8 | 25.1 | 77.8 | 94.3 | 63.2 | 122.9 | 97.9 | 63.8 |
| 28 | 11.2 | 13.2 | 20.7 | 23.7 | 24.6 | 20.6 | 21.3 | 19.8 |
| 29 | 0.1 | NA | 0.14 | NA | 0.299 | 0.135 | NA | NA |
| 30 | 13.0329 | 13.9737 | 12.5589 | 12.9183 | 13.8005 | 12.6498 | 13.0829 | 13.8276 |
| 31 | NA | 1 | 1 | 1.5 | 1 | 1 | 1.5 | 1 |
| 33 | 37.3 | 52.3 | 78.3 | 97.1 | 81.6 | 71.3 | 70.6 | 58.1 |
| 32 | 10.6 | 23.6 | 58.5 | 15.8 | 14 | 19.6 | 27.6 | 12.3 |
| 34 | 9.19 | 8.05 | 11 | 10 | 11.5 | 12.58 | 9.33 | 7.44 |
| 37 | 19 | 21.7 | 19.9 | 16.8 | 16.1 | 18.9 | 16.3 | 14.7 |
| 38 | 14.2 | 23.9 | 18.1 | 15.5 | 17.3 | 13.5 | 18.3 | 16.2 |
| 43 | 1.41 | 1.84 | 1.41 | 1.75 | 1.41 | 1.36 | 1.46 | 1.19 |
| 44 | 0.359 | 0.343 | 0.402 | 0.596 | 0.365 | 0.402 | 0.403 | 0.452 |
| 45 | 74 | 81 | 77 | 66 | 75.3 | 75.3 | 79 | 72.7 |
| 46 | 129.5 | 171 | 138.5 | 116 | 134 | 132.7 | 129 | 129 |
| 47 | 88 | 91 | 86.2 | NA | 88 | 89 | 88 | 88 |
| 50 | 146 | 172.9 | 148.3 | 170.1 | 166.6 | 188.2 | 180.2 | 140.6 |
| 51 | 1.42 | 1.34 | 1.65 | 2.46 | 1.44 | 1.72 | 1.68 | 1.45 |
| 61 | NA | NA | 39.2 | 48.5 | 41.2 | 47.1 | 56.2 | NA |
| 3 | 40.8 | 38.1 | 40.7 | 45.1 | 44.1 | 49.4 | 54.2 | 44.8 |
| 4 | 111.2 | 99.1 | 125.6 | 149.6 | 109.3 | 88.7 | 146.7 | 83.9 |
| 13 | 2427.6 | 4193.5 | 3677.1 | 4503.5 | 2307.6 | 2463.9 | 4651.7 | 2089.3 |
| 8 | 0.0401 | NA | 0.068 | 0.1121 | 0.0844 | 0.0597 | 0.1 | 0.0627 |
| 16 | 0.294 | 0.126 | 0.27 | 0.197 | 0.202 | 0.33 | 0.22 | 0.229 |
| 17 | 0.109 | 0.085 | 0.128 | 0.147 | 0.184 | 0.158 | 0.152 | 0.155 |
| 23 | 0.94 | 0.65 | 1.4 | NA | 1.81 | 1.84 | 2.1 | NA |
| 54 | 26.5 | 38.3 | 39 | 91.8 | 70 | 32.1 | 71.4 | 48.8 |
| 55 | 0.447 | 0.722 | 0.872 | 1.406 | 1.294 | 0.544 | 1.523 | 0.841 |
| 58 | 0.18 | 0.252 | 0.19 | 0.19 | 0.166 | 0.201 | 0.254 | 0.161 |

Table 261. Provided are the values of each of the parameters (as described above) measured in maize accessions (Line). Growth conditions are specified in the experimental procedure section.

TABLE 262
Measured parameters in Maize Inbred Field B 35K per acre (lines 49-56)

| Line/Correlation | | | | | | | | |
|---|---|---|---|---|---|---|---|---|
| ID | Line-49 | Line-50 | Line-51 | Line-52 | Line-53 | Line-54 | Line-55 | Line-56 |
| 5 | 93.2 | 80.6 | 82.7 | 83.5 | NA | 83.6 | 86.6 | 92.6 |
| 9 | NA | 100 | 100 | 100 | 100 | NA | NA | NA |
| 10 | 29.2 | 8.2 | 17.5 | 1.8 | 11.1 | 9.7 | 16 | 13 |
| 24 | 4.95 | 5.48 | 3.85 | 6.05 | 5.39 | 2.89 | 4.27 | 3.83 |
| 27 | 281.9 | 239.8 | 211.8 | 223.8 | 276.2 | 231.5 | 180.8 | 318 |
| 14 | 267.5 | 213.3 | 204.2 | 208.8 | 264.9 | 215.6 | 157.3 | 299.4 |
| 18 | 0.533 | 0.48 | 0.458 | 0.53 | 0.538 | 0.508 | 0.372 | 0.565 |
| 35 | 7 | 4 | 14 | 14 | 14.3 | 14 | 5.7 | 7 |
| 36 | 37.8 | 69.3 | 83.9 | 69.5 | 43.7 | 44.6 | 66.2 | 61.3 |
| 39 | 10.8 | 20.7 | 18.6 | 18.7 | 18 | 5 | 17.3 | 15.2 |
| 40 | 2.76 | NA | 0.72 | 1.72 | NA | NA | 3.24 | 2.33 |
| 42 | 247.9 | NA | 149.1 | 209.9 | NA | 133.6 | 122.2 | 148.8 |
| 48 | 5.77 | NA | 3.85 | 4.57 | NA | 4.75 | 2.34 | 7.33 |
| 49 | 0.439 | 0.371 | 0.288 | 0.335 | 0.26 | 0.339 | 0.296 | 0.32 |
| 41 | 13.1 | 12.4 | 11.2 | 13.1 | 11.9 | 11.6 | NA | 9.5 |
| 52 | NA | NA | 39.2 | 40.1 | NA | NA | NA | NA |
| 53 | NA | NA | 588.8 | 592.4 | NA | NA | NA | NA |
| 56 | 131.2 | 228.7 | 226.7 | 361.4 | 164.8 | 196.8 | 287.3 | 147.1 |
| 57 | 25 | 33.1 | NA | 28.9 | 22.7 | 27.3 | 31.2 | 23.9 |
| 59 | 10.47 | 13.95 | NA | 13.51 | 9.52 | 9.58 | 13.09 | 11.83 |
| 60 | 3.02 | 3.01 | NA | 2.73 | 3.03 | 3.63 | 3.06 | 2.56 |
| 1 | 36.7 | 57.1 | 44.1 | 52.1 | 35.1 | 27.4 | 38.5 | 42.9 |
| 2 | 20.7 | NA | 7.7 | 12.5 | NA | 3.5 | 19.9 | 16 |
| 6 | 32.4 | 51.6 | 41.2 | 50.7 | 32.4 | 25.1 | 36.8 | 41.3 |
| 7 | 20.7 | NA | 7.7 | 12.5 | NA | 3.5 | 19.9 | 16 |
| 20 | 4.06 | 4.6 | 4.16 | 4.71 | 4.22 | 3.82 | 3.97 | 4.03 |
| 21 | 2.17 | NA | 1.2 | 1.65 | NA | 0.85 | 2.01 | 1.81 |
| 11 | 2.4 | NA | 3.76 | 3.89 | NA | 1.22 | 3.92 | 3.84 |
| 12 | 11.2 | 15.8 | 13.3 | 14.1 | 10.3 | 8.6 | 12 | 13.4 |
| 15 | 20.5 | NA | 15 | 14.8 | NA | NA | 18 | 10.4 |
| 19 | 3.13 | 4.03 | 4.27 | 4.42 | 3.73 | 3.79 | 3.62 | 3.83 |
| 22 | 1 | 1.12 | 1 | 1.12 | 1.05 | 1.33 | 1.21 | 1.12 |
| 25 | 57 | 44 | 53.5 | 44.5 | 51.3 | 80 | 48.3 | 83 |
| 26 | 34.1 | 53.9 | 77.9 | 60.1 | 40.9 | 40 | 51.6 | 53.8 |
| 28 | 6.5 | NA | 15.1 | 24.9 | NA | NA | 15.7 | 14.2 |
| 29 | 0.092 | 0.187 | 0.192 | 0.233 | 0.126 | NA | NA | 0.153 |
| 30 | 12.9354 | 12.3439 | 13.1444 | 13.5987 | 12.6477 | 12.662 | 14.3953 | 13.1599 |
| 31 | 2 | 1 | 1 | 2 | 1.33 | 1 | 1 | 1 |
| 33 | 37.8 | 58.2 | 48.5 | 79.8 | 42.7 | 46.6 | 55.7 | 47.5 |
| 32 | 20 | 15.7 | 25.3 | 17 | 13.1 | 15.1 | 14 | 9.1 |
| 34 | 8.69 | 10.38 | 9.56 | 13.19 | NA | 8.33 | 11.16 | 7.53 |
| 37 | 15.2 | 18.4 | 17.5 | 17.9 | NA | 18.2 | 17.9 | 15.3 |
| 38 | 23.1 | 15.3 | 16.3 | 17.1 | 17.5 | 23 | 17.2 | 26.4 |
| 43 | 1.15 | NA | 1.33 | 1.36 | NA | 1.14 | 0.87 | 1.33 |
| 44 | 0.446 | 0.468 | 0.408 | 0.381 | 0.35 | 0.394 | 0.411 | 0.372 |
| 45 | 81 | 68 | 74 | 74 | 71.3 | 77 | 83.3 | 81 |
| 46 | 145 | 116 | 141.5 | 132.5 | 137 | 171 | 137.3 | 171 |
| 47 | 88 | 72 | 88 | 88 | 85.7 | 91 | 89 | 88 |
| 50 | 187.4 | 153 | 158.6 | 171.6 | 138.4 | 148.3 | NA | 144.7 |
| 51 | 1.55 | 2.01 | 1.69 | 1.77 | 1.18 | 1.18 | 1.34 | 1.25 |
| 61 | NA | 53 | NA | NA | 27.8 | 31.6 | NA | NA |
| 3 | 42.9 | 53.8 | 45.9 | 47.3 | 27.9 | 30.1 | 44.3 | 42.9 |
| 4 | 98.5 | NA | 113.1 | 133.1 | NA | 102.1 | 65.1 | 82.5 |
| 13 | 4129.5 | NA | 2760.3 | 4072.1 | NA | 2673 | 2377.3 | 3194.3 |
| 8 | 0.0289 | 0.0696 | 0.0524 | 0.0887 | 0.0354 | 0.0232 | 0.0517 | 0.0517 |
| 16 | 0.144 | NA | 0.205 | 0.178 | NA | NA | 0.204 | 0.146 |
| 17 | 0.109 | 0.097 | 0.147 | 0.197 | 0.108 | 0.128 | 0.179 | 0.11 |
| 23 | 0.65 | 1.33 | 0.88 | 1.87 | 0.88 | 0.58 | 1.41 | 0.57 |
| 54 | 41.8 | 64.2 | 78.5 | 67.9 | 42 | 37.7 | 55.4 | 47 |
| 55 | 0.657 | 1.128 | 1.127 | 1.376 | 0.667 | 0.605 | 0.96 | 0.924 |
| 58 | 0.263 | 0.148 | 0.249 | 0.215 | 0.146 | 0.152 | 0.167 | 0.148 |

Table 262. Provided are the values of each of the parameters (as described above) measured in maize accessions (Line). Growth conditions are specified in the experimental procedure section.

TABLE 263
Measured parameters in Maize Inbred Field B 35K per acre (lines 57-64)

| Line/Correlation | | | | | | | | |
|---|---|---|---|---|---|---|---|---|
| ID | Line-57 | Line-58 | Line-59 | Line-60 | Line-61 | Line-62 | Line-63 | Line-64 |
| 5 | 87.5 | 78.8 | 86.4 | 76.6 | 90.1 | 93.7 | 93.6 | 57.6 |
| 9 | 100 | NA | 100 | NA | NA | NA | NA | 100 |
| 10 | 23.8 | 19.5 | 18.9 | 17.7 | 3.7 | 10.1 | 3.9 | NA |
| 24 | 4.55 | 3.19 | 4.46 | 4.39 | 3.37 | 3.96 | 4.02 | NA |
| 27 | 226.9 | 196.8 | 216.2 | 355.8 | 232.9 | 245.4 | 316.4 | NA |
| 14 | 217.3 | 186.6 | 202.7 | 352.6 | 217.6 | 239.5 | 300.8 | NA |
| 18 | 0.511 | 0.475 | 0.451 | 0.602 | 0.449 | 0.482 | 0.581 | NA |
| 35 | 8 | 7.3 | 8.7 | 8 | 11 | 9 | 2.3 | 17 |
| 36 | 60.5 | 75.4 | 84.5 | 54.9 | 92.2 | 40.4 | 43.4 | NA |
| 39 | 15.5 | 18.2 | 17.8 | 11.6 | 16.3 | 9.6 | 22 | NA |
| 40 | 1.38 | 1.78 | 2.48 | 1.84 | 2.73 | 0.43 | 3.92 | 0.27 |
| 42 | 137.5 | 163.6 | 145.8 | 147.2 | 174.9 | 154.7 | 198.7 | 56.5 |
| 48 | 0.97 | 1.87 | 0.89 | 3.92 | 4.69 | 4.71 | 5.1 | 7.76 |
| 49 | 0.294 | 0.269 | 0.331 | 0.392 | 0.429 | 0.236 | 0.408 | 0.157 |
| 41 | 12.7 | 13.3 | 13.3 | 12.7 | 12.7 | 12.2 | 12.9 | 11.5 |
| 52 | 35.5 | 37.2 | 43.4 | NA | 35.1 | NA | 43.2 | 31 |
| 53 | 727.6 | 664.8 | 688.6 | NA | 471.6 | NA | 540.6 | 458.1 |
| 56 | 335.2 | 284.5 | 280.2 | 183.6 | 334.9 | 185.8 | 168.5 | NA |
| 57 | 42.3 | 32.3 | 22.9 | 35.1 | 36 | 27.6 | 23.3 | NA |
| 59 | 15.73 | 12.49 | 9.62 | 14.05 | 15.08 | 12.46 | 11.5 | NA |
| 60 | 3.4 | 3.28 | 3.02 | 3.17 | 3.03 | 2.78 | 2.57 | NA |
| 1 | 44.8 | 46.1 | 44 | 51.3 | 55.8 | 40.7 | 43.9 | 25.6 |
| 2 | 10.2 | 14.3 | 18.6 | 12.4 | 19.6 | 5.8 | 19 | 3.8 |
| 6 | 40.1 | 42.5 | 40.7 | 49.5 | 54.1 | 36.6 | 41.5 | 21.1 |
| 7 | 10.2 | 14.3 | 18.6 | 12.4 | 19.6 | 5.8 | 19 | 3.8 |
| 20 | 4.28 | 4.65 | 4.56 | 4.61 | 4.48 | 3.87 | 4.02 | 3.27 |
| 21 | 1.58 | 1.86 | 2.09 | 1.55 | 1.96 | 1.13 | 2.09 | 0.86 |
| 11 | 3.08 | 4.6 | 3.91 | 2.71 | 3.29 | 2.43 | 6.1 | NA |
| 12 | 13 | 12.6 | 12.1 | 14.1 | 15.7 | 13.1 | 13.8 | 9.6 |
| 15 | 20.5 | 17.8 | 15.9 | 13.8 | 13.4 | 13.5 | 12.5 | 14.8 |
| 19 | 4.34 | 5.68 | 5.83 | 4.24 | 8.09 | 2.86 | 2.54 | NA |
| 22 | 1.06 | 1 | 1 | 1.12 | 1.25 | 1.12 | 1.79 | 1.19 |
| 25 | 50.8 | 60 | 51.7 | 78 | 70.3 | 62 | 78.7 | 40 |
| 26 | 56 | 67.4 | 71.1 | 54.7 | 80.2 | 34.7 | 38.4 | NA |
| 28 | 18.6 | 15.7 | 18.5 | 10.2 | 25.1 | 13.1 | 13.6 | NA |
| 29 | 0.185 | 0.232 | 0.203 | 0.063 | 0.186 | 0.091 | NA | NA |
| 30 | 14.1447 | 13.4321 | 14.0959 | 13.5207 | 12.9353 | 13.7609 | 13.5381 | 14.008 |
| 31 | 1 | 1 | 1 | 1 | 1.33 | 1 | 1 | 2 |
| 33 | 81 | 58.1 | 61.9 | 63.8 | 81 | 43.1 | 54.8 | NA |
| 32 | 21.6 | 16.3 | 16.4 | 29.5 | 18.8 | 12.3 | 11.6 | NA |
| 34 | 13.19 | 12.58 | 12.25 | 7.44 | 8.42 | 8.38 | 8.38 | NA |
| 37 | 14.9 | 17 | 16.3 | 16.1 | 17.7 | 18 | 16.2 | NA |
| 38 | 19.3 | 17.7 | 20.6 | 24.4 | 22.1 | 19.6 | 28 | 8.4 |
| 43 | 0.82 | 1.14 | 1.07 | 1.11 | 1.34 | 1.29 | 1.39 | 1.65 |
| 44 | 0.435 | 0.449 | 0.473 | 0.4 | 0.428 | 0.343 | 0.4 | 0.448 |
| 45 | 78.2 | 76 | 77 | 83.3 | 77 | 79 | 90 | 62 |
| 46 | 137 | 143.3 | 137.3 | 171 | 158.3 | 150 | 171 | 119 |
| 47 | 86.2 | 83.3 | 85.7 | 91.3 | 88 | 88 | 92.3 | 79 |
| 50 | 168 | 182.1 | 179.8 | 195.7 | 163.9 | 168.4 | 197.5 | 114.1 |
| 51 | 1.75 | 1.68 | 1.63 | 1.49 | 1.51 | 1.23 | 0.85 | 1.91 |
| 61 | 43.6 | 59.4 | 49.9 | NA | 35.8 | 40.2 | NA | NA |
| 3 | 39.8 | 59.6 | 47.8 | 54.9 | 31.3 | 36.7 | 49.1 | 33.4 |
| 4 | 110.7 | 106.2 | 123.7 | 82.3 | 112.1 | 87.8 | 99.6 | 115.6 |
| 13 | 2677.4 | 3096.7 | 3073.8 | 3599.3 | 3510.9 | 3018.9 | 5260 | 1699 |
| 8 | 0.0792 | 0.0627 | 0.069 | 0.078 | 0.0927 | 0.0525 | 0.0837 | 0.0169 |
| 16 | 0.422 | 0.183 | 0.314 | 0.169 | 0.286 | 0.149 | 0.14 | 0.137 |
| 17 | 0.141 | 0.134 | 0.168 | 0.166 | 0.222 | 0.135 | 0.13 | 0.104 |
| 23 | 1.64 | 0.93 | 1.37 | 0.72 | 1.17 | 0.7 | 0.7 | NA |
| 54 | 61.4 | 62.2 | 77 | 50.2 | 88.4 | 53.7 | 56 | 4.6 |
| 55 | 1.058 | 1.057 | 1.36 | 1.253 | 1.411 | 0.923 | 0.881 | 0.087 |
| 58 | 0.176 | 0.144 | 0.202 | 0.283 | 0.18 | 0.162 | 0.188 | NA |

Table 263. Provided are the values of each of the parameters (as described above) measured in maize accessions (Line). Growth conditions are specified in the experimental procedure section.

TABLE 264
Measured parameters in Maize Inbred Field B 35K per acre (lines 65-72)

| Line/Correlation | | | | | | | | |
|---|---|---|---|---|---|---|---|---|
| ID | Line-65 | Line-66 | Line-67 | Line-68 | Line-69 | Line-70 | Line-71 | Line-72 |
| 5 | 70.2 | 89.1 | NA | 90.8 | 86 | 88.1 | 92.3 | 79.8 |
| 9 | 93.2 | NA | 97.4 | NA | NA | NA | 100 | 88.1 |
| 10 | 20.1 | 8.2 | 16.6 | 5.8 | 26.9 | 10.4 | 16.4 | 8 |
| 24 | 4.39 | NA | 4.44 | 3.52 | 4.74 | 4.31 | 2.89 | 4.87 |
| 27 | 177.6 | NA | 124.3 | 264.8 | 214.7 | 248.7 | 168.3 | 204.5 |
| 14 | 165.5 | NA | 105.2 | 253.6 | 201.2 | 222.5 | 168.7 | 185.2 |
| 18 | 0.539 | NA | 0.291 | 0.513 | 0.487 | 0.52 | 0.327 | 0.52 |
| 35 | 8.7 | 10 | 14 | 9 | 7.7 | 10.5 | 10 | 6 |
| 36 | 107.9 | NA | 107.3 | 43.8 | 107.9 | 115.6 | 34.8 | 141 |
| 39 | 15.3 | 15.5 | 23.3 | 6.6 | 17.7 | 27.2 | 7.2 | 17.7 |
| 40 | 1.54 | 0.89 | 2.29 | 0.7 | 4.02 | 2.92 | 0.42 | NA |
| 42 | 143.1 | 178.3 | 167 | 190.5 | 185.7 | 133.6 | 174.7 | NA |
| 48 | 3.59 | 4.72 | 4.2 | 6.48 | 1.26 | 5.39 | 6.58 | NA |
| 49 | 0.357 | 0.399 | 0.224 | 0.289 | 0.253 | 0.508 | 0.172 | 0.54 |
| 41 | 10.9 | 13.9 | 14.7 | 9 | 13.9 | 14.9 | 9.6 | 12 |
| 52 | 38.1 | 33 | 32.1 | 35 | 43 | 33.9 | 27.9 | NA |
| 53 | 516.5 | 575.1 | 585.6 | 438.6 | 655.3 | 558.8 | 350 | NA |
| 56 | 315.4 | NA | 301 | 170 | 352.1 | 381.1 | 161.1 | 471 |
| 57 | 24.8 | NA | 23.7 | NA | 28.5 | 34.6 | NA | 39 |
| 59 | 11.19 | NA | 12.55 | NA | 11.41 | 15.44 | NA | 15.18 |
| 60 | 2.78 | NA | 2.4 | NA | 3.19 | 2.84 | NA | 3.26 |
| 1 | 51.4 | 42.5 | 42.1 | 44.8 | 45.9 | 62.6 | 37.2 | 71.5 |
| 2 | 11.2 | 9.2 | 17.6 | 8.5 | 22.7 | 16.2 | 5.1 | NA |
| 6 | 49.7 | 36.4 | 41.5 | 42.1 | 44.7 | 61.3 | 33 | 66.1 |
| 7 | 11.2 | 9.1 | 17.3 | 8.5 | 22.7 | 15.9 | 5.1 | NA |
| 20 | 4.83 | 4.37 | 3.86 | 4.02 | 4.51 | 4.81 | 3.02 | 5.28 |
| 21 | 1.52 | 1.46 | 1.86 | 1.12 | 2.37 | 1.79 | 0.86 | NA |
| 11 | 2.95 | 4.3 | 4.78 | 1.57 | 3.26 | 5.46 | 1.68 | NA |
| 12 | 13.4 | 12.2 | 13.8 | 14.2 | 12.7 | 16.4 | 15.4 | 17.3 |
| 15 | 13.5 | 17.5 | 18.2 | 12.5 | 15.2 | 16.5 | 12.5 | NA |
| 19 | 5.65 | NA | 6.6 | 3.39 | 6.81 | 6.85 | 3.7 | 7.91 |
| 22 | 1.17 | 1.1 | 1.12 | 1 | 1.04 | 1.25 | 1.33 | 1.19 |
| 25 | 41.3 | 58.7 | 28 | 76 | 49.3 | 59 | 58.7 | 42 |
| 26 | 92.5 | NA | 75.3 | 39.9 | 94.2 | 91.1 | 38.6 | 114.5 |
| 28 | 23.3 | NA | 16.6 | 13.8 | 25.2 | 23.2 | 4 | NA |
| 29 | 0.178 | NA | 0.226 | 0.163 | 0.342 | 0.18 | NA | NA |
| 30 | 12.0589 | 15.2702 | 13.21 | 12.1509 | 13.366 | 13.943 | 12.5159 | 12.1911 |
| 31 | 1 | 1 | 1 | 1.5 | 1 | 1 | 1 | 1 |
| 33 | 57.7 | NA | 40.5 | 45.7 | 78.6 | 101 | 26.7 | 101.5 |
| 32 | 11.1 | NA | 10.3 | 17 | 30.2 | 19 | 16.8 | 23.1 |
| 34 | 9.62 | 9.96 | 9.31 | 7.25 | 10.96 | 10.94 | 11.83 | 9.62 |
| 37 | 16.9 | 18.5 | 13 | 16.4 | 16.6 | 16.9 | 11.2 | 17.7 |
| 38 | 14.6 | 17.3 | 15.2 | 18.2 | 23.7 | 20.4 | 8.9 | 15.7 |
| 43 | 1.15 | 1.28 | 1.25 | 1.44 | 1.19 | 1.42 | 1.12 | NA |
| 44 | 0.37 | 0.461 | 0.476 | 0.346 | 0.464 | 0.531 | 0.43 | 0.356 |
| 45 | 74.7 | 78 | 74 | 79 | 78 | 74 | 79 | 68 |
| 46 | 124.7 | 146.7 | 116 | 164 | 135 | 143.5 | 147.7 | 116 |
| 47 | 83.3 | 88 | 88 | 88 | 85.7 | 84.5 | 89 | 74 |
| 50 | 155.9 | 190.8 | 173 | 116.4 | 174.5 | 222.3 | 115.9 | 171 |
| 51 | 1.53 | 1.52 | 1.89 | 1.25 | 1.73 | 2.51 | 1.06 | 1.89 |
| 61 | NA | 39.9 | NA | 46.6 | 49.2 | NA | 27.4 | 44.5 |
| 3 | 32.8 | 34.1 | 41.5 | 38.9 | 41.9 | 50.5 | 25.6 | 46 |
| 4 | 111.9 | 86.3 | 118.7 | 166.6 | 75.6 | 60.5 | 131.6 | NA |
| 13 | 2801 | 3269.6 | 2196.5 | 4430 | 2426.2 | 2805.4 | 3069 | NA |
| 8 | 0.0609 | 0.0599 | 0.0488 | 0.063 | 0.0638 | 0.1321 | 0.0369 | 0.1186 |
| 16 | 0.28 | 0.165 | 0.2 | 0.195 | 0.134 | 0.157 | 0.203 | NA |
| 17 | 0.145 | 0.141 | 0.139 | 0.168 | 0.167 | 0.174 | 0.108 | 0.138 |
| 23 | 1.45 | NA | 1.45 | 0.59 | 1.75 | 1.76 | 0.48 | 2.42 |
| 54 | 43.7 | 36.8 | 45.6 | 46.7 | 83 | 88.8 | 9.4 | 84.3 |
| 55 | 0.774 | 0.57 | 0.742 | 0.993 | 1.333 | 1.44 | 0.158 | 1.974 |
| 58 | 0.162 | NA | 0.182 | 0.223 | 0.185 | 0.196 | 0.181 | 0.182 |

Table 264. Provided are the values of each of the parameters (as described above) measured in maize accessions (Line). Growth conditions are specified in the experimental procedure section.

TABLE 265
Measured parameters in Maize Inbred Field B 35K per acre (lines 73-80)

| Line/Correlation | | | | | | | | |
|---|---|---|---|---|---|---|---|---|
| ID | Line-73 | Line-74 | Line-75 | Line-76 | Line-77 | Line-78 | Line-79 | Line-80 |
| 5 | 85.1 | 75.5 | 75.9 | 93.3 | 94.2 | 75.2 | 78.3 | 83.4 |
| 9 | NA | NA | 100 | NA | 74.2 | NA | 100 | 89.8 |
| 10 | 18.7 | 4.3 | 6.5 | 16.3 | 5.9 | 4.3 | NA | 23.8 |
| 24 | 5.47 | 3.16 | 4.08 | 3.77 | 4.99 | 3.02 | 5.43 | 5.42 |
| 27 | 250.2 | 238.7 | 224.2 | 273.4 | 244.7 | 260.6 | 169.8 | 189.1 |
| 14 | 238.1 | 222 | 213.8 | 262.2 | 208.8 | 238.8 | 160.9 | 184 |
| 18 | 0.49 | 0.477 | 0.44 | 0.551 | 0.486 | 0.525 | 0.387 | 0.409 |
| 35 | 6 | 12.7 | 14 | 9 | 9 | 10.5 | 21.3 | 15.3 |
| 36 | 41 | 76 | 83 | 15.6 | 103.4 | 77.8 | 90.1 | 57 |
| 39 | 11 | 12.9 | 18.7 | 8.1 | 19.6 | NA | NA | 11.5 |
| 40 | 0.9 | 1.15 | 0.9 | 0.18 | 1.51 | 1.14 | 0.29 | 0.75 |
| 42 | 141.4 | 204 | 239.2 | 153.1 | 137.9 | 175 | 205 | 184.8 |
| 48 | 3.38 | 2.72 | 5.56 | 2.58 | 2.15 | 5.12 | 7.39 | 5.86 |
| 49 | 0.347 | 0.341 | 0.271 | 0.253 | 0.448 | 0.286 | 0.284 | 0.551 |
| 41 | 12.2 | 14.4 | 15.7 | 12.8 | 11.5 | 15 | 14.2 | 11 |
| 52 | 33.1 | 39.8 | 32.1 | 28.2 | 41.8 | 36.4 | 28.6 | NA |
| 53 | 303.8 | 430.8 | NA | 448 | 511.1 | 505.3 | 422.8 | NA |
| 56 | 184.4 | 279.1 | 335.8 | 57.9 | 460.4 | 268.8 | 248.5 | 236.9 |
| 57 | 25.8 | 31.4 | 39.4 | 31.4 | NA | 24.2 | 24.9 | 31.3 |
| 59 | 13.24 | 14.81 | 16.69 | 13.82 | NA | 11.78 | 12.53 | 14.42 |
| 60 | 2.47 | 2.68 | 3.01 | 2.9 | NA | 2.61 | 2.5 | 2.77 |
| 1 | 34.9 | 56.6 | 56.2 | 31.8 | 66.3 | 50 | 42.8 | 51.8 |
| 2 | 9.8 | 12.5 | 8.7 | 4.4 | 15.9 | 11.7 | 6 | 12.9 |
| 6 | 33.6 | 54.1 | 52.4 | 27.4 | 62.9 | 48.3 | 39.2 | 46.5 |
| 7 | 9.7 | 12.5 | 8.6 | 4.4 | 15.8 | 11.6 | 6 | 12.9 |
| 20 | 3.4 | 4.41 | 4.14 | 3.21 | 4.48 | 4.48 | 3.8 | 4.2 |
| 21 | 1.29 | 1.49 | 1.29 | 0.91 | 1.51 | 1.3 | 0.97 | 1.7 |
| 11 | 3.72 | 3.35 | 4.08 | 2.44 | 4.83 | 7.29 | NA | 1.58 |
| 12 | 12.6 | 16.3 | 17.2 | 12.2 | 18.8 | 14.1 | 14.1 | 15.5 |
| 15 | 9.2 | 10.8 | 16.5 | 15.5 | 12.2 | 14 | 14.8 | 16.2 |
| 19 | 2.51 | 3.77 | 5.48 | 1.21 | 5.58 | 5.42 | 5.71 | 3.96 |
| 22 | 1 | 1.05 | 1 | 1 | 1 | 1 | 1.17 | 1.29 |
| 25 | 55.3 | 78.3 | 55 | 83 | 43 | 86.5 | 32.7 | 35 |
| 26 | 36.7 | 65.5 | 75.3 | 13.8 | 73.1 | 63.7 | 80 | 53.7 |
| 28 | 14.3 | 26 | 20.3 | 5.3 | 36.8 | 19.1 | 18.9 | 13.9 |
| 29 | 0.139 | 0.192 | 0.353 | 0.066 | 0.246 | 0.253 | NA | 0.067 |
| 30 | 14.6974 | 13.615 | 13.4348 | 13.7331 | 12.6121 | 15.3985 | 12.8171 | 13.6652 |
| 31 | 1.67 | 1 | 1.5 | 1 | 1.5 | 1 | 1 | 1 |
| 33 | 48.5 | 69.4 | 77.3 | 16.6 | 127.1 | 73.3 | 43.1 | 46.3 |
| 32 | 21.2 | 16.7 | 18.1 | 14.5 | 65 | 15.5 | 14.1 | 14.1 |
| 34 | 9.21 | 11.5 | 11.25 | 7.71 | 10.88 | 10.44 | NA | 10.56 |
| 37 | 12.9 | 16.4 | 18.8 | 17.1 | 15.7 | 16 | NA | 17.3 |
| 38 | 13.3 | 22.1 | 16.3 | 15.8 | 19.8 | 20.1 | 13.1 | 14.9 |
| 43 | 0.78 | 1.53 | 0.67 | 1.29 | 1.3 | 1.55 | 1.84 | 1.48 |
| 44 | 0.41 | 0.363 | 0.388 | 0.394 | 0.336 | 0.336 | 0.464 | 0.439 |
| 45 | 86.3 | 75.3 | 74 | 79 | 79 | 74 | 62 | 72.7 |
| 46 | 147.7 | 166.3 | 143 | 171 | 131 | 171 | 116 | 123 |
| 47 | 92.3 | 88 | 88 | 88 | 88 | 84.5 | 83.3 | 88 |
| 50 | 182.5 | 166.3 | 171 | 158.3 | 172.3 | 168.8 | 155.1 | 143.5 |
| 51 | 1.41 | 1.47 | 1.32 | 1.4 | 1.17 | 1.52 | 2.09 | 1.46 |
| 61 | NA | 43.2 | NA | 46.4 | 41.8 | NA | NA | NA |
| 3 | 26.4 | 43.6 | 55.2 | 44 | 38.7 | 39.6 | 27.8 | 47.6 |
| 4 | 109.6 | 131.2 | 149.8 | 99.4 | 133.3 | 91.5 | 281 | 108.6 |
| 13 | 2970.7 | 3671.9 | 4255 | 2573.7 | 3613.5 | 2581.9 | 6432 | 2965.3 |
| 8 | 0.0365 | 0.0824 | 0.0757 | 0.0266 | 0.0999 | 0.0879 | 0.0518 | 0.0585 |
| 16 | 0.311 | 0.191 | 0.382 | 0.233 | 0.304 | 0.194 | 0.135 | 0.371 |
| 17 | 0.113 | 0.136 | 0.138 | 0.146 | 0.15 | 0.128 | 0.154 | 0.108 |
| 23 | 0.91 | 0.92 | 1.41 | 0.28 | 2.59 | 0.84 | 1.38 | 1.34 |
| 54 | 17.9 | 74.6 | 72.7 | 26.4 | 78.5 | 62.2 | 27.9 | 40.9 |
| 55 | 0.285 | 1.493 | 1.274 | 0.445 | 1.318 | 1.318 | 0.491 | 0.648 |
| 58 | 0.262 | 0.198 | 0.153 | 0.189 | 0.448 | 0.186 | 0.232 | 0.195 |

Table 265. Provided are the values of each of the parameters (as described above) measured in maize accessions (Line). Growth conditions are specified in the experimental procedure section.

TABLE 266
Correlation between the expression level of selected genes and the phenotypic performance across
maize varieties grown in Field A 35K per acre (expression set 1-6)

| Gene | | | Exp. | Corr. | Gene | | | Exp. | Corr. |
|---|---|---|---|---|---|---|---|---|---|
| Name | R | P value | set | Set ID | Name | R | P value | set | Set ID |
| LBY478 | 0.71 | 1.47E−02 | 5 | 31 | LBY478 | 0.78 | 4.82E−03 | 5 | 37 |
| LBY478 | 0.73 | 6.68E−03 | 5 | 51 | LBY478 | 0.96 | 2.50E−07 | 1 | 17 |
| LBY478 | 0.73 | 1.08E−02 | 4 | 9 | LBY478 | 0.80 | 9.70E−03 | 6 | 9 |
| LBY479 | 0.70 | 1.20E−01 | 4 | 5 | LBY481 | 0.73 | 1.11E−02 | 5 | 53 |
| LBY481 | 0.70 | 1.62E−02 | 5 | 3 | LBY481 | 0.79 | 3.48E−03 | 5 | 18 |
| LBY481 | 0.71 | 4.58E−03 | 4 | 21 | LBY481 | 0.73 | 2.22E−03 | 6 | 44 |
| LBY481 | 0.74 | 1.51E−03 | 6 | 59 | LBY481 | 0.72 | 2.66E−03 | 6 | 55 |
| LBY481 | 0.73 | 3.32E−03 | 3 | 52 | LBY481 | 0.87 | 4.65E−05 | 3 | 17 |
| LBY481 | 0.72 | 3.68E−03 | 3 | 34 | LBY481 | 0.73 | 2.92E−03 | 3 | 25 |
| LBY481 | 0.78 | 1.02E−03 | 2 | 17 | LBY516 | 0.74 | 2.46E−03 | 4 | 31 |
| LBY516 | 0.76 | 1.05E−03 | 6 | 48 | LBY516 | 0.84 | 1.51E−04 | 3 | 45 |
| LBY517 | 0.71 | 1.39E−02 | 5 | 37 | LBY517 | 0.73 | 1.65E−02 | 1 | 5 |
| LBY517 | 0.71 | 1.50E−02 | 4 | 10 | LBY517 | 0.91 | 5.44E−06 | 3 | 17 |
| LBY517 | 0.70 | 5.08E−03 | 3 | 34 | LBY518 | 0.78 | 2.37E−02 | 6 | 60 |
| LBY518 | 0.75 | 2.22E−03 | 3 | 52 | LBY518 | 0.92 | 3.82E−06 | 3 | 17 |
| LBY518 | 0.76 | 1.76E−03 | 3 | 34 | LBY518 | 0.73 | 3.20E−03 | 3 | 25 |
| LBY519 | 0.77 | 2.17E−03 | 1 | 27 | LBY519 | 0.85 | 9.27E−04 | 4 | 10 |
| LBY519 | 0.74 | 1.78E−03 | 6 | 22 | LBY519 | 0.77 | 1.36E−03 | 2 | 42 |
| LBY519 | 0.71 | 4.11E−03 | 2 | 2 | LBY519 | 0.73 | 3.15E−03 | 2 | 15 |
| LBY519 | 0.72 | 3.75E−03 | 2 | 38 | | | | | |

Table 266. Provided are the correlations (R) between the genes expression levels in various tissues and the phenotypic performance. “Corr. ID “-correlation set ID according to the correlated parameters specified in Table 239. “Exp. Set”-Expression set specified in Table 237. “R” = Pearson correlation coefficient; “P” = p value

TABLE 267
Correlation between the expression level of selected genes and the
phenotypic performance across maize varieties grown in Field A 35K
per acre (expression set 7)

| Gene Name | R | P value | Exp. set | Corr. Set ID |
|---|---|---|---|---|
| LBY481 | 0.82 | 5.59E−05 | 7 | 17 |

Table 267. Provided are the correlations (R) between the genes expression levels in various tissues and the phenotypic performance.
“Corr. ID “ - correlation set ID according to the correlated parameters specified in Table 239.
“Exp. Set” - Expression set specified in Table 237.
“R” = Pearson correlation coefficient;
“P” = p value.

TABLE 268
Correlation between the expression level of selected genes and the phenotypic performance
across maize varieties grown in Field B 35K per acre

| Gene | | | Exp. | Corr. | Gene | | | Exp. | Corr. |
|---|---|---|---|---|---|---|---|---|---|
| Name | R | P value | Set | Set ID | Name | R | P value | Set | Set ID |
| LBY477 | 0.77 | 2.31E−03 | 6 | 32 | LBY477 | 0.73 | 4.46E−03 | 6 | 58 |
| LBY477 | 0.87 | 2.49E−02 | 1 | 8 | LBY477 | 0.92 | 1.00E−02 | 1 | 11 |
| LBY477 | 0.77 | 7.36E−02 | 1 | 19 | LBY477 | 0.80 | 5.71E−02 | 1 | 33 |
| LBY477 | 0.71 | 1.11E−01 | 1 | 36 | LBY477 | 0.92 | 9.56E−03 | 1 | 6 |
| LBY477 | 0.81 | 5.17E−02 | 1 | 55 | LBY477 | 0.85 | 3.03E−02 | 1 | 54 |
| LBY477 | 0.87 | 2.60E−02 | 1 | 1 | LBY477 | 0.89 | 1.66E−02 | 1 | 20 |
| LBY477 | 0.71 | 1.16E−01 | 1 | 39 | LBY477 | 0.75 | 8.55E−02 | 1 | 37 |
| LBY477 | 0.74 | 9.31E−03 | 5 | 29 | LBY478 | 0.73 | 2.67E−02 | 2 | 25 |
| LBY478 | 0.74 | 2.34E−02 | 2 | 43 | LBY478 | 0.71 | 3.19E−02 | 2 | 46 |
| LBY478 | 0.81 | 8.06E−03 | 2 | 35 | LBY478 | 0.76 | 1.05E−02 | 6 | 53 |
| LBY478 | 0.83 | 4.03E−02 | 1 | 10 | LBY478 | 0.93 | 6.42E−03 | 1 | 13 |
| LBY478 | 0.96 | 1.86E−03 | 1 | 42 | LBY478 | 0.71 | 1.13E−01 | 1 | 33 |
| LBY478 | 0.87 | 2.38E−02 | 1 | 50 | LBY478 | 0.92 | 9.21E−03 | 1 | 6 |
| LBY478 | 0.95 | 4.28E−03 | 1 | 12 | LBY478 | 0.96 | 1.98E−03 | 1 | 31 |
| LBY478 | 0.90 | 1.41E−02 | 1 | 38 | LBY478 | 0.87 | 2.43E−02 | 1 | 14 |
| LBY478 | 0.93 | 7.18E−03 | 1 | 1 | LBY478 | 0.72 | 1.09E−01 | 1 | 20 |
| LBY478 | 0.94 | 5.44E−03 | 1 | 45 | LBY478 | 0.72 | 1.10E−01 | 1 | 18 |
| LBY478 | 0.76 | 8.14E−02 | 1 | 27 | LBY478 | 0.71 | 4.86E−02 | 3 | 59 |
| LBY478 | 0.74 | 3.55E−02 | 3 | 57 | LBY478 | 0.71 | 7.41E−02 | 3 | 16 |
| LBY478 | 0.77 | 3.45E−03 | 4 | 50 | LBY478 | 0.90 | 7.64E−05 | 4 | 41 |
| LBY479 | 0.71 | 4.92E−02 | 6 | 9 | LBY479 | 0.84 | 3.46E−02 | 1 | 26 |
| LBY479 | 0.76 | 8.00E−02 | 1 | 36 | LBY479 | 0.80 | 5.83E−02 | 1 | 54 |
| LBY479 | 0.71 | 1.10E−01 | 1 | 35 | LBY479 | 0.77 | 7.39E−02 | 1 | 37 |
| LBY479 | 0.71 | 6.55E−03 | 4 | 35 | LBY481 | 0.81 | 8.81E−03 | 2 | 4 |
| LBY481 | 0.70 | 5.17E−02 | 2 | 29 | LBY481 | 0.75 | 1.95E−02 | 2 | 2 |
| LBY481 | 0.75 | 1.89E−02 | 2 | 7 | LBY481 | 0.82 | 1.81E−03 | 6 | 16 |
| LBY481 | 0.88 | 2.05E−02 | 1 | 11 | LBY481 | 0.75 | 8.72E−02 | 1 | 2 |
| LBY481 | 0.73 | 1.01E−01 | 1 | 6 | LBY481 | 0.72 | 1.08E−01 | 1 | 20 |
| LBY481 | 0.74 | 8.99E−02 | 1 | 7 | LBY481 | 0.78 | 6.65E−02 | 1 | 39 |
| LBY481 | 0.74 | 9.21E−02 | 1 | 21 | LBY481 | 0.74 | 6.29E−03 | 4 | 33 |
| LBY481 | 0.97 | 1.23E−07 | 4 | 32 | LBY481 | 0.73 | 6.84E−03 | 4 | 36 |
| LBY481 | 0.71 | 6.04E−03 | 4 | 31 | LBY481 | 0.80 | 1.95E−03 | 4 | 56 |
| LBY516 | 0.81 | 5.27E−02 | 1 | 20 | LBY516 | 0.76 | 7.96E−02 | 1 | 18 |
| LBY516 | 0.72 | 2.48E−03 | 5 | 47 | LBY517 | 0.72 | 1.05E−01 | 1 | 11 |
| LBY517 | 0.76 | 8.14E−02 | 1 | 2 | LBY517 | 0.75 | 8.43E−02 | 1 | 7 |
| LBY517 | 0.82 | 4.43E−02 | 1 | 39 | LBY517 | 0.75 | 8.59E−02 | 1 | 21 |
| LBY518 | 0.73 | 1.01E−01 | 1 | 43 | LBY519 | 0.71 | 1.12E−01 | 2 | 57 |

Table 268. Provided are the correlations (R) between the genes expression levels in various tissues and the phenotypic performance.
“Corr. ID “ - correlation set ID according to the correlated parameters specified in Table 240.
“Exp. Set” - Expression set specified in Table 238.
“R” = Pearson correlation coefficient;
“P” = p value.

### Example 24

### Production of Maize Transcriptome and High Throughput Correlation Analysis Using 60K Maize Oligonucleotide Micro-Array and Illumina RNAseq

[1668] In order to produce a high throughput correlation analysis, the present inventors utilized two methods:
[1669] 1. Maize oligonucleotide micro-array, produced by Agilent Technologies [chem. (dot) agilent (dot) com/Scripts/PDS (dot) asp?1Page=50879]. The array oligonucleotide represents about 60K Maize genes and transcripts designed based on data from Public databases (Example 23).
[1670] 2. Illumina [illumina (dot) com ] high throughput sequencing technology, by using TruSeq Stranded Total RNA with Ribo-Zero Plant kit [illumina (dot) com/products/truseq-stranded-total-ma-plant. (dot) html].

[1671] To define correlations between the levels of RNA expression and yield, biomass components or vigor related parameters, various plant characteristics of 49 different Maize

[1672] Hybrids were analyzed. Among them, 27 Hybrids encompassing the observed variance were selected for RNA expression analysis. The correlation between the RNA levels and the characterized parameters was analyzed using Pearson correlation test [davidmlane (dot) com/hyperstat/A34739 (dot) html].

[1673] Experimental Procedures

[1674] 49 Maize Hybrid lines were grown in 4 repetitive plots in 2 fields creating 3 different panels, as following: In field “A” Maize seeds were planted at densities of 35K and 47K per acre and grown using dry fall commercial fertilization, little tillage and were preceded by Maize crop. In field “B” Maize seeds were planted at density of 35K per acre and grown using swine manure fertilization, tillage and were preceded by Soybean crop. Tissues were collected from all the fields at different developmental stages including Ear leaf (V9, R2-R3), Internode\Stem (V10, R2-R3), Ear basal zone (VT-R1, R2-R3), Ear distal zone (VT-R1, R2-R3), and Female Meristem (V10).

[1675] Listed below are the tissues which RNA was extracted from, proceeding by Microarray or RNAseq (high throughput sequencing) analysis:

[1676] Field “A” (Panel 1) with 35K plants per acre—Ear leaf (R2-R3), Internode\Stem (V10, R2-R3), and Female Meristem (V10).

[1677] Field “A” (Panel 2) with 47K plants per acre—Internode\Stem (V10, R2-R3), and Female Meristem (V10).

[1678] Field “B” (Panel 3) with 35K plants per acre—Ear leaf (R2-R3), Female Meristem (V10).

[1679] These tissues, representing different plant characteristics, were sampled and RNA was extracted as described in “GENERAL EXPERIMENTAL AND BIOINFORMATICS METHODS”. For convenience, each transcriptome (whether analyzed by micro-array expression or RNAseq) received a Set ID, and its corresponding tissue type information was summarized in Tables 269-271 and 272-274 respectively, below.

TABLE 269
Tissues used for Maize transcriptome expression sets of field A 35K

| Expression Set | Set ID |
|---|---|
| Internode\Stem at reproductive stage R2-R3 | 1 |
| Female meristem at vegetative stage V10 | 2 |

Table 269: Provided are the maize transcriptome expression sets and identification numbers (IDs) for samples originating from field A (planting density is 35K).
Stem = the stem tissue directly below the main ear;

TABLE 270
Tissues used for Maize transcriptome expression sets of field A 47K

| Expression Set | Set ID |
|---|---|
| Internode\Stem at reproductive stage R2-R3 | 1 |
| Female meristem at vegetative stage V10 | 2 |

Table 270: Provided are the maize transcriptome expression sets and identification numbers (IDs) for samples originating from field A ((planting density is 47K).
Stem = the stem tissue directly below the main ear;

TABLE 271
Tissues used for Maize transcriptome expression sets of field B 35K

| Expression Set | Set ID |
|---|---|
| Female meristem at vegetative stage V10 | 1 |

Table 271: Provided are the maize transcriptome expression sets for samples originating from field B (planting density is 35K).

TABLE 272
Tissues used for Maize RNAseq Expression Sets of field A 35K

| Expression Set | Set ID |
|---|---|
| Ear leaf at reproductive stage R2-R3 | 1 |
| Internode\Stem at vegetative stage V10 | 2 |

Table 272. Provided are the maize RNAseq sets and identification numbers (IDs) for samples originating from field A (planting density is 35K).
Ear leaf = the leaf directly beneath the main ear;
Internode = area of the stem between nodes adjacent to the ear.
The samples were taken for RNA sequencing analysis (RNAseq).

TABLE 273
Tissues used for Maize RNAseq expression sets of field A 47K

| Expression Set | Set ID |
|---|---|
| Internode\Stem at vegetative stage V10 | 1 |

Table 273. Provided are the maize RNAseq sets and identification numbers (IDs) for samples originating from field A (planting density is 47K).
Internode = area of the stem between nodes adjacent to the ear.
The samples were taken for RNA sequencing analysis (RNAseq).

TABLE 274
Tissues used for Maize RNAseq expression sets of field B 35K

| Expression Set | Set ID |
|---|---|
| Ear leaf at reproductive stage R2-R3 | 1 |

Table 274. Provided are the maize RNAseq sets and identification numbers (IDs) for samples originating from field B (planting density is 35K).
Ear leaf = the leaf directly beneath the main ear.
The samples were taken for RNA sequencing analysis (RNAseq).

[1680] The following parameters were collected:

[1681] Plant height [cm]—Plants were characterized for height at several time points along the vegetative growth as well as at harvesting. In each time point, 6 plants were measured for their height using a measuring tape. Height was measured from ground level to top of the plant (below the tassel in mature plants).

[1682] NDVI (Normalized Difference Vegetation Index) [ratio]—Measured with portable NDVI sensor. One measurement per plot of a fixed duration (depending on plot size), approximately 5 seconds for a 5 meter plot was measured at V5 and V8 developmental stages.

[1683] Main cob DW [gr]—dry weight of the cob of the main ear, without grains.

[1684] Number days to heading [num of days]—number of days from sowing until the day in which 50% or more of plants within the plot reached tassel emergence.

[1685] SPAD (VT) [R2) [SPAD units]—Chlorophyll content was determined using a Minolta SPAD 502 chlorophyll meter. SPAD meter readings were done on fully developed leaf. Three measurements per leaf were taken per plot.

[1686] % Yellow leaves number (VT) [SP) [%]—as described in Formula 69. Middle stem width [cm]—Measurement of the width in the middle of the internode below the main ear with a caliper.

[1687] Number days to silk [num of days]—number of days from sowing until the day in which 50% or more of plants within the plot have emerged silks (Silks first emerge from the husk). Ear row number—count of number of kernel rows per main ear (horizontal).

[1688] Middle stem Brix [brix°]—applied pressure on the stem from the top (near the ear—shank) until a drop is secreted and then placed on a refractometer for Brix° analysis.

[1689] Lodging [1-3]—Plants were subjectively evaluated and categorized into 3 groups. 1=plant is erect; 2=plant is semi-lodged; 3=plant is fully lodged.

[1690] Number days to maturity [num of days]—number of days from sowing until the day in which the husks are dry and the grains in the ear are dry and stiff.

[1691] Ear Area [cm²]—At the end of the growing period, ears were photographed and images were processed using the below described image processing system. The Ear area was measured from those images and was divided by the number of ears.

[1692] Ear filled grain area [cm²]—At the end of the growing period, ears were photographed and images were processed using the below described image processing system. The Ear area filled with kernels was measured from those images and was divided by the number of Ears.

[1693] Specific leaf area [cm²/gr.]—as described in Formula 37.

[1694] % Canopy coverage (R4) [%]—percent Canopy coverage at R4 stage (24-28 days after silking). The % Canopy coverage is calculated using Formula 32 above.

[1695] Total ears DW per plant (SP) [gr.]—The weight of all the main ears in the plot harvested at the end of the trial divided by the number of plants in that plot.

[1696] Ear growth rate (VT to R2) [gr./day]—Accumulated main ear dry weight between VT (tassel emergence) and R2 (10-14 days after silking) developmental stages, divided by number of days between these two stages.

[1697] Ear Length [cm]—At the end of the growing period, ears were photographed and images were processed using the below described image processing system. The Ear length was measured from those images and was divided by the number of ears.

[1698] Ear Width [cm]—At the end of the growing period ears were photographed and images were processed using the below described image processing system. The Ear width was measured from those images.

[1699] ⅓ ear grain area [cm²]—At the end of the growing period, ears were photographed and images were processed using the below described image processing system. Only the top ⅓ of the ear area was measured from those images and was divided by the number of ears.

[1700] ⅓ ear 1000 grains weight [gr.]—Top ⅓ main ear grains were sampled, and a fraction (˜25 gr) of grains from this sample was used for grain number count using image processing system (described below). Calculation of 1000 grains weight was then applied (according to Formula 14)

[1701] Average Leaf Area per plant [cm²]—total leaf area divided by the number of plants calculated using image processing system (described below).

[1702] Blisters number per ear—calculated using image processing system (described below). The total row number was multiplied by the number of kernels in each row.

[1703] Cob Area [cm²]—multiply between the width and the length of the cob without kernels, using image processing system (described below).

[1704] Cob density [gr/cm³]—calculated by dividing the dry cob dry weight (without kernels) by the volume of the cob using image processing system (described below).

[1705] Cob Length [cm]—measured using image processing system (described below).

[1706] % Stalk Lodging[%]—the percentage of plants in a given plot which are lodged.

[1707] Brace root number in lowest node [number]—the number of brace roots originating from the lowest node were counted.

[1708] The image processing system was used, which consists of a personal desktop computer (Intel P4 3.0 GHz processor) and a public domain program—ImageJ 1.37, Java based image processing software, which was developed at the U.S. National Institutes of Health and is freely available on the internet at rsbweb (dot) nih (dot) gov/. Images were captured in resolution of 10 Mega Pixels (3888×2592 pixels) and stored in a low compression JPEG (Joint Photographic Experts Group standard) format. Next, image processing output data for—Cob length, density and area; Ear length and width; ⅓ ear 1000 grains weight and area; blisters number per ear; Avr. (average) Leaf Area per plant; was saved to text files and analyzed using the JMP statistical analysis software (SAS institute).

[1709] Additional parameters were collected either by sampling several plants per plot or by measuring the parameter across all the plants within the plot.

[1710] Ears per plant [num]—number of ears per plant was counted.

[1711] Total Leaf Area per plant [cm²]—Total measured leaf area in a plot divided by the number of plants in that plot.

[1712] 1000 grain weight [gr.]—as described in Formula 14.

[1713] Grains per row [num]—The number of grains per row was counted.

[1714] Harvest Index (HI) [ratio]—The harvest index per plant was calculated using Formula 16 above.

[1715] Cob width [cm]—The diameter of the cob without grains was measured using a ruler.

[1716] Total plant biomass [kg]/Total N content [gr.]—The ratio of the total plant material weight (including cob) divided by the total N content of the whole plant (including cob).

[1717] Total plant biomass [kg]/N content of Vegetative [gr.]—The ratio of the total plant material weight (including cob) divided by the total N content of the vegetative material (without the cob).

[1718] Ear tip uniformity [ratio]—The yield of the ear tip (the top ⅓ of the ear) divided by the ear tip grain area CV (coefficient of variation)

[1719] Yield per ear filling rate [gr./day]—The ratio of grain yield per ear (gr) to the grain fill duration in days.

[1720] 1000 grain weight filling rate [gr./day]—calculated using Formula 36.

[1721] Grain filling duration [num of days]—as described in Formula 70.

[1722] Plant height growth [cm/day]—plant height was measured once a week (as described above) and divided by the sum of days during the measurement period.

[1723] Main Ear Grains yield [gr]—ears were dried, grains were manually removed and weighed.

[1724] Anthesis silking interval [num of days]—A difference of the average number of days between the maize tassel emergence and the first visible silk (stigma) emergence.

[1725] Average ⅓ ear Grains number—total number of grains counted in the upper ⅓ part of the main ear divided by the number of plants measured.

[1726] Average Ears DW per plant [gr]—the dry weight of ears divided by the number of plants.

[1727] Average internode length [cm]—average length of the stem internode as described in formula 68.

[1728] Average Tassel DW per plant [gr]—total tassel dry weight divided by the number of plants.

[1729] Average Total plants biomass [kg]—total plant biomass (vegetative and reproductive) divided by the number of plants.

[1730] Blisters number in one row—blisters were manually counted in entire row (top to bottom of ear).

[1731] Moisture [%]—the percent of moisture in the grains was obtained by the combine at harvest.

[1732] Bushels per acre [kg]—the amount of bushels per acre was obtained by the combine at harvest.

[1733] Bushels per plant [kg]—bushels per acre divided by the total stand count of the plants.

[1734] N content of whole plant (VT) [%]—plants (including ear) were fully dried and then sent to lab for analysis of nitrogen content

[1735] Calculated grains per ear [number]—calculated by dividing the 1000 grains weight by 1000 and multiply by the total grains weight.

[1736] Grains in tip*ratio tip vs. base TGW [ratio]—calculation, multiply the amount of grains in the top ⅓ of the ear with the ratio between 1000 grain weight of the top ⅓ and lower ⅔ of the ear.

[1737] Tables 275-277 hereinbelow provide the Maize correlated parameters (vectors) with microarray (MA) and RNA sequencing (RNAseq) for the various fields studied.

TABLE 275
Maize correlated parameters with MA and RNAseq of Field A 35K
per acre (vectors) [parameters set 1)

| | Correlation |
|---|---|
| Correlated parameter with | ID |
| Calculated grains per ear [num] | 1 |
| Cob Area [cm²] | 2 |
| Cob density [gr/cm³] | 3 |
| Cob Length [cm] | 4 |
| Middle stem brix (R2) [brix°] | 5 |
| Cob width [cm] | 6 |
| Middle stem width (R2) [cm] | 7 |
| Middle stem width (VT) [cm] | 8 |
| Moisture [%] | 9 |
| N content of whole plant (VT) [%] | 10 |
| Ear Area [cm²] | 11 |
| NDVI (V5) [ratio] | 12 |
| NDVI (V8) [ratio] | 13 |
| Num days to Heading [num of days] | 14 |
| Num days to Maturity [num of days] | 15 |
| Num days to Silk [num of days] | 16 |
| % Canopy coverage (R4) [%] | 17 |
| Ear Filled Grain Area [cm²] | 18 |
| Ear growth rate (VT to R2) [gr/day] | 19 |
| Plant height [cm] | 20 |
| Plant height growth [cm/day] | 21 |
| % Stalk Lodging [%] | 22 |
| % yellow leaves number (VT) [%] | 23 |
| 1 vs 3 ear 1000 grains weight [gr] | 24 |
| 1 vs 3 ear Grain area [cm²] | 25 |
| Ear length [cm] | 26 |
| Ear row number (R2) [num] | 27 |
| Ear tip uniformity [ratio] | 28 |
| 1000 grain weight filling rate [gr/day] | 29 |
| 1000 grains weight [gr] | 30 |
| Ear Width [cm] | 31 |
| Ears per plant (R2) [num] | 32 |
| SPAD (R2) [SPAD units] | 33 |
| Grain filling duration [num of days] | 34 |
| SPAD (VT) [SPAD units] | 35 |
| Anthesis silking interval [num of days] | 36 |
| Specific leaf area (VT) [cm²/gr] | 37 |
| Avr 1 vs 3 ear Grains number [num] | 38 |
| Avr Ears DW per plant (R2) [gr] | 39 |
| Avr internode length [cm] | 40 |
| Avr Leaf Area per plant (R2) [cm²] | 41 |
| Grains in tip * ratio tip vs. base TGW [ratio] | 42 |
| Grains per row [num] | 43 |
| Total ears DW per plant (SP) [gr] | 44 |
| Total leaf area (R2) [cm²] | 45 |
| Harvest index [ratio] | 46 |
| Lodging [num] | 47 |
| Avr Tassel DW per plant (VT) [gr] | 48 |
| Avr Total plants biomass (SP) [kg] | 49 |
| Blisters number in one row [num] | 50 |
| Blisters number per ear [num] | 51 |
| BRACE root num in lowest node [num] | 52 |
| bushels per acre [kg] | 53 |
| bushels per plant [kg] | 54 |
| Main cob DW [gr] | 55 |
| Main Ear Grains yield [gr] | 56 |
| Yield per ear filling rate [gr/day] | 57 |

Table 275. “Avr.” = Average,
⅓ Ear = the 3^{rd} most distant part of the Ear from the stem.
″VT″ = Tassel emergence.
″R2″ = 10-14 days after silking,
“SP” = selected plants,
″H″ = Harvest.
″R4″ = 24-28 days after silking,
″V5″ = 5 leaves appear and initiation of tassel and ear.
″DW″ = Dry Weight,
“num” = number,
“kg” = kilogram(s),
“cm” = centimeter(s),
“mm” = millimeter(s),
″gr″ = grams;
″%″ = percent;
″ratio″ = values between −1 and 1.
“vs” = versus.

TABLE 276
Maize correlated parameters with MA and RNAseq of Field A 47K
per acre (vectors) [parameters set 2)

| | Correlation |
|---|---|
| Correlated parameter with | ID |
| SPAD (R2) [SPAD units] | 1 |
| % Canopy coverage (R4) [%] | 2 |
| Ear length [cm] | 3 |
| SPAD (VT) [SPAD units] | 4 |
| Specific leaf area (VT) [cm²/gr] | 5 |
| % Stalk Lodging [%] | 6 |
| % yellow leaves number (VT) [%] | 7 |
| 1 vs 3 ear 1000 grains weight [gr] | 8 |
| Ear row number (R2) [num] | 9 |
| Ear tip uniformity [ratio] | 10 |
| Ear Width [cm] | 11 |
| 1 vs 3 ear Grain area [cm²] | 12 |
| Ears per plant (R2) [num] | 13 |
| Grain filling duration [num of days] | 14 |
| Total ears DW per plant (SP) [gr] | 15 |
| Total leaf area (R2) [cm²] | 16 |
| 1000 grain weight filling rate [gr/day] | 17 |
| 1000 grains weight [gr] | 18 |
| Grains in tip * ratio tip vs. base TGW [ratio] | 19 |
| Grains per row [num] | 20 |
| Anthesis silking interval [num of days] | 21 |
| Harvest index [ratio] | 22 |
| Avr 1 vs 3 ear Grains number [num] | 23 |
| Avr Ears DW per plant (R2) [gr] | 24 |
| Avr internode length (cm] | 25 |
| Avr Leaf Area per plant (R2) [cm²] | 26 |
| Lodging [num] | 27 |
| Yield per ear filling rate | 28 |
| Avr Tassel DW per plant (VT) [gr] | 29 |
| Avr Total plants biomass (SP) [kg] | 30 |
| Main cob DW [gr] | 31 |
| Main Ear Grains yield [gr] | 32 |
| Middle stem brix (R2) [brix°] | 33 |
| Blisters number in one row [num] | 34 |
| Blisters number per ear [num] | 35 |
| BRACE root num in lowest node [num] | 36 |
| bushels per acre [kg] | 37 |
| Middle stem width (R2) [cm] | 38 |
| Middle stem width (VT) [cm] | 39 |
| Moisture [%] | 40 |
| N content of whole plant (VT) [%] | 41 |
| NDVI (V5) [ratio] | 42 |
| NDVI (V8) [ratio] | 43 |
| bushels per plant [kg] | 44 |
| Calculated grains per ear [num] | 45 |
| Cob Area [cm²] | 46 |
| Cob density [gr/cm³] | 47 |
| Cob Length [cm) | 48 |
| Num days to Heading [num of days] | 49 |
| Num days to Maturity [num of days] | 50 |
| Num days to Silk [num of days] | 51 |
| Cob width [cm] | 52 |
| Plant height [cm] | 53 |
| Plant height growth [cm/day] | 54 |
| Ear Area [cm²] | 55 |
| Ear Filled Grain Area [cm²] | 56 |
| Ear growth rate (VT to R2) [gr/day] | 57 |

Table 276. “Avr.” = Average,
⅓ Ear = the 3^{rd} most distant part of the Ear from the stem,
″VT″ = Tassel emergence,
″R2″ = 10-14 days after silking,
“SP” = selected plants,
″H″ = Harvest,
″R″ = 24-28 days after silking,
″V5″ = 5 leaves appear and initiation of tassel and ear.
″DW″ = Dry Weight,
“num” = number,
“kg” = kilogram(s),
“cm” = centimeter(s),
“mm” = millimeter(s),
″gr″ = grams;
″%″ = percent;
″ratio″ = values between −1 and 1;
“vs” = versus.

TABLE 277
Maize correlated parameters with MA and RNAseq of Field B 35K
per acre (vectors) [parameters set 3)

| | Correlation |
|---|---|
| Correlated parameter with | ID |
| Ear Filled Grain Area [cm²] | 1 |
| Ear growth rate (VT to R2) [gr/day] | 2 |
| Num days to Silk [num of days] | 3 |
| Plant height [cm] | 4 |
| Plant height growth [cm/day] | 5 |
| % Canopy coverage (R4) [%] | 6 |
| % Stalk Lodging [%] | 7 |
| % yellow leaves number (VT) [%] | 8 |
| 1 vs 3 ear 1000 grains weight [gr] | 9 |
| 1 vs 3 ear Grain area [cm²] | 10 |
| Ear length [cm] | 11 |
| Ear row number (R2) [num] | 12 |
| Ear tip uniformity [ratio] | 13 |
| Ear Width [cm] | 14 |
| Ears per plant (R2) [num] | 15 |
| 1000 grain weight filling rate [gr/day] | 16 |
| 1000 grains weight [gr] | 17 |
| Grain filling duration [num of days] | 18 |
| SPAD (VT) [SPAD units] | 19 |
| Specific leaf area (VT) [cm²/gr] | 20 |
| Total ears DW per plant (SP) [gr] | 21 |
| Anthesis silking interval [num of days] | 22 |
| Avr 1 vs 3 ear Grains number [num] | 23 |
| Grains in tip * ratio tip vs. base TGW [ratio] | 24 |
| Grains per row [num] | 25 |
| Total leaf area (R2) [cm²] | 26 |
| Avr Ears DW per plant (R2) [gr] | 27 |
| Avr internode length [cm] | 28 |
| Avr Leaf Area per plant (R2) [cm²] | 29 |
| Harvest index [ratio] | 30 |
| Avr Tassel DW per plant (VT) [gr] | 31 |
| Avr Total plants biomass (SP) [kg] | 32 |
| Lodging [num] | 33 |
| Blisters number in one row [num] | 34 |
| Blisters number per ear [num] | 35 |
| Yield per ear filling rate | 36 |
| bushels per acre [kg] | 37 |
| bushels per plant [kg] | 38 |
| Main cob DW [gr] | 39 |
| Calculated grains per ear [num] | 40 |
| Cob Area [cm²] | 41 |
| Cob density [gr/cm³] | 42 |
| Cob Length [cm] | 43 |
| Main Ear Grains yield [gr] | 44 |
| Middle stem brix (R2) [brix°] | 45 |
| Cob width [cm] | 46 |
| Middle stem width (R2) [cm] | 47 |
| Middle stem width (VT) [cm] | 48 |
| Moisture [%] | 49 |
| Ear Area [cm²] | 50 |
| N content of whole plant (VT) [%] | 51 |
| NDVI (V5) [ratio] | 52 |
| NDVI (V8) [ratio] | 53 |
| Num days to Heading [num of days] | 54 |
| Num days to Maturity [num of days] | 55 |

Table 277. “Avr.” = Average,
⅓ Ear = the 3^{rd} most distant part of the Ear from the stem,
″VT″ = Tassel emergence,
″R2″ = 10-14 days after silking,
“SP” = selected plants,
″H″ = Harvest,
″R″ = 24-28 days after silking,
″V5″ = 5 leaves appear and initiation of tassel and ear.
″DW″ = Dry Weight,
“num” = number,
“kg” = kilogram(s),
“cm” = centimeter(s),
“mm” = millimeter(s),
″gr″ = grams;
″%″ = percent;
″ratio″ = values between −1 and 1;
“vs” = versus.

[1738] Experimental Results

[1739] 49 maize hybrids were characterized for parameters, as described above. The average for each parameter was calculated using the JMP software, and values are summarized in Tables 278-293 below. Subsequent correlation between the various transcriptome sets for all or sub sets of lines was done by the bioinformatic unit and results were integrated into the database (Table 294-298 below).

TABLE 278
Measured parameters in MA of Maize Field A 35K per acre (lines 1-8)

| | Line | | | | | | | |
|---|---|---|---|---|---|---|---|---|
| Correlation ID | Line-1 | Line-2 | Line-3 | Line-4 | Line-5 | Line-6 | Line-7 | Line-8 |
| 1 | 579.1 | 591.7 | 467.9 | 596.6 | 572.7 | 531.5 | 499.3 | 560 |
| 2 | 39.4 | 42 | 39 | 44.5 | 36.7 | 38.1 | 32.5 | 37 |
| 3 | 0.214 | 0.132 | 0.144 | 0.144 | 0.138 | 0.148 | 0.113 | 0.226 |
| 4 | 18.3 | 19.1 | 18.2 | 18.8 | 16.7 | 17.4 | 15.4 | 17.5 |
| 5 | 10.28 | 7.97 | 7.45 | 9.5 | 7.53 | 8.39 | 8.63 | 9.25 |
| 6 | 2.74 | 2.8 | 2.71 | 3.02 | 2.78 | 2.77 | 2.68 | 2.68 |
| 7 | 15.5 | 15.4 | 15.3 | 18.4 | 15.6 | 18.7 | 15.5 | 16.5 |
| 8 | 14.9 | 16.6 | 15.9 | 16.9 | 16.5 | 17.9 | 15.8 | 15.7 |
| 9 | 19.1 | 16.4 | 15.8 | 17.2 | 19.1 | 21.6 | 19.4 | 17.8 |
| 10 | 1.66 | 1.62 | 1.67 | 1.6 | 1.6 | 1.87 | 1.38 | 1.86 |
| 11 | 76.8 | 80.9 | 70.2 | 83.5 | 67.3 | 76.8 | 61.5 | 66.4 |
| 12 | 0.292 | 0.371 | 0.302 | 0.379 | 0.248 | 0.287 | 0.303 | 0.355 |
| 13 | 0.741 | 0.766 | 0.759 | 0.747 | 0.725 | 0.735 | 0.695 | 0.741 |
| 14 | 71.6 | 69.2 | 68.5 | 67.8 | 73.5 | 70 | 77.8 | 70 |
| 15 | 135.5 | 125 | 125.8 | 125 | 128 | 132.5 | 127 | 128.5 |
| 16 | 73.9 | 71.5 | 71.5 | 71.5 | 73.2 | 75 | 77.5 | 74 |
| 17 | 96.4 | 93.1 | 95.8 | 93 | 87.8 | 86.6 | 91.6 | 93.6 |
| 18 | 76.2 | 80.3 | 67.9 | 82 | 66.3 | 73.1 | 59.7 | 65.1 |
| 19 | 2.1 | 2.42 | 1.83 | 2.4 | 2.37 | 2.6 | 1.61 | 1.68 |
| 20 | 211.9 | 195.9 | 205.4 | 231.9 | NA | 225 | 222.9 | 235.9 |
| 21 | 4.15 | 4.63 | 4.36 | 5.18 | 4.42 | 4.15 | 3.55 | 4.23 |
| 22 | 11.1 | 29.5 | 53.3 | 70.1 | 54 | 21.1 | 36.2 | 86 |
| 23 | 7.58 | 7.51 | 7.09 | NA | NA | NA | 11.55 | 8.33 |
| 24 | 241.1 | 245.3 | 233 | 253.4 | 206.6 | 206.6 | 194.6 | 167.8 |
| 25 | 0.573 | 0.612 | 0.569 | 0.597 | 0.523 | 0.53 | 0.497 | 0.448 |
| 26 | 19 | 20.1 | 18.7 | 20.1 | 17.2 | 19.1 | 16.1 | 18.1 |
| 27 | 16.2 | 14.2 | 14.5 | 15.7 | 16.2 | 17.7 | 15.3 | 15.5 |
| 28 | 1.88 | 2.09 | 1.15 | 1.95 | 1.57 | 1.31 | 1.16 | 1.14 |
| 29 | 4.35 | 5.35 | 4.89 | 5.39 | 4.16 | 4.13 | 4.42 | 3.68 |
| 30 | 266 | 274.7 | 261.9 | 276.9 | 240.6 | 238 | 217.6 | 198 |
| 31 | 5.12 | 5.1 | 4.74 | 5.27 | 4.96 | 5.08 | 4.85 | 4.62 |
| 32 | 1.83 | 1.75 | 1.62 | 1.75 | 1.75 | 1.56 | 1.62 | 1.75 |
| 33 | 55.6 | 53.2 | 58.2 | 54.7 | 51.5 | 57.4 | 58.5 | 56 |
| 34 | 61.6 | 53.5 | 54.2 | 53.5 | 54.8 | 57.5 | 49.3 | 54.5 |
| 35 | 55.4 | 54.2 | 57.7 | 54.1 | 55.6 | 53.7 | 53.8 | 53.8 |
| 36 | 3.5 | 3 | 3 | 3.75 | −0.33 | 5 | −0.33 | 4 |
| 37 | 187.9 | 186 | 176.3 | 179.9 | 181.3 | 183.4 | 271.1 | 203.1 |
| 38 | 156.1 | 173.4 | 106.7 | 162.9 | 139.9 | 140.2 | 119.1 | 155 |
| 39 | 46.9 | 45 | 29.7 | 40.3 | 53.9 | 49.6 | 30.6 | 30.6 |
| 40 | 16.1 | 16 | 15.6 | 17.7 | NA | 16.3 | 16.2 | 17.3 |
| 41 | 485.2 | 475.8 | 422.3 | 531.7 | 431.4 | 471 | 408 | 463.6 |
| 42 | 129.4 | 140.1 | 78.5 | 137.5 | 105.8 | 106.9 | 95.6 | 113.9 |
| 43 | 35.8 | 41.8 | 32.3 | 38.2 | 35.4 | 30.1 | 32.6 | 36.3 |
| 44 | 0.187 | 0.178 | 0.138 | 0.187 | 0.159 | 0.133 | 0.117 | 0.13 |
| 45 | 6465.3 | 6121 | 5198.7 | 6541 | 5573.2 | 6560.1 | 5329 | 6499.1 |
| 46 | 0.494 | 0.551 | 0.535 | 0.554 | 0.545 | 0.5 | 0.502 | 0.521 |
| 47 | 1 | 1.33 | 1 | 1.33 | 1 | 1 | 1 | 2.33 |
| 48 | 3.71 | 3.95 | 4.86 | 7.41 | 1.95 | 5.16 | 2.29 | 4.52 |
| 49 | 0.339 | 0.296 | 0.229 | 0.302 | 0.264 | 0.238 | 0.214 | 0.22 |
| 50 | 42.8 | 42.8 | 45.1 | 46.7 | 42.9 | 50.4 | 39.8 | 51.8 |
| 51 | 692.5 | 609.5 | 653.3 | 731.4 | 694.5 | 890.9 | 608.8 | 803.7 |
| 52 | 10 | 12.3 | 12.4 | 10.2 | 13.4 | 15.6 | 13.4 | 10 |
| 53 | 154.9 | 137.1 | 118.3 | 130.5 | 112.4 | 136.4 | 107.2 | 72.9 |
| 54 | 2.32 | 2.07 | 1.8 | 1.99 | 1.85 | 2.22 | 1.61 | 1.09 |
| 55 | 23.2 | 15.5 | 15.1 | 19.3 | 15 | 14.4 | 9.7 | 21.2 |
| 56 | 154.5 | 162.5 | 122.6 | 165.2 | 138.1 | 126.6 | 108.3 | 111.7 |
| 57 | 2.52 | 3.15 | 2.29 | 3.22 | 2.38 | 2.19 | 2.2 | 2.08 |

Table 278. Provided are the values of each of the parameters (as described above) measured in maize accessions (Line). Growth conditions are specified in the experimental procedure section.

TABLE 279
Measured parameters in Maize Hybrids Field A 35K per acre (lines 9-16)

| | Line | | | | | | | |
|---|---|---|---|---|---|---|---|---|
| Correlation | | Line- | Line- | Line- | Line- | Line- | Line- | Line- |
| ID | Line-9 | 10 | 11 | 12 | 13 | 14 | 15 | 16 |
| 1 | 613.4 | NA | 450.7 | 606.1 | 516.4 | 622.8 | 523.5 | 427.7 |
| 2 | 37.4 | NA | 34.4 | 40.4 | 37.5 | 43.1 | 37.1 | 42 |
| 3 | 0.269 | NA | 0.157 | 0.136 | 0.134 | 0.126 | 0.126 | 0.201 |
| 4 | 16.8 | NA | 16 | 18.6 | 17.6 | 19.7 | 18.4 | 17.7 |
| 5 | 8.76 | NA | 8.61 | 7.13 | 9.28 | 8.69 | 8.86 | 7.59 |
| 6 | 2.82 | NA | 2.74 | 2.76 | 2.7 | 2.78 | 2.56 | 3 |
| 7 | 17.3 | NA | 16.9 | 17.2 | 17.9 | 17.5 | 15.3 | 17.8 |
| 8 | 15.9 | NA | 16.9 | 19.1 | 17.9 | 15.5 | 16.5 | 18.4 |
| 9 | 18.2 | 18.5 | 18.5 | 18.1 | 17.1 | 17.6 | 17 | 21.1 |
| 10 | 1.75 | NA | 1.6 | 1.8 | 1.44 | 1.75 | 1.75 | 1.58 |
| 11 | 70 | NA | 62.8 | 76 | 72.6 | 74.8 | 74.5 | 75.4 |
| 12 | 0.289 | 0.246 | 0.219 | 0.335 | 0.36 | 0.335 | 0.355 | 0.313 |
| 13 | 0.732 | 0.672 | 0.674 | 0.776 | 0.776 | 0.793 | 0.781 | 0.784 |
| 14 | 70.8 | NA | 75.3 | 69.2 | 69.2 | 69.2 | 67 | 78 |
| 15 | 132.5 | 131.3 | 133.5 | 129.7 | 131.2 | 127.5 | 123.5 | 137 |
| 16 | 76 | 79 | 77.5 | 73.2 | 73 | 75 | 71.5 | 78 |
| 17 | 96.5 | NA | 85.4 | 91.7 | 95.4 | 95.5 | 89.1 | 95.1 |
| 18 | 68.4 | NA | 59.5 | 74.9 | 71 | 73.2 | 73.9 | 72 |
| 19 | 1.83 | NA | 1.56 | 2.04 | 2.08 | 2.04 | 1.47 | 1.83 |
| 20 | 225.9 | NA | 206.1 | 228 | 211.3 | NA | NA | 252.6 |
| 21 | 4.13 | 3.42 | 3.6 | 4.67 | 4.37 | 4.69 | 5.44 | 4.33 |
| 22 | 44.9 | 45 | 31.1 | 17.4 | 33.4 | 37.4 | 68.9 | 56.6 |
| 23 | 6.83 | NA | 7.14 | 8.52 | 8.1 | 7.43 | NA | 9.95 |
| 24 | 208.9 | NA | 209 | 206.4 | 229.1 | 187.4 | 258.2 | 244.9 |
| 25 | 0.535 | NA | 0.519 | 0.511 | 0.582 | 0.52 | 0.631 | 0.58 |
| 26 | 17.5 | NA | 16.4 | 19.4 | 18.4 | 20.3 | 19.6 | 18.7 |
| 27 | 14.5 | NA | 14.5 | 15.2 | 13.8 | 15.5 | 13 | 14.5 |
| 28 | 1.08 | NA | 1.09 | 1.36 | 1.15 | 1.67 | 2.05 | 1.29 |
| 29 | 3.9 | NA | 4.11 | 4.28 | 4.71 | 4.1 | 5.3 | 5.38 |
| 30 | 215.7 | NA | 234.6 | 241.2 | 265.6 | 214.5 | 284.1 | 324.9 |
| 31 | 5.07 | NA | 4.84 | 4.94 | 4.99 | 4.64 | 4.83 | 5.08 |
| 32 | 1.75 | 1 | 1.56 | 1.75 | 1.75 | 1.75 | 1.75 | 1.75 |
| 33 | 57.8 | NA | 53.6 | 55.1 | 56.9 | 54.9 | 59.4 | 58.9 |
| 34 | 56.5 | 51 | 56 | 56.3 | 58.2 | 52.5 | 52 | 60 |
| 35 | 55.7 | NA | 56 | 53.6 | 54.5 | 51 | 53 | 49.5 |
| 36 | 5.25 | NA | 2.33 | 5.33 | 3.75 | 5.75 | 4.5 | −1.5 |
| 37 | 173.2 | NA | 182.8 | 187.9 | 161.1 | 168.7 | 188.8 | 219.6 |
| 38 | 121.3 | NA | 103.6 | 149.7 | 122.3 | 179.4 | 141.1 | 106.3 |
| 39 | 35.3 | NA | 29.7 | 30.7 | 36.3 | 35.8 | 25.4 | 36.3 |
| 40 | 15.8 | NA | 15.4 | 17.4 | 16.2 | NA | NA | 16.4 |
| 41 | 453.6 | NA | 426.2 | 520.1 | 484.9 | 493.9 | 543.1 | 551.6 |
| 42 | 123.8 | NA | 83 | 112 | 92.7 | 139.4 | 117.7 | 85.5 |
| 43 | 42.6 | NA | 31 | 39.9 | 37.9 | 40.3 | 40.3 | 29.6 |
| 44 | 0.157 | NA | 0.121 | 0.167 | 0.162 | 0.155 | 0.152 | 0.182 |
| 45 | 6489.2 | NA | 5688.6 | 6762.2 | 6602 | 6292.8 | 7060.1 | 8346.6 |
| 46 | 0.467 | NA | 0.481 | 0.498 | 0.543 | 0.544 | 0.539 | 0.436 |
| 47 | 1.33 | NA | 1 | 1.33 | 1 | 1.67 | 1.33 | 2 |
| 48 | 5.12 | NA | 2.12 | 4.6 | 4.48 | 4.28 | 4.8 | 3.53 |
| 49 | 0.275 | NA | 0.22 | 0.303 | 0.27 | 0.257 | 0.26 | 0.345 |
| 50 | 50.3 | NA | 43.6 | 44.2 | 47.6 | 52.1 | 48.1 | 43.8 |
| 51 | 730.3 | NA | 631.9 | 670 | 660.1 | 807.2 | 624.2 | 636.4 |
| 52 | 9 | NA | 15 | 12.7 | 6.5 | 9.2 | 6.2 | 6.7 |
| 53 | 133.5 | 76.6 | 96.6 | 158.8 | 139.3 | 129.2 | 117.2 | 127.7 |
| 54 | 1.95 | 1.31 | 1.61 | 2.44 | 2.05 | 1.92 | 1.79 | 1.88 |
| 55 | 28.8 | NA | 14.8 | 15.4 | 14 | 15 | 11.7 | 29.1 |
| 56 | 124.8 | NA | 105.8 | 146.7 | 137.4 | 133.6 | 149 | 140.3 |
| 57 | 2.25 | NA | 1.87 | 2.61 | 2.44 | 2.55 | 2.76 | 2.31 |

Table 279. Provided are the values of each of the parameters (as described above) measured in maize accessions (Line). Growth conditions are specified in the experimental procedure section.

TABLE 280
Measured parameters in Maize Hybrids Field A 35K per acre (lines 17-24)

| | Line | | | | | | | |
|---|---|---|---|---|---|---|---|---|
| Correlation | Line- | Line- | Line- | Line- | Line- | Line- | Line- | Line- |
| ID | 17 | 18 | 19 | 20 | 21 | 22 | 23 | 24 |
| 1 | 600.8 | 471 | 516.9 | 551.7 | 531.4 | 495.6 | 647.5 | 734.8 |
| 2 | 42.6 | 33.8 | 33.9 | 36.1 | 42.3 | 35.1 | 47.9 | 43.9 |
| 3 | 0.171 | 0.183 | 0.165 | 0.145 | 0.164 | 0.161 | 0.169 | 0.15 |
| 4 | 18.2 | 16.8 | 16.1 | 17.2 | 18.4 | 16.8 | 21 | 18.5 |
| 5 | 9.97 | 10.79 | 8.78 | 9.17 | 7.79 | 9.47 | 8.05 | 8.62 |
| 6 | 2.96 | 2.56 | 2.67 | 2.66 | 2.91 | 2.65 | 2.9 | 3.01 |
| 7 | 16.6 | 15.1 | 16.2 | 16.9 | 15.9 | 17.5 | 20.8 | 18.2 |
| 8 | 17.2 | 16.1 | 16.9 | 17 | 15.1 | 16.7 | 19.9 | 17.7 |
| 9 | 16.5 | 18.6 | 20.4 | 18.9 | 20.6 | 19.8 | 23.7 | 18.8 |
| 10 | 1.38 | 1.41 | 1.66 | 1.58 | 1.43 | 1.8 | 1.63 | 1.59 |
| 11 | 80.6 | 67.2 | 68.9 | 69.9 | 77 | 68.3 | 96.7 | 84.8 |
| 12 | 0.298 | 0.263 | 0.393 | 0.343 | 0.278 | 0.327 | 0.368 | 0.368 |
| 13 | 0.735 | 0.741 | 0.762 | 0.746 | 0.726 | 0.756 | 0.742 | 0.788 |
| 14 | 73.2 | 73.2 | 69 | 70.8 | 78.7 | 69.2 | 78 | 70 |
| 15 | 131.3 | 134 | 134.7 | 131.3 | 139.3 | 127.2 | 148 | 131.8 |
| 16 | 77 | 74 | 75.7 | 76 | 79.7 | 71.8 | 79 | 74.2 |
| 17 | 96.4 | 97.1 | 94.9 | 92.2 | 94.9 | 95.2 | 89.9 | 97 |
| 18 | 79 | 66.4 | 67.3 | 68 | 71.5 | 66.1 | 94.8 | 80.8 |
| 19 | 2.74 | 2.25 | 1.56 | 1.88 | 2.7 | 2 | 3.1 | 2.16 |
| 20 | 244.4 | 235.7 | NA | 211.1 | NA | 195.6 | NA | 244.6 |
| 21 | 4.21 | 4.77 | 4.38 | 4.37 | 4.89 | 3.94 | 4.27 | 4.96 |
| 22 | 47.6 | 4.5 | 30.8 | 15.1 | 22.1 | 37.5 | 1.1 | 43.2 |
| 23 | NA | 7.79 | NA | 7.06 | 6.55 | NA | 7.49 | 8.15 |
| 24 | 232 | 254.5 | 233.9 | 218.7 | 259.5 | 216.5 | 260.8 | 216 |
| 25 | 0.567 | 0.633 | 0.585 | 0.523 | 0.609 | 0.53 | 0.633 | 0.576 |
| 26 | 18.8 | 17.6 | 16.8 | 18 | 18.9 | 17.9 | 22.5 | 19.4 |
| 27 | 16.9 | 12.5 | 15.5 | 17 | 15.3 | 15 | 15.3 | 18.3 |
| 28 | 1.59 | 1.56 | 1.41 | 1.48 | 1.39 | 1.18 | 2.34 | 1.39 |
| 29 | 4.72 | 4.79 | 4.46 | 4.44 | 4.95 | 4.47 | 4.31 | 3.96 |
| 30 | 255.6 | 285.2 | 262.3 | 246.7 | 295.5 | 238.6 | 294.3 | 216 |
| 31 | 5.43 | 4.87 | 5.22 | 4.92 | 5.16 | 4.83 | 5.46 | 5.5 |
| 32 | 1.75 | 1.75 | 1.92 | 1.5 | 1.92 | 1.75 | 1.75 | 1.69 |
| 33 | 57.2 | 55.3 | 57.3 | 52.5 | 53.2 | 52.7 | 50.7 | 52.9 |
| 34 | 54.3 | 59.7 | 59 | 55.7 | 59.7 | 55.5 | 68.3 | 57.5 |
| 35 | 55.6 | 52.9 | 58.4 | 49.5 | 49.9 | 53.5 | 48.6 | 49.8 |
| 36 | 5 | NA | 6.67 | 5.25 | 1 | 5 | 1.67 | 4.25 |
| 37 | 160.4 | 179.2 | 167.7 | 190.8 | 232 | 191 | 205.8 | 191.6 |
| 38 | 135.6 | 119.2 | 110.1 | 138.7 | 113 | 113.1 | 161.7 | 136.9 |
| 39 | 51.6 | 45.4 | 26.5 | 32.1 | 65.7 | 33.2 | 72.8 | 37.6 |
| 40 | 17.1 | 16.9 | NA | 16.8 | NA | 15.5 | NA | 17.1 |
| 41 | 482.8 | 518.3 | 435 | 513.1 | 452.2 | 495.7 | 595.8 | 537 |
| 42 | 112.6 | 96 | 88.4 | 111.5 | 89.1 | 93.3 | 130.1 | NA |
| 43 | 35.7 | 37.7 | 33.3 | 32.4 | 34.7 | 32.9 | 42.4 | 40.1 |
| 44 | 0.178 | 0.167 | 0.15 | 0.15 | 0.187 | 0.151 | 0.243 | 0.178 |
| 45 | 6940 | 7336.8 | 6528.2 | 7106.7 | 6773.7 | 6886.3 | 8806.6 | 7710.3 |
| 46 | 0.516 | 0.482 | 0.493 | 0.547 | NA | 0.465 | 0.409 | 0.528 |
| 47 | 1 | 1.33 | 1 | 1 | 1 | 1 | 1 | 1.67 |
| 48 | 3.7 | 2.5 | 3.83 | 5.49 | 4.28 | 5.57 | 5.41 | 5.47 |
| 49 | 0.303 | 0.309 | 0.274 | 0.249 | NA | 0.284 | 0.526 | 0.3 |
| 50 | 47.2 | 43.3 | 47.7 | 45.8 | 46.2 | 51.3 | 54.4 | 52.2 |
| 51 | 797.3 | 541.6 | 738.7 | 778.5 | 709 | 769.8 | 831.5 | 957.7 |
| 52 | 11.4 | 8.4 | 3.5 | 11.5 | 7.9 | 5.4 | 14.8 | 9.5 |
| 53 | 149.6 | 166.3 | 159.5 | 149.2 | 146.6 | 122.9 | 132.7 | 138.2 |
| 54 | 2.32 | 2.49 | 2.3 | 2.3 | 2.16 | 1.81 | 2.06 | 2.01 |
| 55 | 22 | 15.8 | 15 | 13.6 | 23 | 15.9 | 24.9 | 19.9 |
| 56 | 153.6 | 134.1 | 135.1 | 135.1 | 156.6 | 118.7 | 190.7 | 157.8 |
| 57 | 2.84 | 2.25 | 2.29 | 2.44 | 2.62 | 2.24 | 2.79 | 2.86 |

Table 280. Provided are the values of each of the parameters (as described above) measured in maize accessions (Line). Growth conditions are specified in the experimental procedure section.

TABLE 281
Measured parameters in Maize Hybrids Field A 35K per acre (lines 25-32)

| | Line | | | | | | | |
|---|---|---|---|---|---|---|---|---|
| Correlation | Line- | Line- | Line- | Line- | Line- | Line- | Line- | Line- |
| ID | 25 | 26 | 27 | 28 | 29 | 30 | 31 | 32 |
| 1 | 502.3 | 616.2 | 518.4 | 583.6 | 472.5 | 652.1 | 435.8 | 504.7 |
| 2 | 36.6 | 45.2 | 36.5 | 44.7 | 41.2 | 41.6 | 38.6 | 36.2 |
| 3 | 0.139 | 0.252 | 0.139 | 0.133 | 0.257 | 0.4 | 0.31 | 0.139 |
| 4 | 16.9 | 21.4 | 17.1 | 18.7 | 17.5 | 18.7 | 16.9 | 16.4 |
| 5 | 8.32 | 9.23 | 7.12 | 7.62 | 7.44 | 8.58 | 9.61 | 11.01 |
| 6 | 2.75 | 2.68 | 2.71 | 3.02 | 2.98 | 2.82 | 2.89 | 2.78 |
| 7 | 15.7 | 16.4 | 16.6 | 16.7 | 18.1 | 17.8 | 17.8 | 16.8 |
| 8 | 15.9 | 16.6 | 16.4 | 16.4 | 18.6 | 17.6 | 17.8 | 16.4 |
| 9 | 16.2 | 18.6 | 18.1 | 21.7 | 17.9 | 22.6 | 23.6 | 20.3 |
| 10 | 1.54 | 1.53 | 1.81 | 1.96 | 1.52 | 1.85 | 1.62 | 1.3 |
| 11 | 73.3 | 90.6 | 68.1 | 61.2 | 71.6 | 75.1 | 74.2 | 64.8 |
| 12 | 0.325 | 0.361 | 0.283 | 0.347 | 0.281 | 0.312 | 0.355 | 0.331 |
| 13 | 0.749 | 0.774 | 0.759 | 0.782 | 0.747 | 0.741 | 0.748 | 0.749 |
| 14 | 67 | 71.5 | 70 | 71 | 69.2 | 71.5 | 73.3 | 78 |
| 15 | 121.8 | 129.5 | 128.8 | 137.5 | 133.2 | 138.7 | 138.7 | 134.7 |
| 16 | 70 | 77 | 74.2 | 78 | 76 | 76.5 | 78 | 77 |
| 17 | 90.4 | 97.5 | 98.1 | 96 | 91.4 | 96.7 | 96.4 | 89.3 |
| 18 | 72 | 89.8 | 66.8 | 59.4 | 67.6 | 74.1 | 68.6 | 62.9 |
| 19 | 2.12 | 2.29 | 1.8 | 2.19 | 1.53 | 2.12 | 1.9 | 2.83 |
| 20 | 236.6 | 237.4 | 214.7 | 244 | 223.3 | 231.9 | 248.2 | NA |
| 21 | 5.26 | 5.03 | 4.04 | 4.96 | 4.34 | 4.41 | 4.51 | 3.87 |
| 22 | 26.5 | 41.1 | 21.3 | 32 | 42.8 | 1.9 | 7.3 | 33 |
| 23 | 10.26 | 13.51 | 7.88 | 9.91 | 7.65 | NA | 6.27 | 8.7 |
| 24 | 231.7 | 263.8 | 220.1 | 216.1 | 246.7 | 233.5 | 249.8 | 216 |
| 25 | 0.572 | 0.647 | 0.551 | 0.52 | 0.599 | 0.619 | 0.601 | 0.518 |
| 26 | 17.8 | 22.3 | 17.9 | 15.4 | 18 | 18.1 | 18.6 | 17 |
| 27 | 15.2 | 14 | 14.5 | 18.7 | 16.2 | 16.5 | 16.7 | 15.5 |
| 28 | 1.4 | 2.13 | 1.58 | 1.35 | 1.27 | 2.31 | 1.31 | 1.41 |
| 29 | 5.12 | 5.81 | 4.66 | 4.14 | 4.98 | 4.26 | 4.64 | 4.15 |
| 30 | 260 | 303.8 | 250.2 | 244.5 | 279.6 | 264.9 | 277.1 | 240.3 |
| 31 | 5.19 | 5.16 | 4.79 | 4.52 | 4.95 | 4.9 | 4.95 | 4.78 |
| 32 | 1.69 | 1.5 | 1.75 | 1.75 | 1.69 | 1.56 | 1.62 | 2 |
| 33 | 53.8 | 60.4 | 55.8 | 53 | 54.2 | 55.5 | 55.3 | 53.6 |
| 34 | 51.8 | 52.5 | 54.5 | 59.5 | 57.2 | 62.3 | 60.3 | 57.7 |
| 35 | 50.8 | 55.1 | 54.2 | 53 | 52.8 | 55.5 | 54.3 | 58.7 |
| 36 | 4 | 5.5 | 4.25 | 6 | 6.75 | 5 | 5 | −1.5 |
| 37 | 188.1 | 187.2 | 167.5 | 188.1 | 163.9 | 167.8 | 166.2 | 228.5 |
| 38 | 125.1 | 170.9 | 154.5 | 128.4 | 106.8 | 174.5 | 102.4 | 117.9 |
| 39 | 35.3 | 45 | 33.8 | 40 | 25.5 | 41.1 | 35.6 | 65 |
| 40 | 16.4 | 17.1 | 17.2 | 18.1 | 15.6 | 16.1 | 16.5 | NA |
| 41 | 566.8 | 529.6 | 554.9 | 616.6 | 445.6 | 474.9 | 484.1 | 407.8 |
| 42 | 100.7 | 131.5 | 120.9 | 102.3 | 85.2 | 137.6 | 81.8 | 97.2 |
| 43 | 33 | 44 | 35.6 | 31.1 | 29.5 | 39.5 | 26.3 | 32.7 |
| 44 | 0.148 | 0.217 | 0.148 | 0.145 | 0.16 | 0.239 | 0.154 | 0.137 |
| 45 | 8360.6 | 7489.5 | 7288.1 | 8337.6 | 6071.6 | 7130.5 | 7002.2 | 6288.5 |
| 46 | 0.53 | 0.553 | 0.503 | 0.464 | 0.484 | NA | 0.383 | 0.417 |
| 47 | 1.33 | 1.67 | 1 | 1.33 | 1.67 | 1 | 1 | 1 |
| 48 | 4.41 | 4.44 | 6.95 | 5.27 | 7.53 | 4.84 | 5.06 | 1.89 |
| 49 | 0.252 | 0.336 | 0.263 | 0.283 | 0.267 | NA | 0.313 | 0.293 |
| 50 | 44.1 | 49 | 45.5 | 47.6 | 47.3 | 47.5 | 46.5 | 36.3 |
| 51 | 668.5 | 685.4 | 658.9 | 890.8 | 765.4 | 784.6 | 773.6 | 559.1 |
| 52 | 9.4 | 7.6 | 11.2 | 10.8 | 12.2 | 8.6 | 12.5 | 15 |
| 53 | 121.5 | 146.9 | 150.8 | 139.9 | 136.3 | 164.6 | 153.3 | 114.3 |
| 54 | 1.84 | 2.21 | 2.29 | 2.07 | 2.08 | 2.58 | 2.35 | 1.88 |
| 55 | 13.7 | 30.4 | 14 | 18.6 | 30.8 | 49.4 | 36.5 | 14.2 |
| 56 | 131.1 | 186.2 | 130 | 136.1 | 129.3 | 173.5 | 117.7 | 121.7 |
| 57 | 2.61 | 3.55 | 2.42 | 2.27 | 2.31 | 2.77 | 1.95 | 2.1 |

Table 281. Provided are the values of each of the parameters (as described above) measured in maize accessions (Line). Growth conditions are specified in the experimental procedure section.

TABLE 282
Measured parameters in Maize Hybrids Field A 35K per acre (lines 33-40)

| | Line | | | | | | | |
|---|---|---|---|---|---|---|---|---|
| Correlation | Line- | Line- | Line- | Line- | Line- | Line- | Line- | Line- |
| ID | 33 | 34 | 35 | 36 | 37 | 38 | 39 | 40 |
| 1 | 361.6 | 501.6 | 541 | 495.7 | 617.8 | NA | 556.1 | 586.6 |
| 2 | 30.4 | 32.5 | 40.4 | 38.5 | 41.5 | NA | 35.9 | 36.2 |
| 3 | 0.124 | 0.281 | 0.162 | NA | 0.121 | NA | 0.155 | 0.164 |
| 4 | 14.4 | 15.4 | 18.6 | 17.5 | 18.4 | NA | 16 | 17.7 |
| 5 | 9.83 | 9.45 | 9.56 | 10.9 | 8.02 | NA | 10.12 | 8.98 |
| 6 | 2.68 | 2.69 | 2.74 | 2.79 | 2.86 | NA | 2.84 | 2.61 |
| 7 | 15.8 | 17.2 | 17.1 | 15.7 | 18.3 | NA | 16.3 | 15.8 |
| 8 | 16.2 | 16.4 | 16.8 | 15.8 | 18.1 | NA | 16.5 | 15.3 |
| 9 | 18.6 | 20.2 | 22.9 | 21.9 | 19.3 | 18 | 22.5 | 17.5 |
| 10 | 1.44 | 1.63 | 1.45 | 1.41 | 1.54 | NA | 1.76 | 1.55 |
| 11 | 45.2 | 57.4 | 79.1 | 70.3 | 82.3 | NA | 72.7 | 68.4 |
| 12 | 0.288 | 0.226 | 0.388 | 0.28 | 0.246 | 0.278 | 0.3 | 0.332 |
| 13 | 0.705 | 0.691 | 0.768 | 0.703 | 0.7 | 0.743 | 0.759 | 0.754 |
| 14 | 77 | 75 | 76.8 | 78 | 70 | 71.8 | 72.2 | 67.8 |
| 15 | 132.3 | 138 | 136.3 | 146.3 | 134.3 | 137.5 | 138.7 | 124.5 |
| 16 | 77.7 | 77 | 77.5 | 79 | 75.2 | 76 | 77.5 | 70.8 |
| 17 | 93.7 | 92.8 | 93 | 92.4 | 95.6 | 97.6 | 86.8 | 86.9 |
| 18 | 42.4 | 54.1 | 77.3 | 67.5 | 80.7 | NA | 71.5 | 67.8 |
| 19 | 1.31 | 2.18 | 3.29 | 1.94 | 2.17 | NA | 2.31 | 2.32 |
| 20 | 206.6 | 206 | NA | 209.2 | 223.4 | NA | NA | 221.8 |
| 21 | 3.25 | 3.64 | 4.26 | 3.77 | 4.38 | 4.99 | 4.73 | 5 |
| 22 | 42.8 | 20 | 11.6 | 3.3 | 18.4 | 9.8 | 6.6 | 30.7 |
| 23 | 14.26 | 7.02 | 8.09 | 11.48 | 7.42 | NA | 8.31 | NA |
| 24 | 209.3 | 206.5 | 235.1 | 268.7 | 231.3 | NA | 222.5 | 192.1 |
| 25 | 0.515 | 0.507 | 0.572 | 0.636 | 0.582 | NA | 0.56 | 0.481 |
| 26 | 13.2 | 15.8 | 20 | 18 | 19.8 | NA | 17.3 | 18.3 |
| 27 | 16.3 | 15.3 | 16.5 | 14.3 | 15.7 | NA | 16.5 | 16.2 |
| 28 | 0.91 | 1.37 | 1.9 | 1.76 | 1.63 | NA | 1.71 | 1.55 |
| 29 | 4.26 | 3.57 | 4.56 | 4.31 | 4.26 | NA | 4.07 | 4.13 |
| 30 | 232.8 | 223.6 | 266.6 | 289.9 | 253.9 | NA | 247.8 | 219 |
| 31 | 3.94 | 4.56 | 4.93 | 4.91 | 5.27 | NA | 5.29 | 4.61 |
| 32 | 1.56 | 1.69 | 1.75 | 1.62 | 1.75 | 1 | 1.56 | 1.75 |
| 33 | 58.4 | 56.7 | 48.4 | 52.8 | 50.9 | NA | 49.5 | 50.5 |
| 34 | 54.7 | 61 | 58.7 | 68 | 59.7 | 61.5 | 61 | 53.8 |
| 35 | 56.5 | 56.3 | 50.9 | 51.3 | 50.1 | NA | 48.9 | 52.1 |
| 36 | 1 | 2.67 | 1 | 0.33 | 5.25 | 5.67 | 5.25 | 3 |
| 37 | 219.8 | 173.1 | 225.3 | 243.8 | 193.9 | NA | 178.4 | 200 |
| 38 | 79.8 | 110.6 | 150 | 105.9 | 149 | NA | 161.9 | 174.3 |
| 39 | 25.4 | 44.7 | 65.5 | 39.7 | 43 | NA | 45.7 | 42.7 |
| 40 | 16.1 | 15.5 | NA | 14.4 | 17.9 | NA | NA | 17.4 |
| 41 | 419.3 | 432.3 | 454.6 | 446.6 | 538.2 | NA | 532.4 | 452.3 |
| 42 | 64.7 | 103.2 | 118.5 | 91.6 | 125.6 | NA | 132.2 | 136.9 |
| 43 | 22.1 | 32.8 | 33 | 33.7 | 39.3 | NA | 33.7 | 36.3 |
| 44 | 0.098 | 0.113 | 0.183 | NA | 0.162 | NA | 0.161 | 0.149 |
| 45 | 5807.1 | 6010.2 | 6785.2 | 6877.9 | 6964.3 | NA | 7586 | 5992.6 |
| 46 | 0.42 | 0.537 | NA | NA | 0.487 | NA | NA | 0.52 |
| 47 | 1.33 | 1 | 1 | 1 | 1 | NA | 1 | 1 |
| 48 | 2.03 | 2.35 | 2.86 | 3.78 | 5.34 | NA | 4.31 | 4.98 |
| 49 | 0.22 | 0.227 | NA | NA | 0.307 | NA | NA | 0.249 |
| 50 | 38.2 | 42.8 | 46.2 | 44.4 | 48.1 | NA | 42.2 | 43.3 |
| 51 | 623.5 | 654.1 | 762.1 | 637.1 | 754.5 | NA | 694.7 | 701.1 |
| 52 | 16.6 | 14.8 | 13.8 | 9.9 | 7.3 | NA | 13.5 | 11.8 |
| 53 | 76.1 | 106.8 | 172 | 133.3 | 161.3 | 148.9 | 145.7 | 132.7 |
| 54 | 1.13 | 1.67 | 2.54 | 2.11 | 2.83 | 3.02 | 2.18 | 2.04 |
| 55 | 13 | 25.3 | 20 | NA | 13.4 | NA | 16.2 | 15.7 |
| 56 | 84.2 | 111.8 | 145.3 | 143.4 | 156.4 | NA | 138.2 | 128.7 |
| 57 | 1.54 | 1.79 | 2.47 | 2.12 | 2.63 | NA | 2.26 | 2.43 |

Table 282. Provided are the values of each of the parameters (as described above) measured in maize accessions (Line). Growth conditions are specified in the experimental procedure section.

TABLE 283
Measured parameters in Maize Hybrids Field A 35K per acre (lines 41-49)

| | Line | | | | | | | | |
|---|---|---|---|---|---|---|---|---|---|
| Correlation | Line- | Line- | Line- | Line- | Line- | Line- | Line- | Line- | Line- |
| ID | 41 | 42 | 43 | 44 | 45 | 46 | 47 | 48 | 49 |
| 1 | 388.9 | 521.9 | 852.5 | 454.9 | 543.2 | 512.2 | 540.4 | 649.7 | 621.9 |
| 2 | 33.9 | 38.1 | 43.2 | 38.7 | 39.7 | 38.7 | 41 | 42.2 | 41.6 |
| 3 | 0.172 | 0.168 | 0.134 | 0.822 | 0.189 | 0.132 | 0.199 | 0.164 | 0.168 |
| 4 | 15.1 | 17.6 | 18.7 | 18.9 | 18.9 | 18.3 | 19.4 | 19.4 | 18.7 |
| 5 | 9.77 | 12.55 | 9.28 | 8.43 | 9.01 | 9.56 | 8.28 | 8.32 | 8.97 |
| 6 | 2.83 | 2.74 | 2.92 | 2.6 | 2.67 | 2.68 | 2.68 | 2.76 | 2.82 |
| 7 | 17.2 | 15.4 | 16.9 | 18.1 | 17.8 | 17.2 | 16.2 | 18.2 | 17.1 |
| 8 | NA | 15.7 | 16.7 | 14.7 | 15.4 | 17.1 | 16.8 | 17.7 | 15.8 |
| 9 | 20.7 | 20.1 | 17.6 | 21.1 | 21.2 | 17.4 | 20.9 | 16.3 | 17.2 |
| 10 | NA | 1.6 | 1.71 | 1.51 | 1.76 | 1.57 | 1.6 | 1.7 | 1.69 |
| 11 | 61.6 | 72 | 79.7 | 58.2 | 82.7 | 72.7 | 81.8 | 78.2 | 74.2 |
| 12 | 0.338 | 0.277 | 0.296 | 0.383 | 0.356 | 0.366 | 0.303 | 0.282 | 0.363 |
| 13 | 0.746 | 0.758 | 0.764 | 0.737 | 0.766 | 0.765 | 0.784 | 0.765 | 0.778 |
| 14 | NA | 73.2 | 67.8 | 77.8 | 70.8 | 72.3 | 71 | 65 | 67.8 |
| 15 | 134.3 | 136.7 | 128.8 | 136 | 136.3 | 132 | 134.5 | 124.2 | 127.5 |
| 16 | 75.7 | 77 | 72.5 | 78 | 75 | 75.7 | 76 | 70 | 74 |
| 17 | NA | 93.2 | 90.8 | 95.2 | 96.1 | 92 | 95.9 | 88.5 | 94.7 |
| 18 | 59.3 | 71.1 | 76.6 | 53 | 81.4 | 70.6 | 80.9 | 77.6 | 73.2 |
| 19 | 0.99 | 1.89 | 1.68 | 2.91 | 1.98 | 2.36 | 1.98 | 2.21 | 1.64 |
| 20 | NA | NA | NA | 192.9 | 241.5 | NA | 238.1 | 236.3 | 217 |
| 21 | 3.66 | 4.45 | 4.69 | 4.19 | 4.69 | 4.16 | 4.36 | 6.06 | 5 |
| 22 | 19.6 | 16.8 | 21.5 | 14.1 | 16 | 61.6 | 6.9 | 43.5 | 35 |
| 23 | NA | 8.43 | NA | 10.48 | 7.28 | 9.25 | 12.02 | NA | 9.5 |
| 24 | 261.3 | 255.7 | 200 | 275.6 | 265.8 | 219.4 | 263.8 | 207.1 | 207 |
| 25 | 0.577 | 0.623 | 0.531 | 0.591 | 0.652 | 0.543 | 0.601 | 0.489 | 0.507 |
| 26 | 15.9 | 18.3 | 19.3 | 16.1 | 20.4 | 19 | 21 | 20.3 | 19.1 |
| 27 | 15.7 | 13.7 | 16.2 | 14 | 13.3 | 16.5 | 14.2 | 15 | 15.8 |
| 28 | 1.12 | 1.83 | 1.32 | 1.91 | 2.38 | 1.36 | 2.07 | 1.74 | 1.55 |
| 29 | 4.87 | 4.68 | 3.71 | 4.7 | 4.84 | 4.51 | 5.17 | 4.09 | 4.26 |
| 30 | 287 | 275.8 | 201.6 | 271.3 | 299.9 | 252.8 | 293.2 | 224.5 | 230.4 |
| 31 | 4.92 | 4.98 | 5.22 | 4.19 | 5.14 | 4.84 | 4.92 | 4.87 | 4.78 |
| 32 | 1.92 | 1.44 | 1.69 | 1.75 | 1.75 | 2 | 1.69 | 1.62 | 1.75 |
| 33 | 53.5 | 49.4 | 55.9 | 58.3 | 55.1 | 55.1 | 54.8 | 53.6 | 57.8 |
| 34 | 58.7 | 59.7 | 56.2 | 57.7 | 62 | 56.3 | 58.5 | 54.2 | 53.5 |
| 35 | 54.9 | 52.2 | 53.4 | 56.1 | 55.3 | 53.1 | 54 | 50.2 | 61.5 |
| 36 | NA | 5 | 4.75 | 0.33 | 4.25 | 5 | 4.67 | 5 | 6.25 |
| 37 | 180.5 | 182.5 | 187.5 | 215.4 | 186 | 192.7 | 153.3 | 162.1 | 218.2 |
| 38 | 75.8 | 122.1 | 156 | 138.6 | 163.6 | 131.2 | 144.7 | 184.5 | 159.9 |
| 39 | 54.6 | 42.2 | 31.3 | 57.1 | 33 | 50.9 | 36.4 | 42.1 | 26.7 |
| 40 | NA | NA | NA | 15 | 18.5 | NA | 16.4 | 17.3 | 16.8 |
| 41 | 439.6 | 457.3 | 496.3 | 521.2 | 581.9 | 583.3 | 462.1 | 529 | 567 |
| 42 | 63.3 | 108.2 | 108.7 | 121.1 | 129.9 | 100.9 | 118.1 | 144 | 129.8 |
| 43 | 24.8 | 38.4 | 53.3 | 32.9 | 40.6 | 31 | 38.2 | 43.5 | 39.3 |
| 44 | 0.13 | 0.173 | 0.174 | 0.166 | 0.185 | 0.141 | 0.198 | 0.165 | 0.163 |
| 45 | 5787.3 | 6778.5 | 6947.9 | 7700.1 | 7564.5 | 8345.7 | 6088.7 | 6700.2 | 8221.3 |
| 46 | 0.494 | 0.482 | 0.56 | NA | 0.515 | 0.471 | 0.451 | 0.46 | 0.542 |
| 47 | 1 | 1 | 1 | 2 | 1 | 1.67 | 1 | 1 | 1.67 |
| 48 | NA | 3.74 | 4.84 | 3.27 | 3.17 | 4.25 | 4 | 8.58 | 4.2 |
| 49 | 0.227 | 0.313 | 0.277 | NA | 0.32 | 0.261 | 0.411 | 0.329 | 0.264 |
| 50 | 41.2 | 41.8 | 54.3 | 43.9 | 53.7 | 48.1 | 46 | 49.4 | 46.9 |
| 51 | 644.5 | 571 | 877.8 | 614.2 | 716.1 | 793.5 | 651.1 | 738.7 | 738.4 |
| 52 | NA | 11.2 | 8.2 | 10.8 | 9.6 | 11.6 | 7.9 | 12.2 | 10.6 |
| 53 | 127.3 | 145.4 | 137 | 133.7 | 181.1 | 109.3 | 167.3 | 109.7 | 136.1 |
| 54 | 2.07 | 2.28 | 2.32 | 2.07 | 2.79 | 1.62 | 2.53 | 1.7 | 2.14 |
| 55 | 17.4 | 17.7 | 18.8 | 49.1 | 20.2 | 13.4 | 23.8 | 19.1 | 19.6 |
| 56 | 110.9 | 144.1 | 151.7 | 128.9 | 160.3 | 130.3 | 159.1 | 144 | 142.8 |
| 57 | 1.89 | 2.42 | 2.72 | 2.15 | 2.59 | 2.33 | 2.8 | 2.64 | 2.65 |

Table 283. Provided are the values of each of the parameters (as described above) measured in maize accessions (Line). Growth conditions are specified in the experimental procedure section.

TABLE 284
Measured parameters in Maize Hybrids Field A 47K per acre (lines 1-8)

| | Line | | | | | | | |
|---|---|---|---|---|---|---|---|---|
| Correlation | | Line- | Line- | Line- | Line- | Line- | Line- | Line- |
| ID | Line-9 | 10 | 11 | 12 | 13 | 14 | 15 | 16 |
| 1 | 53 | 53.9 | 59.5 | 52.8 | 54.8 | 48.9 | 53.7 | 54.2 |
| 2 | 96.1 | 97.1 | 97.1 | 91.5 | 97.2 | 97 | 97.8 | 97.2 |
| 3 | 13.8 | 18.1 | 17 | 18.4 | 18.3 | 17.4 | 10.9 | 16.8 |
| 4 | 51.7 | 50.6 | 53.9 | 48.5 | 52.9 | 49.6 | 52.4 | 45.6 |
| 5 | 234.4 | 186 | 164.1 | 180.9 | 189.2 | 183.7 | 193.6 | 201.3 |
| 6 | 51.4 | 41.3 | 48.7 | 27.5 | 72.8 | 51 | 54.6 | 23.1 |
| 7 | 14.88 | 10.29 | 7.34 | 8.24 | 8.32 | 7.94 | 7.04 | 9.44 |
| 8 | 194.6 | 181.4 | 218.1 | 166.7 | 220.1 | 192.3 | 201.4 | 217.5 |
| 9 | 15.2 | 14.8 | 15 | 15.3 | 13.4 | 15.7 | 15.3 | 16.3 |
| 10 | 0.75 | 1.02 | 1.03 | 1.29 | 1.3 | 0.84 | 0.75 | 1.29 |
| 11 | 4.48 | 4.81 | 4.8 | 4.52 | 4.71 | 5.09 | 3.67 | 4.72 |
| 12 | 0.505 | 0.454 | 0.552 | 0.482 | 0.55 | 0.503 | 0.537 | 0.536 |
| 13 | 1 | 1 | 1.03 | 1 | 1 | 1.06 | 1 | 1 |
| 14 | 55.2 | 58.7 | 58.8 | 53.2 | 52 | 52.7 | 60.2 | 53.3 |
| 15 | 0.106 | 0.153 | 0.134 | 0.112 | 0.124 | 0.155 | 0.121 | 0.133 |
| 16 | 4706.2 | 6492.2 | 5795 | 6354 | 6725.7 | 5821.7 | 4879.8 | 6016.4 |
| 17 | 4.01 | 4.06 | 4.55 | 4.06 | 4.52 | 4.19 | 3.91 | 4.51 |
| 18 | 229.8 | 237.2 | 266.2 | 207.6 | 234.9 | 213.3 | 230.4 | 239.8 |
| 19 | 56 | 89.2 | 82.3 | 124 | 105.6 | 83.8 | 63.5 | 97.8 |
| 20 | 23.9 | 38.8 | 32.6 | 32.7 | 37.1 | 36 | 28.7 | 28.8 |
| 21 | NA | 6 | 3.25 | 6 | 4.75 | 6 | 6 | 5.33 |
| 22 | 0.482 | 0.472 | 0.591 | 0.522 | 0.548 | 0.487 | 0.488 | 0.469 |
| 23 | 77.3 | 144.1 | 118.4 | 169.9 | 130.3 | 101.4 | 82.7 | 117.5 |
| 24 | 31.6 | 29 | 29.2 | 44 | 29.4 | 30.8 | 19 | 26.6 |
| 25 | NA | 18.6 | 18.3 | 16.9 | 17.1 | 17.6 | 15.6 | 16.6 |
| 26 | 388.2 | 493.8 | 446.9 | 499.4 | 538.1 | 426.6 | 369.7 | 440.3 |
| 27 | 1.67 | 1.33 | 1.33 | 1.33 | 1.67 | 1.33 | 1.67 | 1 |
| 28 | 1.45 | 2.31 | 2.22 | 2.01 | 2.24 | 2.48 | 1.74 | 2.12 |
| 29 | 1.68 | 2.91 | 4.43 | 4.74 | 2.65 | 3.56 | 4.71 | 4.04 |
| 30 | 0.193 | 0.289 | 0.221 | 0.198 | 0.212 | 0.269 | 0.199 | 0.247 |
| 31 | 12.9 | 17 | 15 | 13.9 | 8.2 | 19.5 | 26.6 | 19.3 |
| 32 | 83.3 | 135.5 | 129.6 | 103.4 | 116.2 | 119.4 | 102.5 | 113.2 |
| 33 | 9.6 | 8.01 | 7.62 | 8.32 | 7.66 | 10.54 | 10.15 | 8.28 |
| 34 | 38.6 | 43.2 | 47.1 | 51.6 | 47.4 | 46 | 43.1 | 43.8 |
| 35 | 612.2 | 642.5 | 723.8 | 792.1 | 650.4 | 612.5 | 670.2 | 676.5 |
| 36 | 15.42 | 8.83 | 4.11 | 3.83 | 5.42 | 8.5 | 2.83 | 6.92 |
| 37 | 132 | 134.4 | 123.8 | 120.1 | 134 | 120.3 | 132.2 | 136 |
| 38 | 15.7 | 16.1 | 17.8 | 17.2 | 15.6 | 16.4 | 14.1 | 14.3 |
| 39 | 15.8 | 17 | 16.4 | 16 | 16.2 | 15.2 | 15.8 | 15.5 |
| 40 | 17.2 | 18.2 | 16.8 | 16.6 | 16.7 | 16.9 | 19.3 | 19.1 |
| 41 | 1.25 | 1.65 | 1.59 | 1.51 | 1.59 | 1.38 | 1.58 | 1.56 |
| 42 | 0.307 | 0.29 | 0.393 | 0.409 | 0.296 | 0.261 | 0.427 | 0.286 |
| 43 | 0.743 | 0.786 | 0.81 | 0.757 | 0.769 | 0.69 | 0.801 | 0.761 |
| 44 | 1.7 | 1.59 | 1.38 | 1.33 | 1.57 | 1.34 | 1.47 | 1.51 |
| 45 | 363.2 | 574.9 | 487.3 | 503.5 | 497.5 | 557.9 | 440.1 | 470.3 |
| 46 | 30.4 | 37.9 | 35.1 | 37.4 | 33.9 | 38.7 | 29.5 | 33.6 |
| 47 | 0.136 | 0.167 | 0.106 | 0.139 | 0.095 | 0.166 | 0.343 | 0.216 |
| 48 | 14 | 17.6 | 16.7 | 17.9 | 16.9 | 17 | 14.2 | 16.1 |
| 49 | 77 | 71 | 69.2 | 70 | 67.8 | 73 | 70 | 71 |
| 50 | 133.8 | 135 | 131.2 | 129.2 | 124.5 | 131.2 | 136.2 | 129.7 |
| 51 | 78.5 | 74.3 | 72.5 | 76 | 72.5 | 77 | 76 | 77.5 |
| 52 | 2.74 | 2.73 | 2.68 | 2.66 | 2.55 | 2.88 | 2.63 | 2.64 |
| 53 | NA | 236.6 | 205.2 | 231.6 | 232.9 | 232.8 | 183.6 | 216.1 |
| 54 | 3.97 | 4.37 | 4.62 | 4.04 | 4.58 | 4.44 | 4.5 | 3.75 |
| 55 | 49.3 | 69 | 64.8 | 65.8 | 67.8 | 70.5 | 38.9 | 62.8 |
| 56 | 46.4 | 66.5 | 62.8 | 64.1 | 66.8 | 67.7 | 37.2 | 61 |
| 57 | 1.56 | 1.73 | 1.79 | 2.21 | 1.77 | 1.47 | 1.02 | 1.55 |

Table 284. Provided are the values of each of the parameters (as described above) measured in maize accessions (Line). Growth conditions are specified in the experimental procedure section.

TABLE 285
Measured parameters in Maize Hybrids Field A 47K per acre (lines 9-24)

| | Line | | | | | | | |
|---|---|---|---|---|---|---|---|---|
| Correlation | Line- | Line- | Line- | Line- | Line- | Line- | Line- | Line- |
| ID | 17 | 18 | 19 | 20 | 21 | 22 | 23 | 24 |
| 1 | 56.6 | 54 | 53.3 | 54.9 | 59.3 | 53.4 | 59.2 | 53.2 |
| 2 | 96.1 | 98.6 | 97 | 97.9 | 97.3 | 95.4 | 96.2 | 89 |
| 3 | 17.5 | 17.1 | 18.2 | 18.4 | 15.1 | 16.9 | 16.7 | 17.9 |
| 4 | 56.1 | 50 | 51.6 | 54.6 | 53.3 | 53.9 | 52.4 | 49.4 |
| 5 | 191.1 | 174.3 | 168 | 210.9 | 211.1 | 191.9 | 176.6 | 186.8 |
| 6 | 68.6 | 33.1 | 20.6 | 28.2 | 21.2 | 31 | 50.1 | 43.6 |
| 7 | 7.18 | 8.8 | 9.47 | 9.2 | 9.22 | 8.35 | 9.11 | 7.91 |
| 8 | 263.2 | 249.2 | 236.8 | 220.2 | 232 | 287.2 | 202.2 | 222.6 |
| 9 | 15 | 15.2 | 15.3 | 14.3 | 16.6 | 16.5 | 15.4 | 15.3 |
| 10 | 1.99 | 1.48 | 1.55 | 0.96 | 1.54 | 2.14 | 1.29 | 1.32 |
| 11 | 5.13 | 5.02 | 4.64 | 4.76 | 4.83 | 5.54 | 4.97 | 4.87 |
| 12 | 0.656 | 0.627 | 0.58 | 0.553 | 0.614 | 0.674 | 0.584 | 0.534 |
| 13 | 1.03 | 1 | 1 | 1 | 1.03 | 1 | 1 | 1.03 |
| 14 | 61.8 | 61.3 | 57.2 | 59.2 | 61.2 | 58 | 52 | 49.5 |
| 15 | 0.144 | 0.131 | 0.146 | 0.147 | 0.172 | 0.175 | 0.112 | 0.134 |
| 16 | 5571.3 | 6269.6 | 5303.6 | 5340 | 6722.5 | 6435.2 | 6828.5 | 6032.8 |
| 17 | 4.88 | 4.63 | 4.42 | 4.48 | 4.5 | 5.46 | 4.5 | 5.01 |
| 18 | 295.9 | 284.1 | 253.9 | 262.6 | 277.6 | 315.9 | 222.2 | 239.9 |
| 19 | 113.4 | 95.2 | 105 | 73.6 | 108.7 | 107.3 | 90.6 | 96.3 |
| 20 | 31.8 | 29.4 | 32 | 31.3 | 34.4 | 29.9 | 31.3 | 32.5 |
| 21 | 3.5 | 3.5 | NA | 3 | 5.25 | NA | 5.67 | 4.25 |
| 22 | 0.654 | 0.579 | 0.613 | 0.576 | 0.598 | 0.598 | 0.553 | 0.516 |
| 23 | 142.1 | 121.6 | 120.1 | 104 | 150.9 | 126.5 | 132.5 | 122.4 |
| 24 | 39.3 | 41.1 | 43.3 | 33 | 38.9 | 50.4 | 23.5 | 37.4 |
| 25 | 16.9 | 17 | 18.8 | 16.7 | 18.4 | NA | 18.4 | 16 |
| 26 | 448.9 | 535.1 | 426 | 434.9 | 489.4 | 506.1 | 491.7 | 444.9 |
| 27 | 1.33 | 1.33 | 1 | 1 | 1.33 | 1 | 1.33 | 1 |
| 28 | 2.32 | 2.05 | 2.18 | 2.01 | 2.54 | 2.68 | 2.16 | 2.49 |
| 29 | 2.46 | 1.86 | 1.53 | 1.94 | 1.98 | 1.63 | 3.68 | 4.01 |
| 30 | 0.215 | 0.217 | 0.219 | 0.23 | 0.264 | 0.262 | 0.193 | 0.234 |
| 31 | 9.6 | 11.9 | 11.8 | 14.1 | 13.6 | 19.8 | 10 | 12.5 |
| 32 | 140.6 | 125.1 | 125.2 | 118.6 | 157.2 | 155.6 | 106.6 | 119.2 |
| 33 | 8.07 | 9.28 | 10.6 | 12.67 | 11.92 | 10.1 | 9.13 | 8.59 |
| 34 | 40.6 | 42.2 | 43 | 47.1 | 48.8 | 41.9 | 47.7 | 49.6 |
| 35 | 621.6 | 628.8 | 659.3 | 674.9 | 807.1 | 691.8 | 670.4 | 760.7 |
| 36 | 5.08 | 4.75 | 7.17 | 8.67 | 7.42 | 15.42 | 9.83 | 4.58 |
| 37 | 162.9 | 153.5 | 141.5 | 154.6 | 195.8 | 206.4 | 97.4 | 111.2 |
| 38 | 15 | 15.6 | 14.9 | 14.9 | 17.2 | 15.6 | 16.2 | 17.4 |
| 39 | 15.2 | 15.2 | 16.1 | 14.9 | 15 | 16.2 | 16.9 | 17.2 |
| 40 | 18.1 | 16.4 | 15.9 | 17 | 18.4 | 18.3 | 16.1 | 19.5 |
| 41 | 1.51 | 1.52 | 1.48 | 1.41 | 1.62 | 1.66 | 1.71 | 1.76 |
| 42 | 0.349 | 0.346 | 0.316 | 0.251 | 0.529 | 0.368 | 0.32 | 0.372 |
| 43 | 0.748 | 0.794 | 0.779 | 0.789 | 0.799 | 0.794 | 0.783 | 0.785 |
| 44 | 1.82 | 1.71 | 1.64 | 1.78 | 2.15 | 2.32 | 1.08 | 1.22 |
| 45 | 478.2 | 443.1 | 491.4 | 450 | 568.6 | 493.7 | 485.5 | 496.9 |
| 46 | 36 | 32.7 | 35.8 | 37.1 | 37.4 | 38.1 | 31.2 | 33.4 |
| 47 | 0.099 | 0.15 | 0.129 | 0.141 | 0.124 | 0.198 | 0.122 | 0.15 |
| 48 | 16.7 | 15.7 | 17.4 | 17.7 | 16 | 16.5 | 15.2 | 16.4 |
| 49 | 71.5 | 70 | 70.8 | 69.2 | 70.8 | 71.8 | 69.2 | 70.8 |
| 50 | 136.8 | 131.3 | 128 | 130.8 | 137.2 | 128 | 125.5 | 124.5 |
| 51 | 75 | 71.8 | 70.8 | 71.5 | 76 | 70 | 73.5 | 75 |
| 52 | 2.73 | 2.58 | 2.61 | 2.64 | 2.96 | 2.91 | 2.6 | 2.6 |
| 53 | 184.1 | 199.7 | 205.3 | 206.8 | 238.8 | NA | 237.5 | 227.2 |
| 54 | 4.62 | 4.85 | 4.85 | 4.77 | 4.96 | 4.44 | 4.87 | 3.77 |
| 55 | 71.2 | 67.8 | 66.7 | 69.9 | 63.1 | 74.4 | 65.8 | 68.7 |
| 56 | 70.3 | 66.2 | 65.4 | 67.5 | 62.3 | 73.4 | 64.2 | 65.2 |
| 57 | 2.15 | 2.3 | 2.19 | 2 | 2.28 | 2.41 | 1.37 | 2.16 |

Table 285. Provided are the values of each of the parameters (as described above) measured in maize accessions (Line). Growth conditions are specified in the experimental procedure section.

TABLE 286
Measured parameters in Maize Hybrids Field A 47K per acre (lines 25-32)

| | Line | | | | | | | |
|---|---|---|---|---|---|---|---|---|
| Correlation | Line- | Line- | Line- | Line- | Line- | Line- | Line- | Line- |
| ID | 25 | 26 | 27 | 28 | 29 | 30 | 31 | 32 |
| 1 | 57.8 | 58.7 | 56.4 | 52.6 | 57 | 54.6 | 59.8 | 55.7 |
| 2 | 94.1 | 97.3 | 96.8 | 89.4 | 97.4 | 90 | 95.8 | 96.9 |
| 3 | 18 | 18.9 | 16.3 | 17.5 | 19.2 | 14.8 | 13.3 | 13.4 |
| 4 | 55.5 | 49.3 | 50 | 50.7 | 53.8 | 55.4 | 55 | 56.1 |
| 5 | 178.4 | 185.2 | 178.5 | 174.9 | 163.6 | 273.5 | 438.2 | 418 |
| 6 | 19.8 | 38.4 | 3.8 | 31.5 | 6 | 48.2 | 47.7 | 33.3 |
| 7 | 7.42 | 9.75 | 11.03 | 7.9 | 6.67 | 6.75 | 19.19 | 11.93 |
| 8 | 222.4 | 256.1 | 197.1 | 214.7 | 241.2 | 186.6 | 169.4 | 163.6 |
| 9 | 15.8 | 13.5 | 13.8 | 16.1 | 17 | 15.9 | 16.5 | 15.3 |
| 10 | 1.4 | 2.09 | 0.86 | 1.41 | 2.03 | 0.89 | 0.49 | 0.63 |
| 11 | 5.07 | 4.5 | 4.45 | 5.08 | 5.25 | 4.56 | 4.1 | 4.22 |
| 12 | 0.575 | 0.643 | 0.491 | 0.572 | 0.626 | 0.462 | 0.477 | 0.427 |
| 13 | 1.03 | 1 | 1.03 | 1.03 | 1 | 1 | 1 | 1 |
| 14 | 50.5 | 54.8 | 57.5 | 54.2 | 65 | 57.2 | 54 | 56 |
| 15 | 0.138 | 0.162 | 0.106 | 0.139 | 0.167 | 0.111 | 0.067 | 0.099 |
| 16 | 7654.2 | 6070.4 | 6095.7 | 6073.6 | 5804 | 4575 | 5008 | 4604.8 |
| 17 | 4.62 | 5.12 | 4.3 | 4.47 | 4.35 | 3.63 | 4.86 | 3.25 |
| 18 | 235.9 | 276.9 | 237.9 | 234.9 | 283.4 | 212.1 | 264.2 | 181.5 |
| 19 | 105.3 | 113.3 | 67.5 | 106.9 | 121.2 | 69.2 | 44.3 | 44.7 |
| 20 | 33.4 | 38.1 | 27.8 | 33 | 31.8 | 28.5 | 13.9 | 25.4 |
| 21 | 5.25 | 6 | 4.25 | 8.5 | 6.33 | −1 | −3.33 | NA |
| 22 | 0.53 | 0.536 | 0.478 | 0.519 | 0.482 | 0.447 | 0.405 | 0.48 |
| 23 | 131.3 | 144.7 | 97 | 127.1 | 164 | 88.4 | 70.4 | 77 |
| 24 | 38 | 27.9 | 20.7 | 19.5 | 19.6 | 35.9 | 30.2 | 21.3 |
| 25 | 16.9 | 17.8 | 16.3 | 15.7 | 16.7 | NA | 15.6 | 15.7 |
| 26 | 567 | 486.7 | 494.2 | 426.2 | 393.5 | 335.6 | 373.5 | 349.3 |
| 27 | 1 | 1.67 | 1 | 1.67 | 1.67 | 1 | 1.33 | 1.33 |
| 28 | 2.46 | 2.61 | 1.69 | 2.37 | 2.34 | 1.65 | 1.06 | 1.29 |
| 29 | 6.78 | 3.35 | 4.04 | 4.54 | 3.89 | 2.47 | 1.8 | 1.44 |
| 30 | 0.237 | 0.262 | 0.192 | 0.244 | 0.31 | 0.218 | 0.139 | 0.168 |
| 31 | 12.1 | 22 | 12.6 | 14.3 | 15.6 | 14.2 | 10.2 | 17.1 |
| 32 | 125.4 | 140.4 | 92.9 | 124.5 | 151.9 | 96.4 | 56.4 | 69.5 |
| 33 | 8.22 | 9.44 | 6.73 | 7.92 | 9.28 | 8.26 | 7.79 | 9.74 |
| 34 | 44.8 | 49.9 | 43.2 | 47.1 | 44.4 | 37.9 | 35 | 36.9 |
| 35 | 708 | 673.9 | 617.6 | 758.8 | 752.7 | 574.8 | NA | 656 |
| 36 | 11.42 | 6 | 8.33 | 9.58 | 9.25 | 13.81 | 12.67 | 16.17 |
| 37 | 132.9 | 162.5 | 133.6 | 108.7 | 141.2 | 96.5 | 93 | 103.4 |
| 38 | 16 | 17 | 14 | 16.8 | 17 | 14.3 | 14.3 | 14.7 |
| 39 | 15.5 | 16.8 | 14.4 | 15.7 | 17.8 | 15.5 | 14.1 | 13.1 |
| 40 | 15.9 | 18.7 | 18.9 | 17.3 | 21.9 | 20.2 | 19.3 | 19.9 |
| 41 | 1.74 | 1.69 | 1.4 | 1.6 | 1.68 | 1.38 | 1.25 | 1.53 |
| 42 | 0.41 | 0.423 | 0.377 | 0.313 | 0.419 | 0.311 | 0.309 | 0.349 |
| 43 | 0.778 | 0.799 | 0.715 | 0.713 | 0.804 | 0.676 | 0.697 | 0.738 |
| 44 | 1.51 | 1.83 | 1.48 | 1.22 | 1.62 | 1.15 | 1.03 | 1.22 |
| 45 | 529.6 | 515 | 384.6 | 530.7 | 538.3 | 452.3 | 233.2 | 390.6 |
| 46 | 34.8 | 42.3 | 30.7 | 37.2 | 40.3 | 33 | 28.3 | 29 |
| 47 | 0.129 | 0.187 | 0.159 | 0.138 | 0.134 | 0.144 | 0.137 | 0.243 |
| 48 | 16.5 | 19.9 | 15.5 | 16.9 | 17.9 | 14.9 | 13.3 | 14 |
| 49 | 65.8 | 70 | 70.8 | 68.5 | 68 | 80.7 | 82.3 | 77 |
| 50 | 121.5 | 130.8 | 132.5 | 131.2 | 139.8 | 137.2 | 133 | 134.2 |
| 51 | 71 | 76 | 75 | 77 | 74.3 | 80 | 79 | 78.3 |
| 52 | 2.68 | 2.69 | 2.51 | 2.79 | 2.86 | 2.8 | 2.68 | 2.62 |
| 53 | 234.8 | 232.6 | 209.5 | 196.3 | 246.8 | NA | 191.1 | 202.3 |
| 54 | 5.06 | 5.12 | 3.83 | 4.31 | 4.91 | 3.13 | 3.07 | 3.48 |
| 55 | 72 | 70.1 | 57.8 | 70.2 | 79.5 | 53.5 | 43.8 | 45.5 |
| 56 | 68.5 | 69 | 55.7 | 68 | 78.2 | 51.4 | 38.4 | 42.3 |
| 57 | 1.98 | 1.74 | 1.25 | 1.31 | 1.21 | 1.39 | 1.35 | 1.19 |

Table 286. Provided are the values of each of the parameters (as described above) measured in maize accessions (Line). Growth conditions are specified in the experimental procedure section.

TABLE 287
Measured parameters in Maize Hybrids Field A 47K per acre (lines 33-40)

| | Line | | | | | | | |
|---|---|---|---|---|---|---|---|---|
| Correlation | Line- | Line- | Line- | Line- | Line- | Line- | Line- | Line- |
| ID | 33 | 34 | 35 | 36 | 37 | 38 | 39 | 40 |
| 1 | 55.4 | 55.4 | 48 | 55.3 | 54.6 | 57.6 | 57.1 | 56.5 |
| 2 | 98 | 95.6 | 95.2 | 96.7 | 96 | 96.6 | 96.3 | 97.4 |
| 3 | 19 | 15.6 | 18.4 | 20.4 | 14.2 | 18.4 | 18 | 17.6 |
| 4 | 47.7 | 49.6 | 49.1 | 49.5 | 56.4 | 51 | 50 | 51 |
| 5 | 176.1 | 219.5 | 182.8 | 201.6 | 182 | 177.9 | 178.5 | 183.1 |
| 6 | 53.2 | 24.3 | 29.7 | 38.6 | 20.1 | 23 | 46 | 23.2 |
| 7 | 9.89 | 12.26 | 7.39 | 9.02 | 13.84 | 9.66 | 7.55 | 10.48 |
| 8 | 245.2 | 266.7 | 228.5 | 236.4 | 231.1 | 267.1 | 230.5 | 214.5 |
| 9 | 15.7 | 14.3 | 15.8 | 15.5 | 12.5 | 14.5 | 13.2 | 13.5 |
| 10 | 1.81 | 1.31 | 1.59 | 1.79 | 1.01 | 1.76 | 1.83 | 1.28 |
| 11 | 5.06 | 4.23 | 5.03 | 5.08 | 4.55 | 4.87 | 4.85 | 4.56 |
| 12 | 0.584 | 0.611 | 0.576 | 0.59 | 0.565 | 0.653 | 0.586 | 0.521 |
| 13 | 1.03 | 1 | 1 | 1 | 1 | 1.06 | 1 | 1 |
| 14 | 60 | 61.2 | 61.5 | 56.5 | 61.7 | 55.7 | 58.8 | 59.3 |
| 15 | 0.152 | 0.133 | 0.16 | 0.182 | 0.112 | 0.152 | 0.153 | 0.136 |
| 16 | 7191.3 | 6537.8 | 4805.7 | 6683.3 | 4783.3 | 7525.7 | 6599.5 | 6049.7 |
| 17 | 4.48 | 4.75 | 4.2 | 4.9 | 4.33 | 5.43 | 4.58 | 4.02 |
| 18 | 269.9 | 291.5 | 264.5 | 271.5 | 265.4 | 298.2 | 260.8 | 237.7 |
| 19 | 109.3 | 75.9 | 106.9 | 125 | 62 | 93.4 | 114.9 | 103.3 |
| 20 | 31.5 | 25 | 34.7 | 36.2 | 29 | 31 | 38 | 35.1 |
| 21 | 4 | −1.5 | 8 | 6 | 3.33 | 6.33 | 5 | 4 |
| 22 | 0.513 | 0.417 | 0.498 | 0.499 | 0.421 | 0.48 | 0.476 | 0.397 |
| 23 | 130.5 | 90.1 | 140.2 | 160.6 | 80.3 | 115.4 | 145.3 | 126.2 |
| 24 | 41.2 | 39.9 | 28.4 | 39.8 | 21.4 | 38.3 | 28.6 | 39.3 |
| 25 | 15.8 | 17.9 | NA | 16.9 | 16.9 | 17.3 | 18.2 | 17.3 |
| 26 | 486.6 | 456 | 358.6 | 449.4 | 363.4 | 507.9 | 537.7 | 414.8 |
| 27 | 1.33 | 1 | 1.33 | 2.67 | 1.33 | 1.33 | 2 | 1.33 |
| 28 | 2.2 | 1.68 | 2.3 | 2.72 | 1.42 | 2.43 | 2.29 | 1.9 |
| 29 | 3.45 | 4.2 | 3.7 | 3.58 | 3.11 | 3.03 | 4.86 | 2.1 |
| 30 | 0.263 | 0.248 | 0.29 | 0.311 | 0.211 | 0.28 | 0.274 | 0.281 |
| 31 | 16.3 | 29.7 | 14.8 | 31.8 | 24.2 | 17 | 23.2 | 24.1 |
| 32 | 132.2 | 103.7 | 144.8 | 150.5 | 87.7 | 133.2 | 130.2 | 111.7 |
| 33 | 8.33 | 7.53 | 8.85 | 7.58 | 10.17 | 9.18 | 10.09 | 8.94 |
| 34 | 44.4 | 41.7 | 44 | 46.8 | 36.9 | 44.2 | 51 | 45.4 |
| 35 | 685.1 | NA | 695.7 | 737.4 | 263.5 | 633.4 | 672 | 568.8 |
| 36 | 10.42 | 9.5 | 5.83 | 2.58 | 12.17 | 9.75 | 8.67 | 1 |
| 37 | 140.7 | 139.4 | 149.6 | 113.1 | 111.2 | 128.9 | 171.2 | 134.3 |
| 38 | 15.6 | 15.5 | 15.4 | 16 | 14.1 | 17.7 | 15.9 | 15.3 |
| 39 | 15.4 | 15.3 | 17 | 15.9 | 14.4 | 16.9 | 16.1 | 14.7 |
| 40 | 22.6 | 20.3 | 18.8 | 18.1 | 21.7 | 19 | 20 | 21.2 |
| 41 | 1.43 | 1.18 | 1.59 | 1.86 | 1.26 | 1.55 | 1.55 | 1.45 |
| 42 | 0.289 | 0.274 | 0.321 | 0.332 | 0.237 | 0.501 | 0.394 | 0.381 |
| 43 | 0.793 | 0.741 | 0.798 | 0.727 | 0.704 | 0.793 | 0.805 | 0.763 |
| 44 | 1.58 | 1.58 | 1.83 | 1.36 | 1.33 | 1.45 | 1.87 | 1.51 |
| 45 | 492.9 | 357.6 | 547.6 | 560.4 | 327.4 | 445.5 | 500.2 | 470.6 |
| 46 | 42.5 | 34.7 | 42.9 | 41.2 | 30.6 | 35.6 | 37.3 | 34 |
| 47 | 0.13 | 0.322 | 0.123 | 0.27 | 0.304 | 0.18 | 0.228 | 0.292 |
| 48 | 18.3 | 16.4 | 18.2 | 19.4 | 13.9 | 17.3 | 17.7 | 16.5 |
| 49 | 73 | 79.2 | 68.5 | 71 | 76.5 | 70 | 70 | 76 |
| 50 | 137 | 139.8 | 138 | 134.5 | 140 | 134.2 | 133.8 | 137.5 |
| 51 | 77 | 78.5 | 76.5 | 78 | 78.3 | 76.3 | 75 | 77 |
| 52 | 2.95 | 2.67 | 3 | 2.7 | 2.78 | 2.61 | 2.68 | 2.62 |
| 53 | 221 | 255.1 | NA | 227.6 | 201.4 | 241.1 | 234.6 | 248.3 |
| 54 | 4.35 | 4.04 | 4.92 | 4.61 | 3.59 | 4.38 | 5.21 | 4.02 |
| 55 | 75.7 | 56.8 | 73.2 | 82.1 | 51.7 | 71.1 | 68.9 | 63.1 |
| 56 | 74.3 | 53.7 | 71.8 | 80.9 | 49.2 | 69.4 | 67.8 | 61.3 |
| 57 | 2.18 | 1.74 | 1.53 | 2.24 | 1.07 | 2.04 | 1.54 | 2.03 |

Table 287. Provided are the values of each of the parameters (as described above) measured in maize accessions (Line). Growth conditions are specified in the experimental procedure section.

TABLE 288
Measured parameters in Maize Hybrids Field B 35K per acre (lines 1-8)

| | Line | | | | | | | |
|---|---|---|---|---|---|---|---|---|
| Correlation ID | Line-1 | Line-2 | Line-3 | Line-4 | Line-5 | Line-6 | Line-7 | Line-8 |
| 1 | 83.7 | 77.2 | 78.2 | 77.7 | 65.8 | 85.5 | 61.8 | 85.9 |
| 2 | 3.32 | 2.89 | 1.61 | 1.48 | 2.53 | 2.7 | 1.93 | 2.4 |
| 3 | 81.8 | 81 | 82 | 82 | 82 | 82 | 83.5 | 82 |
| 4 | 248.7 | 244.4 | 239.6 | 258.9 | 230.2 | 241.1 | 238.3 | 258.7 |
| 5 | 3.93 | 3.82 | 3.89 | 4.06 | 3.35 | 3.66 | 2.95 | 3.87 |
| 6 | 96.3 | 89.8 | NA | NA | 94.2 | 93.3 | 88.8 | 93.7 |
| 7 | 26 | 41.2 | 57.5 | 41.7 | 56.2 | 47.6 | 43.6 | 67.7 |
| 8 | 8.4 | 12.2 | 6.9 | 9.8 | 14 | 7 | 11.2 | 9.4 |
| 9 | 250.3 | 233.7 | 274.2 | 236 | 203.9 | 245.3 | 224.5 | 232.4 |
| 10 | 0.602 | 0.57 | 0.628 | 0.549 | 0.519 | 0.575 | 0.552 | 0.535 |
| 11 | 20.3 | 19.4 | 19.7 | 19.2 | 17.4 | 20.5 | 16.3 | 21.8 |
| 12 | 16.5 | 15 | 13.8 | 16.2 | 15.5 | 16.5 | 15.2 | 16.2 |
| 13 | 2.25 | 2.12 | 1.83 | 1.51 | 1.75 | 1.61 | 1.76 | 1.87 |
| 14 | 5.26 | 5.1 | 5.16 | 5.2 | 5 | 5.4 | 4.9 | 5.1 |
| 15 | 1.01 | 1.06 | 1 | 1 | 1 | 1 | 1 | 1.03 |
| 16 | 4.81 | 4.55 | 5.12 | 3.99 | 4.01 | 4.83 | 3.94 | 4.75 |
| 17 | 275.1 | 233.7 | 274.2 | 252.7 | 230.9 | 258.1 | 242.1 | 252 |
| 18 | 58.5 | 53 | 55.7 | 52.5 | 57.8 | 57 | 62 | 53.8 |
| 19 | 59.8 | 54.8 | 55.5 | 51.1 | 51.3 | 55.2 | 55.7 | 51.4 |
| 20 | 161.5 | 179.7 | 166.8 | 172.7 | 171.9 | 180.3 | 184.2 | 171.8 |
| 21 | 0.182 | 0.161 | 0.163 | 0.165 | 0.147 | 0.171 | 0.133 | 0.178 |
| 22 | 3.33 | NA | NA | NA | NA | 4 | 2 | NA |
| 23 | 165 | 166.3 | 113.6 | 149.2 | 154.9 | 120.7 | 124.9 | 171 |
| 24 | 131.8 | NA | NA | 123.4 | 122.8 | 114.1 | 106 | 145.9 |
| 25 | 37.7 | 42.3 | 39.2 | 36.9 | 36.2 | 36.7 | 33.6 | 39.1 |
| 26 | 7456.5 | 7955.5 | 6370.2 | 7391.1 | 5513.1 | 7445.3 | 6507.7 | 7178.2 |
| 27 | 62.9 | 57.1 | 46.7 | 35 | 48.6 | 51.3 | 47.2 | 42.8 |
| 28 | 18.3 | 18.3 | 16.8 | 19 | 17.9 | 17.6 | 16.8 | 18.1 |
| 29 | 541.4 | 575.1 | 444.2 | 557.6 | 423.1 | 542 | 484.8 | 495.1 |
| 30 | 0.529 | 0.497 | 0.518 | 0.533 | 0.531 | 0.507 | 0.483 | 0.496 |
| 31 | 4.3 | 4.93 | 5.26 | 7.12 | 5.32 | 4.41 | 4.86 | 6.92 |
| 32 | 0.323 | 0.299 | 0.284 | 0.28 | 0.254 | 0.308 | 0.253 | 0.268 |
| 33 | 1.11 | 1 | 1 | 1.33 | 1 | 1 | 1 | 1.67 |
| 34 | 43.1 | 44 | 43.2 | 44.4 | 42.2 | 47.9 | 43.1 | 48.2 |
| 35 | 710.3 | 659.9 | 594.8 | 717.6 | 654.8 | 789 | 654.3 | 782.7 |
| 36 | 2.96 | 2.89 | 2.85 | 2.78 | 2.32 | 2.9 | 1.98 | 2.99 |
| 37 | 178.3 | 141.1 | 133.5 | 146.3 | 129.6 | 138.3 | 137.4 | 111.4 |
| 38 | 2.61 | 2.05 | 1.99 | 2.22 | 2.02 | 2.12 | 2.06 | 1.61 |
| 39 | 12.1 | 13.1 | 15.6 | 15.7 | 12 | 15.9 | 10.7 | 15.5 |
| 40 | 618.6 | 633.1 | 535.7 | 593.1 | 577.4 | 602.3 | 508.1 | 636 |
| 41 | 41.7 | 38.1 | 39.3 | 42.8 | 35.7 | 43.4 | 32.8 | 41.3 |
| 42 | 0.103 | 0.127 | 0.146 | 0.122 | 0.112 | 0.126 | 0.121 | 0.143 |
| 43 | 19 | 18 | 18.3 | 18 | 16.7 | 18.9 | 15.4 | 19.9 |
| 44 | 170.3 | 148.1 | 147 | 149 | 133.5 | 155.3 | 122 | 159.3 |
| 45 | 7.04 | 4.84 | 7.33 | 8.04 | 7.33 | 5.32 | 8.64 | 7.9 |
| 46 | 2.78 | 2.69 | 2.73 | 3.02 | 2.73 | 2.91 | 2.71 | 2.64 |
| 47 | 16.6 | 16.8 | 16.8 | 19.2 | 16 | 19.5 | 17.6 | 17.7 |
| 48 | 17.3 | 17.3 | 17.8 | 19.3 | 17 | 20 | 18.1 | 17.9 |
| 49 | 16.2 | 15.9 | 15.8 | 16.1 | 16.8 | 17.7 | 17.2 | 16.4 |
| 50 | 84.3 | 77.9 | 79.8 | 78.9 | 68.7 | 86.9 | 62.9 | 87.3 |
| 51 | 1.29 | 1.47 | 1.49 | 1.32 | 1.14 | 1.41 | 1.3 | 1.3 |
| 52 | 0.688 | 0.598 | 0.602 | 0.696 | 0.671 | 0.589 | 0.592 | 0.738 |
| 53 | 0.773 | 0.797 | 0.607 | 0.815 | 0.774 | 0.787 | 0.558 | 0.62 |
| 54 | 81.2 | 82 | NA | 76.3 | 81 | 78 | 82.5 | 82 |
| 55 | 140.3 | 134 | 136.5 | 134 | 139.8 | 139 | 145.5 | 135.8 |

Table 288. Provided are the values of each of the parameters (as described above) measured in maize accessions (Line). Growth conditions are specified in the experimental procedure section.

TABLE 289
Measured parameters in Maize Hybrids Field B 35K per acre (lines 9-16)

| | Line | | | | | | | |
|---|---|---|---|---|---|---|---|---|
| Correlation ID | Line-9 | Line-10 | Line-11 | Line-12 | Line-13 | Line-14 | Line-15 | Line-16 |
| 1 | NA | 86.8 | 94.2 | 93.5 | 95.5 | 93.8 | NA | 95.5 |
| 2 | 48.8 | 34.8 | 33.8 | 36.6 | 44.9 | 24.7 | 40 | 42.6 |
| 3 | 7.1 | 14.8 | 16 | 8 | NA | 8.3 | 8.3 | 17.4 |
| 4 | 4.66 | 3.97 | 4.56 | 4.39 | 4.8 | 4.08 | 4.64 | 4.95 |
| 5 | 271.9 | 242.1 | 252.9 | 258.9 | 283.3 | 221.9 | 263.4 | 305.6 |
| 6 | 247.4 | 222.5 | 231.3 | 247.8 | 283.3 | 208.9 | 263.4 | 283 |
| 7 | 0.61 | 0.523 | 0.558 | 0.573 | 0.684 | 0.549 | 0.632 | 0.655 |
| 8 | NA | 2.5 | NA | NA | NA | NA | NA | 3 |
| 9 | 159.5 | 109.1 | 81.7 | 169.7 | 130.9 | 179.5 | 144.6 | 114.9 |
| 10 | 43.9 | 39.3 | 44.8 | 49.8 | 45.1 | 44.4 | 30.9 | 48.6 |
| 11 | 494.3 | 375.8 | 427.3 | 569.3 | 522.5 | 531.8 | 596.7 | 600.4 |
| 12 | 4.58 | 3.71 | 1.17 | 4.4 | NA | 5.63 | 5.62 | 5.21 |
| 13 | 0.335 | 0.248 | 0.198 | 0.338 | 0.318 | 0.287 | 0.284 | 0.295 |
| 14 | 17.9 | 16.5 | 16.6 | 19 | 18.4 | 18.1 | 18.2 | 18.1 |
| 15 | 46.8 | 41.7 | 42 | 43.6 | 47.2 | 52.2 | 47.3 | 44.4 |
| 16 | 711.5 | 659.3 | 661.1 | 696.7 | 685.6 | 827 | 638.6 | 662.2 |
| 17 | 606.8 | 498.3 | 385.1 | 636.9 | 584.9 | 688.2 | 588.3 | 446.5 |
| 18 | 41.6 | 33.3 | 34.4 | 43.5 | 41.3 | 45.3 | 40.6 | 39.1 |
| 19 | 18.6 | 15.7 | 15.5 | 19.6 | 18.9 | 20.3 | 19 | 17.7 |
| 20 | 2.84 | 2.69 | 2.8 | 2.83 | 2.78 | 2.84 | 2.71 | 2.8 |
| 21 | 81.6 | 64.5 | 59.7 | 81.8 | 81.5 | 84.5 | 79.6 | 77.1 |
| 22 | 74.4 | 63.1 | 52.8 | 81.4 | 78.4 | 80.6 | 78.7 | 74.2 |
| 23 | 5.25 | 4.96 | 4.79 | 5.08 | 5.24 | 4.89 | 4.99 | 5.12 |
| 24 | 2.02 | 2.37 | 2.96 | 1.84 | 1.86 | 1.81 | 1.3 | 2.15 |
| 25 | 19.8 | 16.5 | 15.8 | 20.4 | 19.7 | 21.8 | 20.2 | 18.9 |
| 26 | 15.2 | 15.8 | 15.2 | 16 | 14.5 | 15.8 | 13.5 | 14.9 |
| 27 | 2.12 | 1.55 | 1.1 | 2.14 | 2 | 2.13 | 2.23 | 1.83 |
| 28 | 1.03 | 1.06 | 1.19 | 1 | 1 | 1.03 | 1 | 1.03 |
| 29 | 59 | 61.2 | 56.2 | 57 | 56.5 | 55.8 | 57.7 | 60 |
| 30 | 133 | 85.4 | 70.6 | 148.1 | NA | 168.7 | NA | 98.7 |
| 31 | 40.1 | 31.4 | 26.4 | 40 | 40.6 | 43.5 | 43.6 | 30 |
| 32 | 0.492 | 0.485 | 0.508 | 0.489 | 0.49 | 0.532 | 0.546 | 0.467 |
| 33 | 1.33 | 1 | 1 | 1.33 | 1.33 | 1.67 | 1.67 | 2 |
| 34 | 165 | 119.8 | 97.7 | 164.6 | 154.7 | 153.2 | 154.8 | 136.1 |
| 35 | 18.9 | 14 | 15.7 | 18.1 | 15.5 | 15.3 | 12.3 | 17.2 |
| 36 | 6.98 | 9.12 | 10.03 | 6.2 | 7.42 | 7.69 | 7.74 | 7.36 |
| 37 | 17 | 16.4 | 15.7 | 17.7 | 17.5 | 17.7 | 18.1 | 19.1 |
| 38 | 18.4 | 15.9 | 15.6 | 18.8 | 18.5 | 18.7 | 18.5 | 18.6 |
| 39 | 16.8 | 16.8 | 16.2 | 15.8 | 16.4 | 15.6 | 15.8 | 17.7 |
| 40 | 1.43 | 1.12 | 1.06 | 1.22 | NA | 1.33 | 1.55 | NA |
| 41 | 0.689 | 0.461 | 0.474 | 0.733 | 0.743 | 0.656 | 0.622 | 0.661 |
| 42 | 0.795 | 0.634 | 0.532 | 0.56 | 0.708 | 0.796 | 0.597 | 0.811 |
| 43 | 80 | 83.5 | 84 | NA | 82 | NA | 76 | 82.5 |
| 44 | 141 | 146 | 140.2 | 139 | 138.5 | 137.8 | 138.8 | 145.5 |
| 45 | 82 | 84.8 | 84 | 82 | 82 | 82 | 82 | 85.5 |
| 46 | 3.75 | 2.49 | 2.52 | 3.78 | 3.78 | 3.74 | 4.33 | 3.33 |
| 47 | 245.5 | 226.4 | 225.3 | 252.7 | 255.9 | 238.8 | 243.5 | 263.5 |
| 48 | 55.7 | 55 | 51.7 | 52.4 | 60.7 | 53.3 | 53.1 | 52 |
| 49 | 158.9 | 133.6 | 174.3 | 168.4 | 131.3 | 168 | 174.8 | 169.5 |
| 50 | 0.185 | 0.134 | 0.117 | 0.183 | 0.17 | 0.169 | 0.167 | 0.153 |
| 51 | 2.81 | 1.96 | 1.79 | 2.79 | 2.74 | 2.83 | 2.7 | 2.22 |
| 52 | 145.6 | 104.5 | 110.6 | 138.4 | 145.7 | 161.6 | 146.4 | 137.1 |
| 53 | 2.19 | 1.74 | 1.8 | 2.15 | 2.14 | 2.42 | 2.2 | 2.03 |
| 54 | 0.161 | 0.154 | 0.168 | 0.147 | 0.148 | 0.119 | 0.112 | 0.156 |
| 55 | 7016.5 | 5165.4 | 5517.4 | 7774.4 | 7445 | 7311.6 | 8007.2 | 8854.2 |

Table 289. Provided are the values of each of the parameters (as described above) measured in maize accessions (Line). Growth conditions are specified in the experimental procedure section.

TABLE 290
Measured parameters in Maize Hybrids Field B 35K per acre (lines 17-24)

| | Line | | | | | | | |
|---|---|---|---|---|---|---|---|---|
| Correlation | Line- | Line- | Line- | Line- | Line- | Line- | | Line- |
| ID | 17 | 18 | 19 | 20 | 21 | 22 | Line-23 | 24 |
| 1 | 94.3 | 93.4 | 92.2 | 92.8 | 94 | 91.9 | 89.4 | NA |
| 2 | 43.4 | 35.1 | 82.8 | 32.4 | 73.8 | 43.7 | 4.5 | 12.1 |
| 3 | 8.3 | 11.2 | 7 | 8.8 | 13.8 | 9.6 | 14.1 | 7 |
| 4 | 4.93 | 4.71 | 4 | 4.64 | 4.93 | 4.38 | 4.67 | 3.71 |
| 5 | 279.1 | 280.2 | 233.6 | 225.4 | 309.1 | 248.4 | 296.9 | 223.7 |
| 6 | 256.9 | 265 | 219.4 | 225.4 | 270.2 | 228.8 | 261.6 | 207.6 |
| 7 | 0.616 | 0.653 | 0.563 | 0.542 | 0.644 | 0.546 | 0.615 | 0.555 |
| 8 | 2 | NA | NA | 2.67 | 2.75 | NA | 3 | NA |
| 9 | 136 | 131 | 150.2 | 174.2 | 156.5 | 146.5 | 174.6 | 129.7 |
| 10 | 70.3 | 53.6 | 26.7 | 55.6 | 47.5 | 63.6 | 46 | 35.9 |
| 11 | 532.7 | 565.6 | 421.2 | 582.1 | 514 | 555.6 | 666.7 | 567.7 |
| 12 | 6.37 | 5.52 | 4.24 | 6.34 | 8.29 | 5.57 | 6.18 | 7.11 |
| 13 | 0.374 | 0.333 | 0.254 | 0.323 | 0.353 | 0.329 | 0.477 | 0.31 |
| 14 | 18.8 | 18 | 16.3 | 18.3 | 19 | 17.5 | 17.9 | 18 |
| 15 | 44.7 | 41.2 | 47 | 46 | 43.6 | 47.4 | 49.1 | 52.8 |
| 16 | 736.8 | 529.9 | 714.4 | 782.1 | 653.7 | 743.2 | 792.1 | 1033.5 |
| 17 | 667.8 | 508.5 | 587.3 | 683.2 | 576.2 | 602.9 | 640.9 | 699.5 |
| 18 | 45.8 | 36.2 | 33.6 | 40.3 | 43.8 | 39 | 49.3 | 42.4 |
| 19 | 19.4 | 17.3 | 16.2 | 18.3 | 19.6 | 17.9 | 21.3 | 17.8 |
| 20 | 3 | 2.66 | 2.64 | 2.8 | 2.85 | 2.76 | 2.92 | 3.02 |
| 21 | 88.2 | 72 | 69.2 | 83.2 | 87.2 | 78 | 97.3 | 83 |
| 22 | 83.1 | 71.1 | 67.8 | 79.7 | 81.5 | 76.8 | 95.3 | 78.9 |
| 23 | 5.43 | 4.97 | 5.18 | 5.26 | 5.34 | 5.17 | 5.25 | 5.58 |
| 24 | 3.7 | 2.79 | 1.15 | 3.02 | 2.8 | 3.19 | 2.45 | 1.83 |
| 25 | 20.1 | 18.4 | 17 | 20.1 | 20.7 | 19.1 | 23.2 | 18.8 |
| 26 | 16.5 | 12.8 | 15.2 | 17 | 15 | 15.7 | 16.2 | 19.6 |
| 27 | 1.94 | 1.94 | 1.66 | 2.39 | 2.45 | 1.8 | 2.45 | 1.17 |
| 28 | 1.03 | 1.06 | 1 | 1 | 1 | 1 | 1.38 | 1 |
| 29 | 55.5 | 61.5 | 60.2 | 50.8 | 62 | 56 | 63.7 | 61 |
| 30 | 100.8 | 115.6 | 129 | NA | 121.5 | 114.3 | 136.4 | 109.5 |
| 31 | 40.5 | 39.7 | 38.9 | 40.2 | 38.5 | 38.4 | 39.9 | 35.7 |
| 32 | 0.498 | 0.427 | 0.54 | 0.479 | 0.505 | 0.456 | 0.396 | 0.499 |
| 33 | 2 | 1 | 1.33 | 1 | 2 | 1.33 | 1.33 | 1 |
| 34 | 186.6 | 142.2 | 137.1 | 154 | 178.9 | 148.7 | 189.4 | 155.3 |
| 35 | 21.1 | 16.1 | 13.8 | 10.8 | 17.2 | 15.3 | 22.9 | 14.5 |
| 36 | 7.04 | 8.43 | 7.66 | 6.31 | 7.22 | 5.58 | 8.06 | 7.62 |
| 37 | 18 | 16.4 | 16.7 | 17.8 | 17.1 | 19.8 | 20.2 | 19.5 |
| 38 | 19.2 | 16.6 | 16.7 | 19 | 18 | 20.3 | 20 | 18.9 |
| 39 | 15.7 | 16.4 | 17.4 | 16.5 | 17.1 | 17.2 | 19 | 16.1 |
| 40 | 1.23 | 1.2 | 1.41 | 1.2 | 1.12 | 1.47 | NA | 1.28 |
| 41 | 0.71 | 0.632 | 0.747 | 0.819 | 0.737 | 0.666 | 0.511 | 0.733 |
| 42 | 0.637 | 0.823 | 0.812 | 0.787 | 0.803 | 0.636 | 0.599 | 0.794 |
| 43 | 82 | 82 | NA | 81 | 82 | 80.7 | 82 | NA |
| 44 | 138.5 | 143.5 | 142.2 | 133.8 | 146.8 | 138 | 148.7 | 143.5 |
| 45 | 83 | 82 | 82 | 83 | 84.8 | 82 | 85 | 82.5 |
| 46 | 3.9 | 4.11 | 3.94 | 3.53 | 3.75 | 3.47 | 3.29 | 3.79 |
| 47 | 269.1 | 255.5 | 245.4 | 259.4 | 289.2 | 248.5 | 271.7 | 258.4 |
| 48 | 55.8 | 56.4 | 55.1 | 50.8 | 48 | 49.8 | 44.5 | 54.2 |
| 49 | 149.5 | 166.9 | 166.6 | 172.6 | 165.6 | 162.8 | 164.1 | 165.7 |
| 50 | 0.209 | 0.164 | 0.151 | 0.165 | 0.196 | 0.164 | 0.22 | 0.17 |
| 51 | 3.28 | 2.37 | 2.35 | 3.17 | 2.86 | 2.63 | 3.01 | 2.57 |
| 52 | 167.2 | 158 | 161.4 | 159.6 | 136.1 | 135.4 | 122.3 | 126.5 |
| 53 | 2.48 | 2.32 | 2.35 | 2.35 | 2.01 | 2.02 | 1.86 | 1.85 |
| 54 | 0.153 | 0.168 | 0.155 | 0.096 | 0.139 | 0.144 | 0.161 | 0.113 |
| 55 | 7512.3 | 8066.1 | 6640.5 | 8107.5 | 7876.5 | 7729.6 | 10629.6 | 7822.9 |

Table 290. Provided are the values of each of the parameters (as described above) measured in maize accessions (Line). Growth conditions are specified in the experimental procedure section.

TABLE 291
Measured parameters in Maize Hybrids Field B 35K per acre (lines 25-32)

| | Line | | | | | | | |
|---|---|---|---|---|---|---|---|---|
| Correlation ID | Line-25 | Line-26 | Line-27 | Line-28 | Line-29 | Line-30 | Line-31 | Line-32 |
| 1 | NA | NA | 91.6 | 95.4 | NA | 91.4 | 95 | 97.3 |
| 2 | 22.3 | 60.2 | 49.2 | 48.9 | 37.1 | 4.6 | 15.2 | 60.5 |
| 3 | 9.2 | 12.7 | 10 | 12.6 | 9.4 | 8.8 | 7.7 | 12 |
| 4 | 5.19 | 5.16 | 5.02 | 4.3 | 4.77 | 4.15 | 4.09 | 3.83 |
| 5 | 268.9 | 288.5 | 268.3 | 271.2 | 254.4 | 270.2 | 241.9 | 224.7 |
| 6 | 240.4 | 261.8 | 236.1 | 255.4 | 240.8 | 230.6 | 241.9 | 204.8 |
| 7 | 0.57 | 0.658 | 0.578 | 0.584 | 0.61 | 0.605 | 0.626 | 0.504 |
| 8 | NA | NA | NA | 2 | NA | 3 | 3 | 2 |
| 9 | 137 | 196.7 | 154.7 | 148.8 | 174.5 | 185 | 202.1 | 157.3 |
| 10 | 23.5 | 48.6 | 41.8 | 46.7 | 31.5 | 65 | 36.5 | 41.6 |
| 11 | 500.3 | 499.5 | 488.2 | 657.5 | 489.3 | 514.2 | 494.3 | 401.6 |
| 12 | 6.02 | 6.44 | 6.06 | 7.98 | 6.38 | 5.8 | 6.59 | 4.11 |
| 13 | 0.319 | 0.361 | 0.299 | 0.332 | 0.318 | 0.356 | 0.415 | 0.283 |
| 14 | 17.3 | 19.2 | 20.2 | 19.3 | 17.6 | 18.3 | 18 | 15.6 |
| 15 | 44.3 | 47.9 | 39.5 | 45.8 | 45.4 | 46.3 | 42.5 | 40.8 |
| 16 | 704.2 | 681 | 552 | 876.8 | 749 | 767.8 | 687.2 | 628.1 |
| 17 | 600.7 | 665.3 | 532.3 | 611.8 | 643.2 | 621.9 | 779.9 | 623.5 |
| 18 | 40.4 | 46 | 36.4 | 43.4 | 43.9 | 41.5 | 46.2 | 36.1 |
| 19 | 18 | 21.1 | 17.8 | 18.3 | 19 | 18.3 | 19.6 | 16.7 |
| 20 | 2.86 | 2.77 | 2.6 | 3.01 | 2.93 | 2.88 | 3 | 2.75 |
| 21 | 80.6 | 92.8 | 75.8 | 86.2 | 89.6 | 87.1 | 93.7 | 69.8 |
| 22 | 74.4 | 90.5 | 72.5 | 83.9 | 88.8 | 86.6 | 93.2 | 65.3 |
| 23 | 5.42 | 5.3 | 4.98 | 5.52 | 5.42 | 5.49 | 5.6 | 5 |
| 24 | 0.95 | 2.44 | 1.69 | 2.49 | 1.17 | 2.74 | 1.55 | 2.52 |
| 25 | 18.9 | 22.2 | 19.3 | 19.7 | 21 | 20 | 21.2 | 17.7 |
| 26 | 15.9 | 14.2 | 14 | 19.2 | 16.5 | 16.7 | 16.2 | 15.4 |
| 27 | 1.48 | 2.87 | 1.79 | 2.25 | 2.15 | 2.06 | 2.8 | 1.74 |
| 28 | 1.09 | 1 | 1 | 1 | 1 | 1 | 1 | 1.19 |
| 29 | 54.7 | 56.5 | 54.5 | 61.5 | 54.8 | 65 | 60.2 | 58.7 |
| 30 | 96.6 | 161 | 121.8 | 118.6 | 151.1 | 138 | NA | 124.6 |
| 31 | 37.7 | 47.2 | 38.1 | 32.1 | 39 | 37.5 | 48.2 | 40.4 |
| 32 | 0.508 | 0.533 | 0.477 | 0.497 | 0.513 | 0.471 | 0.456 | 0.493 |
| 33 | 1.67 | 1.33 | 1 | 2 | 1 | 1.33 | 1.67 | 1 |
| 34 | 160.5 | 191.4 | 142.9 | 164.9 | 163.3 | 169.1 | 188.2 | 139.7 |
| 35 | 14.9 | 15.9 | 12.9 | 18.2 | 17.2 | 15.9 | 19.6 | 13 |
| 36 | 6.48 | 8.21 | 8.02 | 6.75 | 6.83 | 5.54 | 7.28 | 9.4 |
| 37 | 16.5 | 17.8 | 17.3 | 17.6 | 19 | 19.9 | 17.5 | 17.7 |
| 38 | 16.6 | 18.4 | 17.1 | 18.2 | 20.1 | 18.7 | 20.1 | 16.7 |
| 39 | 15.3 | 16.8 | 16.1 | 17.8 | 15.8 | 17.8 | 17.6 | 18 |
| 40 | 1.31 | 1.31 | 1.5 | 1.31 | 1.48 | 1.21 | NA | 1.07 |
| 41 | 0.631 | 0.789 | 0.732 | 0.686 | 0.644 | 0.755 | 0.548 | 0.461 |
| 42 | 0.792 | 0.822 | 0.778 | 0.663 | 0.79 | 0.763 | 0.805 | 0.75 |
| 43 | 75 | 82 | NA | 82 | NA | 80 | 81 | 82.5 |
| 44 | 135.8 | 139 | 136.5 | 145.5 | 137.2 | 148 | 144.2 | 142.7 |
| 45 | 82 | 82.5 | 82 | 84 | 82.5 | 83 | 84 | 84 |
| 46 | 4.24 | 4.25 | 3.44 | 3.84 | 3.91 | 3.95 | 3.94 | 3.16 |
| 47 | 243.1 | 269.8 | 238.7 | 274.3 | 265.5 | 262.7 | 281.9 | 236.9 |
| 48 | 54.2 | 56.8 | 53.7 | 49.5 | 51.6 | 55.9 | 56.2 | 55.2 |
| 49 | 189.8 | 158.7 | 180.6 | 170.5 | 176.3 | 149.6 | 144.4 | 154.5 |
| 50 | 0.18 | 0.207 | 0.156 | 0.183 | 0.173 | 0.185 | 0.208 | 0.156 |
| 51 | 2.94 | 3.41 | 2.67 | 2.62 | 3.06 | 2.6 | 3.19 | 2.39 |
| 52 | 139.9 | 170.6 | 143 | 152.4 | 134.8 | 183.7 | 176.9 | 133 |
| 53 | 2.07 | 2.48 | 2.13 | 2.22 | 1.98 | 2.85 | 2.73 | 2.12 |
| 54 | 0.13 | 0.134 | 0.137 | 0.14 | 0.134 | 0.134 | 0.141 | 0.133 |
| 55 | 7098.5 | 6741.5 | 6439.5 | 9147.8 | 6971.8 | 7529.8 | 7624.3 | 6118.6 |

Table 291. Provided are the values of each of the parameters (as described above) measured in maize accessions (Line). Growth conditions are specified in the experimental procedure section.

TABLE 292
Measured parameters in Maize Hybrids Field B 35K per acre (lines 33-40)

| | Line | | | | | | | |
|---|---|---|---|---|---|---|---|---|
| Correlation ID | Line-33 | Line-34 | Line-35 | Line-36 | Line-37 | Line-38 | Line-39 | Line-40 |
| 1 | 90.9 | 90.5 | 94.7 | 94 | 97.2 | 97.4 | 96.1 | NA |
| 2 | 41.5 | 17.3 | 32.3 | 51.4 | 23.2 | 86.7 | 46.2 | 23.9 |
| 3 | 13.9 | 8.4 | 10.4 | 8.7 | 11.1 | 7.4 | 8.7 | 9 |
| 4 | 4.19 | 3.89 | 4 | 4.6 | 4.3 | 4.87 | 4.06 | 4.01 |
| 5 | 252.7 | 245 | 257.8 | 284.7 | 256.6 | 287.3 | 261.3 | 207.6 |
| 6 | 233.3 | 227.1 | 242.3 | 260.8 | 231.3 | 271.8 | 246.6 | 186.6 |
| 7 | 0.564 | 0.541 | 0.576 | 0.636 | 0.578 | 0.646 | 0.607 | 0.459 |
| 8 | 3 | NA | 2.25 | 2.5 | NA | NA | 2 | NA |
| 9 | 96.5 | 118.4 | 191.6 | 167 | 160.8 | 188.2 | 142.3 | 196.5 |
| 10 | 50.7 | 43.6 | 53.8 | 30.2 | 38.2 | 61.7 | 43.4 | 51.2 |
| 11 | 433.5 | 424.5 | 530.9 | 480.7 | 534.9 | 488.2 | 589.3 | 478.3 |
| 12 | 4.09 | 2.54 | 7.86 | 6.8 | 5.8 | 7 | 7.79 | 5.81 |
| 13 | 0.246 | 0.266 | 0.374 | 0.356 | 0.316 | 0.384 | 0.325 | 0.27 |
| 14 | 16.3 | 16.5 | 17.9 | 19.3 | 18.1 | 18.1 | 19.4 | 18.4 |
| 15 | 43.8 | 41.9 | 46.8 | 43.8 | 49.6 | 47.9 | 42.7 | 44.8 |
| 16 | 701.3 | 643.2 | 766 | 679 | 785.1 | 726.2 | 696.2 | 693.7 |
| 17 | 450.5 | 506.5 | 718.1 | 612.1 | 618.2 | 692.5 | 589.7 | 695.6 |
| 18 | 33.8 | 32.8 | 44 | 41.7 | 42.3 | 49.7 | 39.2 | 40.7 |
| 19 | 15.3 | 15.3 | 20.1 | 19.3 | 18.4 | 21.3 | 16.6 | 19.1 |
| 20 | 2.81 | 2.72 | 2.79 | 2.74 | 2.9 | 2.97 | 3 | 2.71 |
| 21 | 62.4 | 64.7 | 92.6 | 87.4 | 82.5 | 95.5 | 77.2 | 78.4 |
| 22 | 59.8 | 63.4 | 86.1 | 86.7 | 81 | 88.8 | 76.5 | 77.9 |
| 23 | 4.95 | 5 | 5.29 | 5.28 | 5.32 | 5.4 | 5.43 | 4.86 |
| 24 | 3.31 | 2.88 | 2.92 | 1.91 | 1.42 | 3.26 | 2.46 | 1.93 |
| 25 | 15.9 | 16.5 | 22.2 | 21 | 19.6 | 22.4 | 18 | 20.5 |
| 26 | 16.1 | 15.3 | 16.4 | 15.5 | 15.8 | 15.2 | 16.3 | 15.5 |
| 27 | 1.43 | 1.57 | 2.61 | 2.63 | 2.08 | 3.42 | 1.79 | 1.89 |
| 28 | 1 | 1.03 | 1.03 | 1 | 1.03 | 1 | 1 | 1.25 |
| 29 | 60 | 62.8 | 63.2 | 61.2 | 59.5 | 58.5 | 62.5 | 52.5 |
| 30 | 74.7 | 99.4 | 159.6 | 142.8 | 132.2 | 160 | 111.4 | 150.2 |
| 31 | 28.2 | 33.3 | 43.9 | 39.6 | 39.1 | 45.7 | 36.3 | 44.9 |
| 32 | 0.465 | 0.465 | 0.495 | 0.489 | 0.503 | 0.524 | 0.473 | 0.53 |
| 33 | 1.33 | 1 | 1.67 | 1.33 | 1.67 | 3 | 1.67 | 1 |
| 34 | 113.9 | 123.9 | 185.1 | 174.4 | 158.7 | 200.2 | 153.8 | 142.5 |
| 35 | 13.8 | 13.2 | 19.3 | 17.5 | 14.7 | 18 | 19.1 | 13.1 |
| 36 | 9.74 | 8.27 | 6.42 | 8.32 | 6.08 | 7.53 | 7.87 | 7.58 |
| 37 | 18.7 | 17.9 | 17.1 | 16.9 | 17.8 | 17.3 | 19.1 | 15.8 |
| 38 | 17.2 | 17.6 | 17.4 | 16.3 | 18.7 | 19.4 | 19.7 | 15.9 |
| 39 | 16.8 | 17.3 | 18.8 | 17.3 | 16.1 | 16.2 | 17.4 | 15.9 |
| 40 | 1.2 | 1.23 | 1.08 | 1.17 | 1.42 | 1.2 | 1.36 | 1.48 |
| 41 | 0.582 | 0.587 | 0.762 | 0.636 | 0.577 | 0.751 | 0.724 | 0.724 |
| 42 | 0.476 | 0.638 | 0.817 | 0.822 | 0.537 | 0.445 | 0.839 | 0.789 |
| 43 | 84 | 83.5 | 82.5 | 83 | NA | 82 | 82 | NA |
| 44 | 145.5 | 146.8 | 148 | 146.8 | 140.5 | 141 | 145.5 | 134.5 |
| 45 | 85.5 | 84 | 84.8 | 85.5 | 81 | 82.5 | 83 | 82 |
| 46 | 2.82 | 2.85 | 3.75 | 3.55 | 3.87 | 4.01 | 4.18 | 4.11 |
| 47 | 227.2 | 224.4 | 273.2 | 290.6 | 249.4 | 270.5 | 269.4 | 252.7 |
| 48 | 53.3 | 59.5 | 54.1 | 51.2 | 51.4 | 51.7 | 52 | 52.9 |
| 49 | 177.3 | 170.8 | 161.1 | 167.3 | 177.8 | 165.4 | 171.1 | 178.5 |
| 50 | 0.128 | 0.137 | 0.205 | 0.192 | 0.175 | 0.218 | 0.173 | 0.156 |
| 51 | 1.9 | 1.97 | 2.88 | 2.83 | 2.66 | 3.39 | 2.39 | 2.75 |
| 52 | 100.8 | 127.5 | 164.3 | 174.5 | 148.9 | 116.1 | 166.1 | 108.6 |
| 53 | 1.49 | 1.99 | 2.38 | 2.64 | 2.63 | 2.14 | 2.5 | 1.7 |
| 54 | 0.146 | 0.14 | 0.151 | 0.153 | 0.12 | 0.121 | 0.163 | 0.119 |
| 55 | 5823.3 | 5629.9 | 8265.3 | 7643.8 | 6931.2 | 7470.9 | 8640.2 | 6492.6 |

Table 292. Provided are the values of each of the parameters (as described above) measured in maize accessions (Line). Growth conditions are specified in the experimental procedure section.

TABLE 293
Measured parameters in Maize Hybrids Field B 35K per acre (lines 41-49)

| | Line | | | | | | | | |
|---|---|---|---|---|---|---|---|---|---|
| Correlation | Line- | Line- | Line- | Line- | Line- | Line- | Line- | Line- | Line- |
| ID | 41 | 42 | 43 | 44 | 46 | 47 | 48 | 49 | 46 |
| 1 | 90.6 | 93.1 | 94.5 | NA | 95 | 94 | 92.4 | 92.6 | 95 |
| 2 | 18.8 | 40.8 | 52.6 | 15.4 | 25.4 | 27.5 | 67.6 | 27.5 | 25.4 |
| 3 | 15.6 | 11.6 | 7.5 | 9.2 | 11.2 | 11.7 | 8.3 | 8.1 | 11.2 |
| 4 | 4 | 4.38 | 4.41 | 4.61 | 4.63 | 5.17 | NA | 4.63 | 4.63 |
| 5 | 252 | 273.8 | 246 | 287.8 | 273.1 | 268.8 | 235.2 | 251 | 273.1 |
| 6 | 223.8 | 258.6 | 223.8 | 260 | 254.2 | 241.4 | 209.5 | 232.9 | 254.2 |
| 7 | 0.567 | 0.607 | 0.59 | 0.579 | 0.608 | 0.564 | 0.522 | 0.542 | 0.608 |
| 8 | 2 | 2 | NA | 2 | 2 | NA | NA | NA | 2 |
| 9 | 124 | 128.4 | 180.2 | 139.7 | 145.7 | 173.2 | 148.4 | 172.5 | 145.7 |
| 10 | 37.3 | 44.5 | 35.8 | 49.4 | 44.8 | 59.1 | 26.5 | 39.4 | 44.8 |
| 11 | 456.2 | 560 | 544.8 | 570.3 | 591.4 | 528.4 | 524.3 | 613.9 | 591.4 |
| 12 | 3.19 | 6.22 | 5.04 | 7.03 | 6.91 | 6.26 | 5.69 | 6.42 | 6.91 |
| 13 | 0.235 | 0.335 | 0.317 | 0.379 | 0.31 | 0.37 | 0.272 | 0.313 | 0.31 |
| 14 | 16.3 | 18 | 18.6 | 18.8 | 18.9 | 18.1 | 19.6 | 19 | 18.9 |
| 15 | 40.3 | 40.7 | 54.8 | 46.7 | 45.1 | 45.8 | 51.2 | 44.8 | 45.1 |
| 16 | 608.1 | 593.3 | 932.2 | 699.4 | 713.7 | 645.4 | 786 | 732.2 | 713.7 |
| 17 | 440.8 | 529.7 | 724.1 | 579.7 | 598.4 | 622 | 599.7 | 618.9 | 598.4 |
| 18 | 31.5 | 36.1 | 44.2 | 41.7 | 39.6 | 43.9 | 40.3 | 42.3 | 39.6 |
| 19 | 14.9 | 17.2 | 19.7 | 19.5 | 18.6 | 19.9 | 18.9 | 18.9 | 18.6 |
| 20 | 2.69 | 2.66 | 2.85 | 2.72 | 2.71 | 2.81 | 2.71 | 2.84 | 2.71 |
| 21 | 61.4 | 72.8 | 91.2 | 83.7 | 80.6 | 89.8 | 76.3 | 85.5 | 80.6 |
| 22 | 60.2 | 71.3 | 89 | 80.9 | 79.7 | 88.9 | 72.7 | 82.4 | 79.7 |
| 23 | 4.96 | 5 | 5.52 | 5.08 | 5.15 | 5.21 | 4.88 | 5.15 | 5.15 |
| 24 | 2.22 | 2.38 | 1.64 | 3.02 | 2.48 | 3.36 | 1.02 | 1.16 | 2.48 |
| 25 | 15.7 | 18.5 | 20.9 | 20.8 | 19.8 | 21.9 | 19.8 | 21.1 | 19.8 |
| 26 | 15.1 | 14.6 | 17 | 15 | 15.8 | 14.1 | 15.3 | 16.3 | 15.8 |
| 27 | 1.59 | 1.8 | 1.92 | 1.94 | 1.96 | 2.07 | 1.73 | 2.51 | 1.96 |
| 28 | 1 | 1 | 1 | 1 | 1.06 | 1 | 1 | 1 | 1.06 |
| 29 | 61.5 | 62.5 | 58 | 62.8 | 57.5 | 52.8 | NA | 55.2 | 57.5 |
| 30 | 98.6 | 102 | 131.5 | 114 | 128.4 | 140.5 | 119.3 | 149.7 | 128.4 |
| 31 | 29.3 | 36.2 | 42.7 | 38.8 | 37.9 | 44.3 | 39.1 | 37.9 | 37.9 |
| 32 | 0.473 | 0.432 | 0.56 | 0.44 | 0.532 | 0.454 | 0.518 | 0.516 | 0.532 |
| 33 | 1 | 1.67 | 1 | 1.33 | 2.33 | 1 | 1 | 1 | 2.33 |
| 34 | 111.5 | 144.8 | 177.4 | 167 | 164.1 | 167.1 | 141.1 | 156.6 | 164.1 |
| 35 | 13.7 | 14.8 | 15.7 | 18.9 | 13.5 | 21.2 | 15.9 | 15.6 | 13.5 |
| 36 | 8.29 | 8.26 | 6.07 | 7.57 | 6.66 | 6.52 | 6.05 | 6.82 | 6.66 |
| 37 | 17 | 16.2 | 18.5 | 17 | 17.4 | 18.4 | 19.5 | 19.3 | 17.4 |
| 38 | 16 | 16.8 | 19.1 | 17.2 | 17.5 | 19.3 | 18.1 | 18.7 | 17.5 |
| 39 | 18.1 | 16.8 | 15.6 | 18.5 | 16.4 | 17.7 | 15.8 | 16.6 | 16.4 |
| 40 | 1.07 | 1.28 | 1.51 | 1.26 | 1.11 | 1.15 | 1.38 | 1.36 | 1.11 |
| 41 | 0.518 | 0.582 | 0.697 | 0.752 | 0.678 | 0.804 | 0.644 | 0.752 | 0.678 |
| 42 | 0.385 | 0.823 | 0.61 | 0.687 | 0.79 | 0.829 | 0.801 | 0.709 | 0.79 |
| 43 | 82.5 | 82 | 76 | 83 | 82 | 82 | 75.5 | NA | 82 |
| 44 | 145.5 | 145.5 | 136 | 146.8 | 141 | 135.2 | 135.8 | 137.2 | 141 |
| 45 | 84 | 83 | 78 | 84 | 83.5 | 82.5 | NA | 82 | 83.5 |
| 46 | 2.71 | 3.87 | 4.13 | 3.46 | 3.54 | 3.65 | 4.94 | 3.99 | 3.54 |
| 47 | 224.1 | 259.1 | 261.3 | 273.8 | 252.5 | 264.4 | 266.6 | 265.1 | 252.5 |
| 48 | 53.6 | 52.4 | 52.5 | 52.2 | 50.7 | 51.5 | 53.7 | 52.6 | 50.7 |
| 49 | 173.8 | 164.1 | 161.3 | 158.5 | 173.9 | 159.9 | 221.9 | 180.6 | 173.9 |
| 50 | 0.125 | 0.16 | 0.193 | 0.186 | 0.184 | 0.188 | 0.157 | 0.167 | 0.184 |
| 51 | 1.77 | 2.33 | 2.99 | 2.69 | 2.78 | 3.21 | NA | 2.88 | 2.78 |
| 52 | 130.1 | 149.8 | 149.8 | 143.8 | 147.9 | 162.4 | 130.7 | 113.3 | 147.9 |
| 53 | 2.07 | 2.3 | 2.49 | 2.16 | 2.2 | 2.39 | 1.98 | 1.74 | 2.2 |
| 54 | 0.161 | 0.145 | 0.126 | 0.167 | 0.124 | 0.173 | 0.146 | 0.129 | 0.124 |
| 55 | 6185.1 | 8297.6 | 7711.8 | 8808.7 | 8306.2 | 7470.6 | 6395.8 | 8847.1 | 8306.2 |

Table 293. Provided are the values of each of the parameters (as described above) measured in maize accessions (Line). Growth conditions are specified in the experimental procedure section.

TABLE 294
Correlation between the MA expression level of selected genes and the phenotypic
performance across maize varieties grown in Field A 35K per acre

| Gene | | | Exp. | Corr. | Gene | | | Exp. | Corr. |
|---|---|---|---|---|---|---|---|---|---|
| Name | R | P value | set | Set ID | Name | R | P value | set | Set ID |
| LBY478 | 0.81 | 8.05E−03 | 2 | 35 | LBY478 | 0.76 | 1.12E−02 | 2 | 14 |
| LBY478 | 0.71 | 3.31E−02 | 2 | 42 | LBY478 | 0.71 | 3.37E−02 | 2 | 52 |
| LBY478 | 0.81 | 4.79E−03 | 1 | 37 | LBY478 | 0.77 | 9.03E−03 | 1 | 14 |
| LBY479 | 0.80 | 5.77E−03 | 1 | 51 | LBY479 | 0.80 | 5.54E−03 | 1 | 50 |
| LBY480 | 0.74 | 1.47E−02 | 1 | 55 | LBY480 | 0.71 | 2.06E−02 | 1 | 27 |
| LBY481 | 0.72 | 6.90E−02 | 2 | 23 | LBY480 | 0.77 | 9.47E−03 | 1 | 7 |
| LBY516 | 0.79 | 6.10E−03 | 1 | 30 | LBY481 | 0.82 | 2.48E−02 | 1 | 23 |
| LBY516 | 0.76 | 1.14E−02 | 1 | 24 | LBY516 | 0.78 | 8.15E−03 | 1 | 44 |
| LBY516 | 0.73 | 1.65E−02 | 1 | 25 | LBY516 | 0.76 | 1.70E−02 | 1 | 49 |
| LBY516 | 0.75 | 1.28E−02 | 1 | 55 | LBY516 | 0.75 | 1.18E−02 | 1 | 3 |
| LBY517 | 0.76 | 1.07E−02 | 1 | 12 | LBY517 | 0.72 | 1.87E−02 | 2 | 36 |
| LBY518 | 0.85 | 1.46E−02 | 2 | 23 | LBY518 | 0.75 | 2.00E−02 | 2 | 33 |
| LBY519 | 0.76 | 2.94E−02 | 2 | 44 | LBY519 | 0.77 | 1.63E−02 | 2 | 57 |
| LBY519 | 0.72 | 2.78E−02 | 2 | 1 | LBY519 | 0.76 | 2.71E−02 | 2 | 49 |
| LBY519 | 0.76 | 1.79E−02 | 2 | 2 | LBY519 | 0.76 | 1.80E−02 | 2 | 38 |
| LBY519 | 0.71 | 3.30E−02 | 2 | 56 | LBY519 | 0.78 | 1.24E−02 | 2 | 42 |

Table 294. Provided are the correlations (R) between the genes expression levels in various tissues and the phenotypic performance.
“Corr. ID”—correlation set ID according to the correlated parameters specified in Table 275.
“Exp. Set”—Expression set specified in Table 269.
“R” = Pearson correlation coefficient;
“P” = p value

TABLE 295
Correlation between the MA expression level of selected genes and the phenotypic
performance across maize varieties grown in Field A 47K per acre

| Gene | | | Exp. | Corr. | Gene | | | Exp. | Corr. |
|---|---|---|---|---|---|---|---|---|---|
| Name | R | P value | set | Set ID | Name | R | P value | set | Set ID |
| LBY478 | 0.83 | 2.94E−03 | 2 | 18 | LBY477 | 0.70 | 2.33E−02 | 2 | 9 |
| LBY478 | 0.76 | 1.06E−02 | 2 | 5 | LBY478 | 0.78 | 8.11E−03 | 2 | 49 |
| LBY478 | 0.70 | 2.37E−02 | 2 | 40 | LBY478 | 0.88 | 8.10E−04 | 2 | 7 |
| LBY481 | 0.78 | 7.58E−03 | 2 | 42 | LBY479 | 0.84 | 2.62E−03 | 2 | 52 |
| LBY517 | 0.74 | 1.43E−02 | 2 | 43 | LBY517 | 0.72 | 1.80E−02 | 2 | 26 |
| LBY519 | 0.71 | 2.27E−02 | 2 | 9 | LBY517 | 0.83 | 2.66E−03 | 2 | 57 |
| LBY519 | 0.74 | 1.39E−02 | 2 | 6 | | | | | |

Table 295. Provided are the correlations (R) between the genes expression levels in various tissues and the phenotypic performance.
“Corr. ID”—correlation set ID according to the correlated parameters specified in Table 276.
“Exp. Set”—Expression set specified in Table 270.
“R” = Pearson correlation coefficient;
“P” = p value

TABLE 296
Correlation between the RNAseq expression level of selected genes and the
phenotypic performance across maize varieties grown in Field A 35K per acre

| Gene | | | Exp. | Corr. | Gene | | | Exp. | Corr. |
|---|---|---|---|---|---|---|---|---|---|
| Name | R | P value | set | Set ID | Name | R | P value | set | Set ID |
| LBY478 | 0.73 | 1.07E−02 | 1 | 28 | LBY478 | 0.71 | 6.56E−03 | 2 | 35 |
| LBY479 | 0.74 | 8.64E−03 | 1 | 50 | LBY479 | 0.74 | 3.57E−03 | 2 | 4 |
| LBY518 | 0.75 | 1.90E−02 | 2 | 20 | LBY516 | 0.76 | 1.64E−02 | 1 | 20 |
| LBY519 | 0.79 | 1.29E−03 | 2 | 31 | | | | | |

Table 296. Provided are the correlations (R) between the genes expression levels in various tissues and the phenotypic performance.
“Corr. ID”—correlation set ID according to the correlated parameters specified in Table 275.
“Exp. Set”—Expression set specified in Table 272.
“R” = Pearson correlation coefficient;
“P” = p value

TABLE 297
Correlation between the RNAseq expression level of selected genes and the
phenotypic performance across maize varieties grown in Field B 47K per acre

| Gene | | | Exp. | Corr. | Gene | | | Exp. | Corr. |
|---|---|---|---|---|---|---|---|---|---|
| Name | R | P value | set | Set ID | Name | R | P value | set | Set ID |
| LBY478 | 0.76 | 1.59E−03 | 1 | 49 | LBY478 | 0.83 | 2.53E−04 | 1 | 4 |
| LBY478 | 0.78 | 9.35E−04 | 1 | 36 | LBY478 | 0.74 | 2.27E−03 | 1 | 5 |

Table 297. Provided are the correlations (R) between the genes expression levels in various tissues and the phenotypic performance.
“Corr. ID”—correlation set ID according to the correlated parameters specified in Table 276.
“Exp. Set”—Expression set specified in Table 273.
“R” = Pearson correlation coefficient;
“P” = p value

TABLE 298
Correlation between the RNAseq expression level of selected genes and the
phenotypic performance across maize varieties grown in Field B 35K per acre

| Gene | | | Exp. | Corr. | Gene | | | Exp. | Corr. |
|---|---|---|---|---|---|---|---|---|---|
| Name | R | P value | set | Set ID | Name | R | P value | set | Set ID |
| LBY481 | 0.74 | 9.39E−03 | 1 | 48 | LBY481 | 0.71 | 1.38E−02 | 1 | 34 |
| LBY517 | 0.71 | 1.46E−02 | 1 | 11 | LBY517 | 0.70 | 1.58E−02 | 1 | 13 |

Table 298. Provided are the correlations (R) between the genes expression levels in various tissues and the phenotypic performance.
“Corr. ID”—correlation set ID according to the correlated parameters specified in Table 277.
“Exp. Set”—Expression set specified in Table 274.
“R” = Pearson correlation coefficient;
“P” = p value.

### Example 25

### Production of Brachypodium Transcriptome and High Throughput Correlation Analysis Using 60K Brachypodium Oligonucleotide Micro-Array

[1740] In order to produce a high throughput correlation analysis comparing between plant phenotype and gene expression level, the present inventors utilized a Brachypodium oligonucleotide micro-array, produced by Agilent Technologies [chem. (dot) agilent (dot) com/Scripts/PDS (dot) asp?1Page=50879]. The array oligonucleotide represents about 60K Brachypodium genes and transcripts. In order to define correlations between the levels of RNA expression and yield or vigor related parameters, phenotypic performance of 15 different Brachypodium ecotypes was characterized and analyzed. Among them, 13 ecotypes encompassing the observed variation were selected for RNA expression. The correlation between the RNA levels and the characterized parameters was analyzed using Pearson correlation test [davidmlane (dot) com/hyperstat/A34739 (dot) html].

[1741] Analyzed Brachypodium tissues—five tissues [spikelet, peduncle, flag leaf, root and root-tip] were sampled and RNA was extracted as described above. Each micro-array expression information tissue type has received a Set ID as summarized in 299 below.

TABLE 299
Brachypodium transcriptome expression sets

| Expression Set | Set ID |
|---|---|
| Root at grain filling stage under normal growth conditions | 1 |
| Flag leaf at early grain filling under normal growth | 2 |
| conditions | |
| Peduncle at heading stage under normal growth conditions | 3 |
| Root-tip at heading stage under normal growth conditions | 4 |
| Spikelet at early grain filling under normal growth | 5 |
| conditions | |

Table 299: Provided are the bean transcriptome expression sets.

[1742] Brachypodium yield components and vigor related parameters assessment—15 Brachypodium accessions were grown in 12 replicate plots (6 plants per plot) in sweet sand in a greenhouse. The growing protocol was as follows: Brachypodium seeds were sown in plots and grown under normal condition. Plants were continuously phenotyped along the growth period with an image analysis system. The image analysis system included a personal desktop computer (Intel P4 3.0 GHz processor) and a public domain program—ImageJ 1.37 (Java based image processing program, which was developed at the U.S. National Institutes of Health and freely available on the internet [rsbweb (dot) nih (dot) gov/]. Next, analyzed data was saved to text files and processed using the JMP statistical analysis software (SAS institute).

[1743] Brachypodium Yield Components and Vigor Related Parameters Assessment

[1744] Data parameters were measured at various time periods: “EGF”=Early Grain Filling; “LGF”=Late Grain Filling; “H”=Harvest; and “F”=Flowering.

[1745] The collected data parameters were as follows:

[1746] 1000 grain weight per plot (EGF), (LGF) [gr]—At early and late grain filling stage and at harvest stage all grain from all plots were collected and weighted and the weight of three 1000 grain batches were calculated.

[1747] Grain number per plot (H) (LGF) [number]—Number of grains per plot at harvest and at late grain filling.

[1748] Grain yield per plot (H) (LGF)[gr.]—At late grain filling and harvest stage, heads from plots were collected, the heads were threshed and grain were weighted.

[1749] Leaf thickness (F)(EGF)(LGF) (H) [mm]—Leaf thickness at flowering, early and late grain filling and at harvest was measured with micrometer.

[1750] Leaves number (F) (EGF) (LGF) (H) [number]—Number of green leaves at flowering, early and late grain filling and at harvest.

[1751] Number days to heading [number]—Calculated as the number of days from sowing till 50% of the plot reaches heading.

[1752] Number days to Ripening [number]—Calculated as the number of days from sowing till Ripening of 80% of first spikelets per plot.

[1753] Peduncle dry weight (DW) and fresh weight (FW) (F) (EGF) (LGF) (H) [gr]—Peduncle weight before (FW) and after (DW) drying at flowering, early and late grain filling and at harvest. Weight of main culm internode between the flag leaf to the spikelets head.

[1754] Dry weight—total weight of the vegetative portion above ground (excluding roots) after drying at 70° C. in oven for 48 hours.

[1755] Peduncle length (F) (EGF) (LGF) (H) [cm]—Length of upper internode from the last node to the spike base at flowering, early and late grain filling and at harvest.

[1756] Peduncle thickness (F) (EGF) (LGF) (H) [mm]—peduncle thickness at flowering, early and late grain filling and at harvest. Measure in main culm just above auricles of flag leaf.

[1757] Root DW and FW (F) (EGF) (LGF) (H) [gr]—Roots fresh and dry weight per plant at flowering, early and late grain filling and at harvest.

[1758] Root DW 1 [gr]—Roots dry weight at seedling.

[1759] Seedling DW [gr]—Seedling shoot dry weight.

[1760] Seminal roots number (F) (EGF) (LGF) (H) [number]—Number of seminal roots per plant at flowering, early and late grain filling and at harvest.

[1761] Spikelets FW and DW (F) (EGF) (LGF) (H) [gr]—All spikelets fresh and dry weight (gr. per each plot) at flowering, early and late grain filling and at harvest.

[1762] Stem length (EGF) (LGF) (H) [cm]—Measure length of main culm from start to head base at early and late grain filling and at harvest.

[1763] Tillering (F) [number]—Number of Tillers per plant at flowering.

[1764] Vegetative FW and DW per plot (F) (EGF) (LGF) (H) [gr]—Vegetative fresh and dry weight per plot (excluding the spikes) at flowering, early and late grain filling and at harvest.

[1765] The following parameters were collected using digital imaging system:

[1766] Average Grain Area (EGF) (LGF) (Harvest)[cm²]—at early and late grain filling stag and at harvest, a sample of ˜200 grains was weighted, photographed and images were processed using the below described image processing system. The grain area was measured from those images and was divided by the number of grains.

[1767] Average Grain Length, perimeter and width (EGF) (LGF) (Harvest)[cm]—at early and late grain filling stag and at harvest, a sample of ˜200 grain was weighted, photographed and images were processed using the below described image processing system. The sum of grain lengths, width and perimeter (longest axis) was measured from those images and was divided by the number of grain.

[1768] The image processing system used in these experiments consisted of a personal desktop computer (Intel P4 3.0 GHz processor) and a public domain program—ImageJ 1.37, Java based image processing software, which was developed at the U.S. National Institutes of Health and is freely available on the internet at rsbweb (dot) nih (dot) gov/. Images were captured in resolution of 10 Mega Pixels (3888×2592 pixels) and stored in a low compression JPEG (Joint Photographic Experts Group standard) format. Next, image processing output data for seed area and seed length was saved to text files and analyzed using the JMP statistical analysis software (SAS institute).

TABLE 300
Brachypodium correlated parameters (vectors)

| | Correlation |
|---|---|
| Correlated parameter with | ID |
| 1000 grain weight per plot [gr] | 1 |
| 1000 grain weight per plot (EGF) [gr] | 2 |
| 1000 grain weight per plot (LGF) [gr] | 3 |
| Grain Perimeter [cm] | 4 |
| Grain Perimeter (EGF) [cm] | 5 |
| Grain Perimeter (LGF) [cm] | 6 |
| Grain area [cm²] | 7 |
| Grain area (EGF) [cm²] | 8 |
| Grain area (LGF) [cm²] | 9 |
| Grain length [cm] | 10 |
| Grain length (EGF) [cm] | 11 |
| Grain length (LGF) [cm] | 12 |
| Grain width [cm] | 13 |
| Grain width (EGF) [cm] | 14 |
| Grain width (LGF) [cm] | 15 |
| Grains number per plot (H) [number] | 16 |
| Grains number per plot (LGF) [number] | 17 |
| Grains yield per plot (H) [gr] | 18 |
| Grains yield per plot (LGF) [gr] | 19 |
| Leaf thickness (EGF) [mm] | 20 |
| Leaf thickness (F) [mm] | 21 |
| Leaf thickness (H) [mm] | 22 |
| Leaf thickness (LGF) [mm] | 23 |
| Leaves num (EGF) [number] | 24 |
| Leaves num (F) [number] | 25 |
| Leaves num (H) [number] | 26 |
| Leaves num (LGF) [number] | 27 |
| Num days Heading [number] | 28 |
| Num days to Ripening [number] | 29 |
| Peduncle DW (EGF) [gr] | 30 |
| Peduncle DW (F) [gr] | 31 |
| Peduncle DW (H) [gr] | 32 |
| Peduncle DW (LGF) [gr] | 33 |
| Peduncle FW (EGF) [gr] | 34 |
| Peduncle FW (F) [gr] | 35 |
| Peduncle FW (H) [gr] | 36 |
| Peduncle FW (LGF) [gr] | 37 |
| Peduncle length (EGF) [cm] | 38 |
| Peduncle length (F) [cm] | 39 |
| Peduncle length (H) [cm] | 40 |
| Peduncle length (LGF) [cm] | 41 |
| Peduncle thickness (EGF) [mm] | 42 |
| Peduncle thickness (F) [mm] | 43 |
| Peduncle thickness (H) [mm] | 44 |
| Peduncle thickness (LGF) [mm] | 45 |
| Root DW (EGF) [gr] | 46 |
| Root DW (H) [gr] | 47 |
| Root DW (LGF) [gr] | 48 |
| Root FW (EGF) [gr] | 49 |
| Root FW (H) [gr] | 50 |
| Root FW (LGF) [gr] | 51 |
| Roots DW (F) [gr] | 52 |
| Roots DW 1 [gr] | 53 |
| Roots FW (F) [gr] | 54 |
| Seedling DW [gr] | 55 |
| Seminal roots (EGF) [number] | 56 |
| Seminal roots (F) [number] | 57 |
| Seminal roots (H) [number] | 58 |
| Seminal roots (LGF) [number] | 59 |
| Spikelets DW per plot (EGF) [gr] | 60 |
| Spikelets DW per plot (F) [gr] | 61 |
| Spikelets DW per plot (H) [gr] | 62 |
| Spikelets DW per plot (LGF) [gr] | 63 |
| Spikelets FW per plot (EGF) [gr] | 64 |
| Spikelets FW per plot (F) [gr] | 65 |
| Spikelets FW per plot (H) [gr] | 66 |
| Spikelets FW per plot (LGF) [gr] | 67 |
| Stem length (EGF) [cm] | 68 |
| Stem length (H) [cm] | 69 |
| Stem length (LGF) [cm] | 70 |
| Tillering (F) [number] | 71 |
| Vegetative DW per plot (EGF) [gr] | 72 |
| Vegetative DW per plot (F) [gr] | 73 |
| Vegetative DW per plot (H) [gr] | 74 |
| Vegetative DW per plot (LGF) [gr] | 75 |
| Vegetative FW per plot (EGF) [gr] | 76 |
| Vegetative FW per plot (F) [gr] | 77 |
| Vegetative FW per plot (H) [gr] | 78 |
| Vegetative FW per plot (LGF) [gr] | 79 |

Table 300. ″EGF″ = Early Grain Filling,
″LGF″ = Late Grain Filling,
″H″ = Harvest,
“FW” = Fresh Weight;
“DW” = Dry Weight.
″F″ = Flowering.

[1769] Experimental Results

[1770] 15 different Brachypodium accessions were grown and characterized for various parameters as described above. The average for each of the measured parameter was calculated using the JMP software and values are summarized in below (Tables 301-302). Subsequent correlation analysis between the various transcriptome sets and the average phenotypic parameters was conducted. Results were then integrated to the database (Table 303).

TABLE 301
Measured parameters of correlation IDs in Brachypodium accessions under normal conditions

| Ecotype/Treatment | Line-1 | Line-2 | Line-3 | Line-4 | Line-5 | Line-6 | Line-7 | Line-8 |
|---|---|---|---|---|---|---|---|---|
| 1 | 6.26 | 5.04 | 5.75 | 6.02 | 6.67 | NA | 5.86 | 6.86 |
| 2 | 3.31 | 2.67 | 3.00 | 2.71 | 3.01 | 3.74 | 2.71 | 3.53 |
| 3 | 5.60 | NA | 4.38 | 4.74 | 4.44 | 5.28 | 5.54 | 4.62 |
| 4 | 1.83 | 1.97 | 2.00 | 1.77 | 1.74 | NA | 2.06 | 1.95 |
| 5 | 2.05 | 1.86 | 2.15 | 1.90 | 1.89 | 2.03 | 2.20 | 2.04 |
| 6 | 1.83 | NA | 2.07 | 1.90 | 1.83 | 1.96 | 2.07 | 1.96 |
| 7 | 0.102 | 0.123 | 0.106 | 0.096 | 0.099 | NA | 0.122 | 0.107 |
| 8 | 0.104 | 0.101 | 0.099 | 0.087 | 0.085 | 0.104 | 0.115 | 0.092 |
| 9 | 0.097 | NA | 0.098 | 0.097 | 0.088 | 0.104 | 0.123 | 0.095 |
| 10 | 0.81 | 0.85 | 0.92 | 0.81 | 0.78 | NA | 0.90 | 0.87 |
| 11 | 0.91 | 0.83 | 0.99 | 0.87 | 0.87 | 0.95 | 0.95 | 0.92 |
| 12 | 0.85 | NA | 0.98 | 0.87 | 0.82 | 0.89 | 0.93 | 0.89 |
| 13 | 0.161 | 0.185 | 0.147 | 0.151 | 0.162 | NA | 0.173 | 0.157 |
| 14 | 0.146 | 0.155 | 0.128 | 0.127 | 0.124 | 0.140 | 0.153 | 0.128 |
| 15 | 0.144 | NA | 0.127 | 0.142 | 0.136 | 0.148 | 0.168 | 0.136 |
| 16 | 35.50 | 32.33 | 53.00 | 58.50 | 39.50 | NA | 32.50 | 37.00 |
| 17 | 30.50 | NA | 44.00 | 51.67 | 26.00 | 42.33 | 34.00 | 27.00 |
| 18 | 0.22 | 0.16 | 0.30 | 0.35 | 0.22 | NA | 0.19 | 0.24 |
| 19 | 0.17 | NA | 0.19 | 0.24 | 0.12 | 0.22 | 0.19 | 0.12 |
| 20 | 0.100 | 0.147 | 0.126 | 0.110 | 0.111 | 0.116 | 0.127 | 0.113 |
| 21 | 0.111 | 0.132 | 0.114 | 0.111 | 0.104 | 0.121 | 0.132 | 0.118 |
| 22 | 0.090 | 0.138 | 0.097 | 0.099 | 0.088 | NA | 0.104 | 0.101 |
| 23 | 0.106 | NA | 0.116 | 0.105 | 0.116 | 0.119 | 0.140 | 0.106 |
| 24 | 1.83 | 3.33 | 2.00 | 2.33 | 1.67 | 2.50 | 2.75 | 2.83 |
| 25 | 1.67 | 1.33 | 1.50 | 1.67 | 1.33 | 1.67 | 1.83 | 1.50 |
| 26 | 1.50 | 4.38 | 1.00 | 1.25 | 1.00 | NA | 3.00 | 2.75 |
| 27 | 1.25 | NA | 1.33 | 1.17 | 1.25 | 1.83 | 1.25 | 0.75 |
| 28 | NA | 25.78 | NA | NA | NA | NA | 16.00 | NA |
| 29 | 54.50 | 56.00 | 44.00 | 53.50 | 52.00 | 46.00 | 43.50 | 47.33 |
| 30 | 0.050 | 0.055 | 0.068 | 0.071 | 0.047 | 0.054 | 0.079 | 0.058 |
| 31 | 0.015 | 0.021 | 0.019 | 0.021 | 0.014 | 0.024 | 0.022 | 0.020 |
| 32 | 0.075 | 0.063 | 0.079 | 0.124 | 0.044 | NA | 0.074 | 0.046 |
| 33 | 0.070 | NA | 0.088 | 0.097 | 0.033 | 0.075 | 0.141 | 0.049 |
| 34 | 0.101 | 0.162 | 0.193 | 0.168 | 0.105 | 0.129 | 0.163 | 0.162 |
| 35 | 0.051 | 0.095 | 0.060 | 0.067 | 0.053 | 0.085 | 0.078 | 0.076 |
| 36 | 0.174 | 0.126 | 0.128 | 0.243 | 0.094 | NA | 0.061 | 0.053 |
| 37 | 0.18 | NA | 0.17 | 0.21 | 0.08 | 0.10 | 0.31 | 0.12 |
| 38 | 17.58 | 13.98 | 20.95 | 22.10 | 13.20 | 20.75 | 22.00 | 17.97 |
| 39 | 9.00 | 8.77 | 10.47 | 11.06 | 11.36 | 11.98 | 9.76 | 10.63 |
| 40 | 22.73 | 11.57 | 19.53 | 23.40 | 14.93 | NA | 15.40 | 16.15 |
| 41 | 23.23 | NA | 24.63 | 24.12 | 11.65 | 18.50 | 26.53 | 18.93 |
| 42 | 0.42 | 0.54 | 0.58 | 0.42 | 0.61 | 0.60 | 0.72 | 0.42 |
| 43 | 0.69 | 0.99 | 0.75 | 0.73 | 0.62 | 0.64 | 0.79 | 0.70 |
| 44 | 0.69 | 0.69 | 0.72 | 0.94 | 0.73 | NA | 0.68 | 0.56 |
| 45 | 0.62 | NA | 0.67 | 0.87 | 0.53 | 0.52 | 0.79 | 0.57 |
| 46 | 0.02 | 0.32 | 0.05 | 0.03 | 0.03 | 0.03 | 0.08 | 0.04 |
| 47 | 0.037 | 0.138 | 0.029 | 0.033 | 0.022 | NA | 0.046 | 0.023 |
| 48 | 0.027 | NA | 0.036 | 0.026 | 0.014 | 0.037 | 0.075 | 0.026 |
| 49 | 0.03 | 0.91 | 0.17 | 0.07 | 0.08 | 0.09 | 0.16 | 0.09 |
| 50 | 0.13 | 0.55 | 0.04 | 0.08 | 0.03 | NA | 0.09 | 0.03 |
| 51 | 0.053 | NA | 0.084 | 0.059 | 0.042 | 0.067 | 0.224 | 0.060 |
| 52 | 0.018 | 0.221 | 0.029 | 0.022 | 0.020 | 0.025 | 0.050 | 0.025 |
| 53 | 0.020 | 0.024 | 0.047 | 0.045 | 0.044 | 0.054 | NA | 0.049 |
| 54 | 0.05 | 0.88 | 0.08 | 0.08 | 0.09 | 0.09 | 0.22 | 0.07 |
| 55 | 0.05 | 0.03 | 0.08 | 0.08 | 0.08 | 0.04 | NA | 0.05 |
| 56 | 5.33 | 12.50 | 4.60 | 4.67 | 6.00 | 7.50 | 10.25 | 7.50 |
| 57 | 5.83 | 11.40 | 5.67 | 4.33 | 4.33 | 5.33 | 7.33 | 4.50 |
| 58 | 4.50 | 14.50 | 5.75 | 4.75 | 4.25 | NA | 8.25 | 6.50 |
| 59 | 5.00 | NA | 7.50 | 4.17 | 4.25 | 5.33 | 11.25 | 5.25 |
| 60 | 0.100 | 0.211 | 0.179 | 0.178 | 0.130 | 0.205 | 0.138 | 0.182 |
| 61 | 0.023 | 0.028 | 0.035 | 0.037 | 0.030 | 0.041 | 0.039 | 0.030 |
| 62 | 0.25 | 0.35 | 0.37 | 0.40 | 0.26 | NA | 0.27 | 0.28 |
| 63 | 0.20 | NA | 0.74 | 0.26 | 0.14 | 0.26 | 0.27 | 0.15 |
| 64 | 0.27 | 0.61 | 0.56 | 0.45 | 0.28 | 0.56 | 0.34 | 0.53 |
| 65 | 0.05 | 0.08 | 0.09 | 0.09 | 0.07 | 0.11 | 0.13 | 0.08 |
| 66 | 0.41 | 0.62 | 0.55 | 0.60 | 0.32 | NA | 0.29 | 0.29 |
| 67 | 0.39 | NA | 0.62 | 0.59 | 0.28 | 0.56 | 0.56 | 0.33 |
| 68 | 28.57 | 33.95 | 33.10 | 38.37 | 24.30 | 33.27 | 43.50 | 27.10 |
| 69 | 32.25 | 37.48 | 30.00 | 41.25 | 22.88 | NA | 37.98 | 27.63 |
| 70 | 35.25 | NA | 38.42 | 32.50 | 18.80 | 34.75 | 46.73 | 27.00 |
| 71 | 3.17 | 4.33 | 2.33 | 3.17 | 3.17 | 3.50 | 3.00 | 3.17 |
| 72 | 0.57 | 2.23 | 0.90 | 0.75 | 0.57 | 0.87 | 1.59 | 1.27 |
| 73 | 0.16 | 0.61 | 0.21 | 0.18 | 0.13 | 0.17 | 0.28 | 0.21 |
| 74 | 2.13 | 4.32 | 2.86 | 1.99 | 0.74 | NA | 1.42 | 1.74 |
| 75 | 1.62 | NA | 2.64 | 1.81 | 0.61 | 1.19 | 2.46 | 2.16 |
| 76 | 1.57 | 6.37 | 2.93 | 2.34 | 1.80 | 2.51 | 4.76 | 3.96 |
| 77 | 0.49 | 2.54 | 0.67 | 0.54 | 0.38 | 0.65 | 1.19 | 0.69 |
| 78 | 4.57 | 11.07 | 5.74 | 3.98 | 1.31 | NA | 1.79 | 2.52 |
| 79 | 4.29 | NA | 5.94 | 3.72 | 1.39 | 3.01 | 6.57 | 4.61 |

Table 301. Correlation IDs: 1, 2, 3, 4, 5 . . . etc. refer to those described in Table 320 above [Brachypodium correlated parameters (vectors)].

TABLE 302
Measured parameters of correlation IDs in additional brachypodium accessions
under normal conditions

| Ecotype/Treatment | Line-9 | Line-10 | Line-11 | Line-12 | Line-13 | Line-14 | Line-15 |
|---|---|---|---|---|---|---|---|
| 1 | 6.30 | 5.69 | NA | 4.48 | NA | NA | NA |
| 2 | 2.90 | 2.61 | 3.63 | 3.11 | 4.50 | 3.04 | 3.86 |
| 3 | 4.10 | 4.45 | 4.07 | NA | 8.46 | 4.86 | 7.05 |
| 4 | 1.98 | 1.99 | NA | 1.94 | NA | NA | NA |
| 5 | 2.16 | 2.02 | 2.27 | 1.87 | 2.35 | 1.98 | 2.18 |
| 6 | 2.11 | 2.07 | 2.09 | NA | 2.35 | 1.90 | 2.06 |
| 7 | 0.115 | 0.117 | NA | 0.124 | NA | NA | NA |
| 8 | 0.107 | 0.098 | 0.134 | 0.106 | 0.132 | 0.106 | 0.121 |
| 9 | 0.104 | 0.100 | 0.122 | NA | 0.136 | 0.101 | 0.122 |
| 10 | 0.89 | 0.89 | NA | 0.83 | NA | NA | NA |
| 11 | 1.00 | 0.91 | 1.03 | 0.82 | 1.08 | 0.88 | 0.99 |
| 12 | 0.96 | 0.92 | 0.94 | NA | 1.05 | 0.84 | 0.93 |
| 13 | 0.165 | 0.165 | NA | 0.189 | NA | NA | NA |
| 14 | 0.136 | 0.138 | 0.166 | 0.164 | 0.155 | 0.151 | 0.156 |
| 15 | 0.137 | 0.140 | 0.165 | NA | 0.164 | 0.153 | 0.166 |
| 16 | 41.50 | 39.50 | NA | 40.33 | NA | NA | NA |
| 17 | 53.00 | 41.33 | 33.00 | NA | 29.33 | 31.00 | 26.50 |
| 18 | 0.27 | 0.22 | NA | 0.18 | NA | NA | NA |
| 19 | 0.23 | 0.18 | 0.13 | NA | 0.23 | 0.16 | 0.19 |
| 20 | 0.118 | 0.119 | 0.113 | 0.146 | 0.126 | 0.136 | 0.116 |
| 21 | 0.118 | 0.118 | 0.109 | 0.144 | 0.111 | NA | 0.118 |
| 22 | 0.098 | 0.104 | NA | 0.132 | NA | 0.101 | NA |
| 23 | 0.116 | 0.114 | 0.089 | NA | 0.106 | 0.093 | 0.107 |
| 24 | 1.33 | 2.33 | 2.25 | 2.00 | 1.50 | 1.25 | 1.50 |
| 25 | 2.00 | 1.50 | 0.83 | 1.50 | 1.17 | NA | 1.75 |
| 26 | 1.25 | 1.25 | NA | 3.17 | NA | 2.00 | NA |
| 27 | 1.33 | 1.17 | 1.25 | NA | 1.50 | 1.50 | 1.25 |
| 28 | NA | NA | NA | 21.00 | NA | NA | NA |
| 29 | 46.50 | 49.00 | 42.67 | 50.33 | 46.00 | 47.50 | NA |
| 30 | 0.110 | 0.051 | 0.072 | 0.059 | 0.046 | 0.061 | 0.061 |
| 31 | 0.020 | 0.016 | 0.027 | 0.049 | 0.020 | NA | 0.017 |
| 32 | 0.079 | 0.102 | NA | 0.075 | NA | 0.041 | NA |
| 33 | 0.102 | 0.092 | 0.056 | NA | 0.045 | 0.028 | 0.056 |
| 34 | 0.304 | 0.132 | 0.176 | 0.121 | 0.126 | 0.171 | 0.138 |
| 35 | 0.078 | 0.057 | 0.095 | 0.150 | 0.068 | NA | 0.056 |
| 36 | 0.154 | 0.189 | NA | 0.101 | NA | 0.067 | NA |
| 37 | 0.20 | 0.18 | 0.11 | NA | 0.12 | 0.07 | 0.14 |
| 38 | 28.78 | 20.58 | 17.53 | 12.63 | 15.58 | 19.73 | 15.65 |
| 39 | 11.46 | 10.48 | 13.50 | 13.07 | 12.07 | NA | 9.48 |
| 40 | 20.85 | 21.38 | NA | 13.87 | NA | 12.85 | NA |
| 41 | 23.92 | 23.85 | 17.00 | NA | 15.48 | 16.05 | 17.80 |
| 42 | 0.70 | 0.51 | 0.65 | 0.69 | 0.45 | 0.58 | 0.55 |
| 43 | 0.79 | 0.55 | 0.70 | 0.95 | 0.50 | NA | 0.70 |
| 44 | 0.72 | 0.76 | NA | 0.83 | NA | 0.72 | NA |
| 45 | 0.60 | 0.74 | 0.47 | NA | 0.40 | 0.71 | 0.85 |
| 46 | 0.05 | 0.03 | 0.02 | 0.11 | 0.01 | 0.03 | 0.02 |
| 47 | 0.027 | 0.040 | NA | 0.082 | NA | 0.029 | NA |
| 48 | 0.045 | 0.039 | 0.013 | NA | 0.013 | 0.017 | 0.012 |
| 49 | 0.14 | 0.06 | 0.04 | 0.29 | 0.03 | 0.11 | 0.04 |
| 50 | 0.05 | 0.14 | NA | 0.23 | NA | 0.04 | NA |
| 51 | 0.073 | 0.070 | 0.015 | NA | 0.029 | 0.038 | 0.041 |
| 52 | 0.040 | 0.020 | 0.013 | 0.113 | 0.009 | NA | 0.007 |
| 53 | 0.067 | 0.030 | 0.042 | 0.033 | NA | 0.020 | NA |
| 54 | 0.09 | 0.08 | 0.09 | 0.63 | 0.02 | NA | 0.01 |
| 55 | 0.09 | 0.20 | 0.07 | 0.04 | NA | 0.41 | NA |
| 56 | 6.17 | 7.00 | 5.50 | 10.50 | 3.67 | 3.50 | 4.00 |
| 57 | 6.17 | 4.83 | 3.17 | 12.50 | 3.17 | NA | 4.33 |
| 58 | 3.75 | 6.25 | NA | 8.00 | NA | 5.00 | NA |
| 59 | 4.83 | 5.83 | 4.25 | NA | 2.67 | 3.50 | 2.25 |
| 60 | 0.210 | 0.135 | 0.132 | 0.242 | 0.171 | 0.106 | 0.147 |
| 61 | 0.027 | 0.024 | 0.041 | 0.069 | 0.037 | NA | 0.034 |
| 62 | 0.31 | 0.27 | NA | 0.23 | NA | 0.16 | NA |
| 63 | 0.28 | 0.21 | 0.17 | NA | 0.26 | 0.17 | 0.58 |
| 64 | 0.60 | 0.39 | 0.36 | 0.54 | 0.49 | 0.31 | 0.37 |
| 65 | 0.07 | 0.07 | 0.11 | 0.18 | 0.10 | NA | 0.08 |
| 66 | 0.46 | 0.45 | NA | 0.25 | NA | 0.25 | NA |
| 67 | 0.66 | 0.50 | 0.29 | NA | 0.57 | 0.37 | 0.41 |
| 68 | 37.28 | 30.32 | 30.13 | 24.75 | 22.25 | 30.83 | 24.45 |
| 69 | 32.65 | 37.50 | NA | 28.40 | NA | 30.05 | NA |
| 70 | 42.50 | 34.28 | 25.77 | NA | 23.35 | 25.00 | 23.25 |
| 71 | 3.60 | 2.67 | 2.83 | 3.17 | 2.33 | NA | 1.50 |
| 72 | 1.15 | 0.70 | 0.64 | 1.37 | 0.39 | 0.53 | 0.44 |
| 73 | 0.23 | 0.12 | 0.11 | 0.95 | 0.10 | NA | 0.06 |
| 74 | 1.68 | 2.15 | NA | 2.16 | NA | 1.98 | NA |
| 75 | 1.87 | 1.61 | 0.46 | NA | 0.30 | 1.74 | 0.83 |
| 76 | 3.65 | 2.14 | 1.87 | 3.73 | 0.99 | 1.67 | 1.12 |
| 77 | 0.78 | 0.42 | 0.38 | 3.33 | 0.31 | NA | 0.14 |
| 78 | 3.19 | 4.56 | NA | 3.47 | NA | 3.66 | NA |
| 79 | 4.86 | 4.12 | 1.00 | NA | 0.79 | 2.30 | 1.21 |

Table 302. Correlation IDs: 1, 2, 3, 4, 5 . . . etc. refer to those described in Table 320 above [Brachypodium correlated parameters (vectors)].

TABLE 303
Correlation between the expression level of selected genes of some embodiments
of the invention in various tissues and the phenotypic performance under normal
growth conditions across brachypodium ecotypes

| Gene | | | Exp. | Cor. Set | Gene | | | Exp. | Cor. Set |
|---|---|---|---|---|---|---|---|---|---|
| Name | R | P value | set | ID | Name | R | P value | set | ID |
| LBY467 | 0.82 | 1.22E−03 | 3 | 57 | LBY467 | 0.88 | 1.60E−04 | 3 | 77 |
| LBY467 | 0.75 | 4.55E−03 | 3 | 20 | LBY467 | 0.80 | 1.77E−02 | 3 | 13 |
| LBY467 | 0.77 | 3.50E−03 | 3 | 35 | LBY467 | 0.73 | 7.38E−03 | 3 | 31 |
| LBY467 | 0.90 | 5.69E−05 | 3 | 73 | LBY467 | 0.79 | 2.36E−03 | 3 | 21 |
| LBY467 | 0.74 | 5.58E−03 | 3 | 54 | LBY467 | 0.74 | 3.57E−02 | 3 | 22 |
| LBY467 | 0.73 | 4.04E−02 | 3 | 26 | LBY467 | 0.71 | 4.12E−03 | 5 | 46 |
| LBY467 | 0.70 | 7.56E−03 | 5 | 29 | LBY467 | 0.72 | 3.76E−03 | 5 | 49 |
| LBY467 | 0.72 | 4.29E−02 | 1 | 40 | LBY467 | 0.81 | 7.68E−04 | 4 | 52 |
| LBY467 | 0.82 | 6.34E−04 | 4 | 46 | LBY467 | 0.81 | 8.71E−03 | 4 | 13 |
| LBY467 | 0.90 | 8.79E−04 | 4 | 50 | LBY467 | 0.74 | 3.97E−03 | 4 | 14 |
| LBY467 | 0.76 | 6.17E−03 | 4 | 15 | LBY467 | 0.91 | 6.81E−04 | 4 | 47 |
| LBY467 | 0.81 | 8.11E−04 | 4 | 54 | LBY467 | 0.78 | 1.41E−02 | 4 | 22 |
| LBY467 | 0.85 | 3.48E−03 | 4 | 26 | LBY467 | 0.80 | 1.04E−03 | 4 | 49 |
| LBY467 | 0.88 | 1.91E−03 | 4 | 58 | LBY467 | 0.86 | 6.50E−03 | 2 | 13 |
| LBY467 | 0.72 | 8.60E−03 | 2 | 35 | | | | | |

Table 303. Provided are the correlations (R) between the expression levels yield improving genes and their homologs in various tissues [Expression (Exp) sets] and the phenotypic performance [yield, biomass, growth rate and/or vigor components (Correlation vector (Cor))] under normal growth conditions across brachypodium ecotypes.
P = p value.

### Example 26

### Identifying Genes which Improve Yield and Agronomical Important Traits in Plants

[1771] The present inventors have identified polynucleotides which expression thereof in plants can increase yield, fiber yield, fiber quality, growth rate, vigor, biomass, oil content, abiotic stress tolerance (ABST), fertilizer use efficiency (FUE) such as nitrogen use efficiency (NUE), and water use efficiency (WUE) of a plant, as follows.

[1772] All nucleotide sequence datasets used here were originated from publicly available databases or from performing sequencing using the Solexa technology (e.g. Barley and Sorghum). Sequence data from 100 different plant species was introduced into a single, comprehensive database. Other information on gene expression, protein annotation, enzymes and pathways were also incorporated.

[1773] Major databases used include:

[1774] Genomes

[1775] Arabidopsis genome [TAIR genome version 6 (Arabidopsis (dot) org/)];

[1776] Rice genome [IRGSP build 4.0 (rgp (dot) dna (dot) affrc (dot) go (dot) jp/IRGSP/)];

[1777] Poplar [Populus trichocarpa release 1.1 from JGI (assembly release v1.0) (genome (dot) jgi-psf (dot) org/)];

[1778] Brachypodium [JGI 4× assembly, brachpodium (dot) org)];

[1779] Soybean [DOE-JGI SCP, version Glyma0 (phytozome (dot) net/)];

[1780] Grape [French-Italian Public Consortium for Grapevine Genome Characterization grapevine genome (geno scope (dot) cns (dot) fr/)];

[1781] Castobean [TIGR/J Craig Venter Institute 4× assembly [msc (dot) jcvi (dot) org/r communis];

[1782] Sorghum [DOE-JGI SCP, version Sbi1 [phytozome (dot) net/)];

[1783] Maize “B73” [DOE-JGI SCP, version AGPv2 [phytozome (dot) net/)];

[1784] Expressed EST and mRNA Sequences were Extracted from the Following Databases:

[1785] GenBank ncbi (dot) nlm (dot) nih (dot) gov/dbEST;

[1786] RefSeq (ncbi (dot) nlm (dot) nih (dot) gov/RefSeq/);

[1787] TAIR (Arabidopsis (dot) org/);

[1788] Protein and Pathway Databases

[1789] Uniprot [uniprot (dot) org/];

[1790] AraCyc [Arabidopsis (dot) org/biocyc/index (dot) jsp];

[1791] ENZYME [expasy (dot) org/enzyme/];

[1792] Microarray Datasets were Downloaded from:

[1793] GEO (ncbi(dot)nlm(dot)nih(dot)gov/geo/);

[1794] TAIR (Arabidopsis(dot)org/);

[1795] Proprietary microarray data (WO2008/122980);

[1796] QTL and SNPs Information

[1797] Gramene [gramene (dot) org/qtl/];

[1798] Panzea [panzea (dot) org/index (dot) html];

[1799] Database Assembly—was performed to build a wide, rich, reliable annotated and easy to analyze database comprised of publicly available genomic mRNA, ESTs DNA sequences, data from various crops as well as gene expression, protein annotation and pathway data QTLs, and other relevant information.

[1800] Database assembly is comprised of a toolbox of gene refining, structuring, annotation and analysis tools enabling to construct a tailored database for each gene discovery project. Gene refining and structuring tools enable to reliably detect splice variants and antisense transcripts, and understand various potential phenotypic outcomes of a single gene. The capabilities of the “LEADS” platform of Compugen LTD for analyzing human genome have been confirmed and accepted by the scientific community [see e.g., “Widespread Antisense Transcription”, Yelin, et al. (2003) Nature Biotechnology 21, 379-85; “Splicing of Alu Sequences”, Lev-Maor, et al. (2003) Science 300 (5623), 1288-91; “Computational analysis of alternative splicing using EST tissue information”, Xie H et al. Genomics 2002], and have been proven most efficient in plant genomics as well.

[1801] EST clustering and gene assembly—For gene clustering and assembly of organisms with available genome sequence data (Arabidopsis, rice, castorbean, grape, Brachypodium, poplar, soybean, Sorghum) the genomic LEADS version (GANG) was employed. This tool allows most accurate clustering of ESTs and mRNA sequences on genome, and predicts gene structure as well as alternative splicing events and anti-sense transcription.

[1802] For organisms with no available full genome sequence data, “expressed LEADS” clustering software was applied.

[1803] Gene annotation—Predicted genes and proteins were annotated as follows:

[1804] BLAST™ search [blast (dot) ncbi (dot) nlm (dot) nih (dot) gov /Blast (dot) cgi] against all plant UniProt [uniprot (dot) org/] sequences was performed. Open reading frames (ORFs) of each putative transcript were analyzed and longest ORF with highest number of homologues was selected as a predicted protein of the transcript. The predicted proteins were analyzed by InterPro [ebi (dot) ac (dot) uk/interproa

[1805] BLAST™ against proteins from AraCyc and ENZYME databases was used to map the predicted transcripts to AraCyc pathways.

[1806] Predicted proteins from different species were compared using BLAST™ algorithm [ncbi (dot) nlm (dot) nih (dot) gov /Blast (dot) cgi] to validate the accuracy of the predicted protein sequence, and for efficient detection of orthologs.

[1807] Gene expression profiling—Several data sources were exploited for gene expression profiling, namely microarray data and digital expression profile (see below). According to gene expression profile, a correlation analysis was performed to identify genes which are co-regulated under different development stages and environmental conditions and associated with different phenotypes.

[1808] Publicly available microarray datasets were downloaded from TAIR and NCBI GEO sites, renormalized, and integrated into the database. Expression profiling is one of the most important resource data for identifying genes important for yield.

[1809] A digital expression profile summary was compiled for each cluster according to all keywords included in the sequence records comprising the cluster. Digital expression, also known as electronic Northern Blot, is a tool that displays virtual expression profile based on the expressed sequence tag (EST) sequences forming the gene cluster. The tool provides the expression profile of a cluster in terms of plant anatomy (e.g., the tissue/organ in which the gene is expressed), developmental stage (the developmental stages at which a gene can be found) and profile of treatment (provides the physiological conditions under which a gene is expressed such as drought, cold, pathogen infection, etc). Given a random distribution of ESTs in the different clusters, the digital expression provides a probability value that describes the probability of a cluster having a total of N ESTs to contain X ESTs from a certain collection of libraries. For the probability calculations, the following is taken into consideration: a) the number of ESTs in the cluster, b) the number of ESTs of the implicated and related libraries, c) the overall number of ESTs available representing the species. Thereby clusters with low probability values are highly enriched with ESTs from the group of libraries of interest indicating a specialized expression.

[1810] Recently, the accuracy of this system was demonstrated by Portnoy et al., 2009 (Analysis Of The Melon Fruit Transcriptome Based On 454 Pyrosequencing) in: Plant & Animal Genomes XVII Conference, San Diego, Calif. Transcriptomeic analysis, based on relative EST abundance in data was performed by 454 pyrosequencing of cDNA representing mRNA of the melon fruit. Fourteen double strand cDNA samples obtained from two genotypes, two fruit tissues (flesh and rind) and four developmental stages were sequenced. GS FLX pyrosequencing (Roche/454 Life Sciences) of non-normalized and purified cDNA samples yielded 1,150,657 expressed sequence tags that assembled into 67,477 unigenes (32,357 singletons and 35,120 contigs). Analysis of the data obtained against the Cucurbit Genomics Database [icugi (dot) org/] confirmed the accuracy of the sequencing and assembly. Expression patterns of selected genes fitted well their qRT-PCR data.

[1811] The genes listed in Table 304 below were identified to have a major impact on plant yield, fiber yield, fiber quality, growth rate, photosynthetic capacity, vigor, biomass, growth rate, oil content, abiotic stress tolerance, nitrogen use efficiency, water use efficiency and/or fertilizer use efficiency when expression thereof is increased in plants. The identified genes, their curated polynucleotide and polypeptide sequences, their updated sequences according to GenBank database and the sequences of the cloned genes and proteins are summarized in Table 304, herein below. It is noted that the sequences appear in the sequence listing in the “sense” direction which is equivalent to the mRNA transcribed from the polynucleotide.

TABLE 304
Identified genes for increasing yield, growth rate, vigor, biomass,
oil content, fiber yield, fiber quality, photosynthetic capacity,
abiotic stress tolerance, nitrogen use efficiency, water use
efficiency and fertilizer use efficiency of a plant

| Gene | | Polyn. SEQ | Polyp. SEQ |
|---|---|---|---|
| Name | Organism | ID NO: | ID NO: |
| LBY130 | Arachis hypogaea | 50 | 1992 |
| LBY465 | Hordeum vulgare | 51 | 1993 |
| LBY466 | Phaseolus vulgaris | 52 | 1994 |
| LBY467 | Brachypodium distachyon | 53 | 1995 |
| LBY468 | Gossypium hirsutum | 54 | 1996 |
| LBY469 | Gossypium hirsutum | 55 | 1997 |
| LBY471 | Setaria italica | 56 | 1998 |
| LBY472 | Setaria italica | 57 | 1999 |
| LBY473 | Setaria italica | 58 | 2000 |
| LBY474 | Setaria italica | 59 | 2001 |
| LBY476 | Zea mays | 60 | 2002 |
| LBY477 | Zea mays | 61 | 2003 |
| LBY478 | Zea mays | 62 | 2004 |
| LBY479 | Zea mays | 63 | 2005 |
| LBY481 | Zea mays | 64 | 2006 |
| LBY484 | Oryza sativa | 65 | 2007 |
| LBY485 | Oryza sativa | 66 | 2008 |
| LBY489 | Sorghum bicolor | 67 | 2009 |
| LBY492 | Sorghum bicolor | 68 | 2010 |
| LBY493 | Sorghum bicolor | 69 | 2011 |
| LBY496 | Glycine max | 70 | 2012 |
| LBY497 | Glycine max | 71 | 2013 |
| LBY499 | Solanum lycopersicum | 72 | 2014 |
| LBY500 | Solanum lycopersicum | 73 | 2015 |
| LBY501 | Solanum lycopersicum | 74 | 2016 |
| LBY502 | Triticum aestivum | 75 | 2017 |
| LBY503 | Triticum aestivum | 76 | 2018 |
| LBY504 | Triticum aestivum | 77 | 2019 |
| LBY507 | Arabidopsis thaliana | 78 | 2020 |
| LBY508 | Hordeum vulgare | 79 | 2021 |
| LBY511 | Setaria italica | 80 | 2022 |
| LBY512 | Setaria italica | 1970 | 3041 |
| LBY513 | Setaria italica | 81 | 2023 |
| LBY514 | Setaria italica | 82 | 2024 |
| LBY515 | Gossypium raimondii | 1971 | 3042 |
| LBY516 | Zea mays | 83 | 2025 |
| LBY517 | Zea mays | 84 | 2026 |
| LBY518 | Zea mays | 85 | 2027 |
| LBY519 | Zea mays | 86 | 2028 |
| LBY520 | Physcomitrella patens | 87 | 2029 |
| LBY522 | Oryza sativa | 88 | 2030 |
| LBY523 | Oryza sativa | 89 | 2031 |
| LBY524 | Oryza sativa | 90 | 2032 |
| LBY525 | Oryza sativa | 91 | 2033 |
| LBY527 | Oryza sativa | 92 | 2034 |
| LBY528 | Oryza sativa | 93 | 2035 |
| LBY529 | Oryza sativa | 94 | 2036 |
| LBY530 | Oryza sativa | 95 | 2037 |
| LBY531 | Sorghum bicolor | 96 | 2038 |
| LBY534 | Glycine max | 97 | 2039 |
| LYD1000 | Arabidopsis thaliana | 98 | 2040 |
| LYD1001 | Arabidopsis thaliana | 99 | 2041 |
| LYD1002 | Sorghum bicolor | 100 | 2042 |
| LYD1003 | Glycine max | 101 | 2043 |
| LYD1004 | Glycine max | 102 | 2044 |
| LYD1005 | Glycine max | 103 | 2045 |
| LYD1006 | Glycine max | 104 | 2046 |
| LYD1007 | Glycine max | 105 | 2047 |
| LYD1008 | Glycine max | 106 | 2048 |
| LYD1009 | Solanum lycopersicum | 107 | 2049 |
| LYD1010 | Phaseolus vulgaris | 108 | 2050 |
| LYD1011 | Phaseolus vulgaris | 109 | 2051 |
| LYD1012 | Glycine max | 110 | 2052 |
| LYD1013 | Medicago truncatula | 111 | 2053 |
| LYD1014 | Glycine max | 112 | 2054 |
| LYD1015 | Glycine max | 113 | 2055 |
| LYD1016 | Glycine max | 114 | 2056 |
| LYD1017 | Phaseolus vulgaris | 115 | 2057 |
| LYD1018 | Glycine max | 116 | 2058 |
| LYD1019 | Phaseolus vulgaris | 117 | 2059 |
| MGP93 | Sorghum bicolor | 118 | 2060 |

Table 304: Provided are the identified genes, their annotation, organism, polynucleotide and polypeptide sequence identifiers.
“polyn.” = polynucleotide;
“polyp.” = polypeptide.

### Example 27

### Identification of Homologous (e.g., Orthologous) Sequences that Increase Yield, Fiber Yield, Fiber Quality, Photosynthetic Capacity, Growth Rate, Biomass, Oil Content, Vigor, ABST, and/or NUE of a Plant

[1812] The concepts of orthology and paralogy have recently been applied to functional characterizations and classifications on the scale of whole-genome comparisons. Orthologs and paralogs constitute two major types of homologs: The first evolved from a common ancestor by specialization, and the latter are related by duplication events. It is assumed that paralogs arising from ancient duplication events are likely to have diverged in function while true orthologs are more likely to retain identical function over evolutionary time.

[1813] To further investigate and identify putative orthologs of the genes affecting plant yield, fiber yield, fiber quality, oil yield, photosynthetic capacity, oil content, seed yield, growth rate, vigor, biomass, abiotic stress tolerance, and fertilizer use efficiency (FUE) and/or nitrogen use efficiency of a plant, all sequences were aligned using the BLAST™ (Basic Local Alignment Search Tool). Sequences sufficiently similar were tentatively grouped. These putative orthologs were further organized under a Phylogram—a branching diagram (tree) assumed to be a representation of the evolutionary relationships among the biological taxa. Putative ortholog groups were analyzed as to their agreement with the phylogram and in cases of disagreements these ortholog groups were broken accordingly.

[1814] Expression data was analyzed and the EST libraries were classified using a fixed vocabulary of custom terms such as developmental stages (e.g., genes showing similar expression profile through development with up regulation at specific stage, such as at the seed filling stage) and/or plant organ (e.g., genes showing similar expression profile across their organs with up regulation at specific organs such as seed). The annotations from all the ESTs clustered to a gene were analyzed statistically by comparing their frequency in the cluster versus their abundance in the database, allowing the construction of a numeric and graphic expression profile of that gene, which is termed “digital expression”. The rationale of using these two complementary methods with methods of phenotypic association studies of QTLs, SNPs and phenotype expression correlation is based on the assumption that true orthologs are likely to retain identical function over evolutionary time. These methods provide different sets of indications on function similarities between two homologous genes, similarities in the sequence level—identical amino acids in the protein domains and similarity in expression profiles.

[1815] The search and identification of homologous genes involves the screening of sequence information available, for example, in public databases such as the DNA Database of Japan (DDBJ), GenBank, and the European Molecular Biology Laboratory Nucleic Acid Sequence Database (EMBL) or versions thereof or the MIPS database. A number of different search algorithms have been developed, including but not limited to the suite of programs referred to as BLAST™ programs. There are five implementations of BLAST™, three designed for nucleotide sequence queries (BLASTN, BLASTX, and TBLASTX) and two designed for protein sequence queries (BLASTP and TBLASTN) (Coulson, Trends in Biotechnology: 76-80, 1994; Birren et al., Genome Analysis, I: 543, 1997). Such methods involve alignment and comparison of sequences. The BLAST™ algorithm calculates percent sequence identity and performs a statistical analysis of the similarity between the two sequences. The software for performing BLAST™ analysis is publicly available through the National Centre for Biotechnology Information. Other such software or algorithms are GAP, BESTFIT, FASTA and TFASTA. GAP uses the algorithm of Needleman and Wunsch (J. Mol. Biol. 48: 443-453, 1970) to find the alignment of two complete sequences that maximizes the number of matches and minimizes the number of gaps.

[1816] The homologous genes may belong to the same gene family. The analysis of a gene family may be carried out using sequence similarity analysis. To perform this analysis one may use standard programs for multiple alignments e.g. Clustal W. A neighbour-joining tree of the proteins homologous to the genes in this invention may be used to provide an overview of structural and ancestral relationships. Sequence identity may be calculated using an alignment program as described above. It is expected that other plants will carry a similar functional gene (ortholog) or a family of similar genes and those genes will provide the same preferred phenotype as the genes presented here. Advantageously, these family members may be useful in the methods of the invention. Example of other plants are included here but not limited to, barley (Hordeum vulgare), Arabidopsis (Arabidopsis thaliana), maize (Zea mays), cotton (Gossypium), Oilseed rape (Brassica napus), Rice (Oryza sativa), Sugar cane (Saccharum officinarum), Sorghum (Sorghum bicolor), Soybean (Glycine max), Sunflower (Helianthus annuus), Tomato (Lycopersicon esculentum), and Wheat (Triticum aestivum).

[1817] The above-mentioned analyses for sequence homology can be carried out on a full-length sequence, but may also be based on a comparison of certain regions such as conserved domains. The identification of such domains, would also be well within the realm of the person skilled in the art and would involve, for example, a computer readable format of the nucleic acids of the present invention, the use of alignment software programs and the use of publicly available information on protein domains, conserved motifs and boxes. This information is available in the PRODOM (biochem (dot) ucl (dot) ac (dot) uk/bsm/dbbrowser/protocol/prodomqry (dot) html), PR (pir (dot) Georgetown (dot) edu/) or Pfam (sanger (dot) ac (dot) uk/Software/Pfam/) databases. Sequence analysis programs designed for motif searching may be used for identification of fragments, regions and conserved domains as mentioned above. Preferred computer programs include, but are not limited to, MEME, SIGNALSCAN, and GENESCAN.

[1818] A person skilled in the art may use the homologous sequences provided herein to find similar sequences in other species and other organisms. Homologues of a protein encompass, peptides, oligopeptides, polypeptides, proteins and enzymes having amino acid substitutions, deletions and/or insertions relative to the unmodified protein in question and having similar biological and functional activity as the unmodified protein from which they are derived. To produce such homologues, amino acids of the protein may be replaced by other amino acids having similar properties (conservative changes, such as similar hydrophobicity, hydrophilicity, antigenicity, propensity to form or break α-helical structures or β-sheet structures). Conservative substitution Tables are well known in the art (see for example Creighton (1984) Proteins. W.H. Freeman and Company). Homologues of a nucleic acid encompass nucleic acids having nucleotide substitutions, deletions and/or insertions relative to the unmodified nucleic acid in question and having similar biological and functional activity as the unmodified nucleic acid from which they are derived.

[1819] Polynucleotides and polypeptides with significant homology to the identified genes described in Table 304 (Example 26) were identified from the databases using BLAST™ software with the Blastp and tBlastn algorithms as filters for the first stage, and the needle (EMBOSS package) or Frame+algorithm alignment for the second stage. Local identity (BLAST™ alignments) was defined with a very permissive cutoff—60% Identity on a span of 60% of the sequences lengths because it is used only as a filter for the global alignment stage. The default filtering of the BLAST™ package was not utilized (by setting the parameter “−F F”).

[1820] In the second stage, homologs were defined based on a global identity of at least 80% to the core gene polypeptide sequence. Two distinct forms for finding the optimal global alignment for protein or nucleotide sequences were used in this application:

[1821] 1. Between two proteins (following the BLASTP filter):
[1822] EMBOSS-6.0.1 Needleman-Wunsch algorithm with the following modified parameters: gapopen=8 gapextend=2. The rest of the parameters were unchanged from the default options described hereinabove.

[1823] 2. Between a protein sequence and a nucleotide sequence (following the TBLASTN filter):
[1824] GenCore 6.0 OneModel application utilizing the Frame+algorithm with the following parameters: model=frame+_p2n.model mode=qglobal -q=protein. sequence -db=nucleotide. sequence. The rest of the parameters are unchanged from the default options described hereinabove.

[1825] The query polypeptide sequences were the sequences listed in Table 304 (Example 26), and the identified orthologous and homologous sequences having at least 80% global sequence identity to said sequences are provided in Table 305, below. These homologous genes are expected to increase plant yield, seed yield, oil yield, oil content, growth rate, photosynthetic capacity, fiber yield, fiber quality, biomass, vigor, ABST and/or NUE of a plant.

TABLE 305
Homologues (e.g., orthologues and paralogues) of the identified genes/polypeptides for increasing
yield, seed yield, oil yield, oil content, fiber yield, fiber quality, growth rate, photosynthetic capacity,
vigor, biomass, abiotic stress tolerance, nitrogen use efficiency, water use efficiency and fertilizer use
efficiency of a plant

| | | P.N. | P.P. | | | |
|---|---|---|---|---|---|---|
| | | SEQ | SEQ | Hom. to | | |
| Hom. to Gene | | ID | ID | SEQ ID | % glob. | |
| Name | Organism and cluster name | NO: | NO: | NO: | Iden. | Algor. |
| LBY503 | leymus\|gb166\|EG378555_P1 | 398 | 2257 | 2018 | 92.6 | globlastp |
| LBY503 | brachypodium\|14v1\|GT789123_P1 | 399 | 2258 | 2018 | 91.4 | globlastp |
| LBY503 | oat\|14v1\|GO597141_P1 | 400 | 2259 | 2018 | 91.4 | globlastp |
| LBY503 | rye\|12v1\|BE495454 | 401 | 2260 | 2018 | 90.9 | globlastp |
| LBY503 | rice\|15v1\|BE040036 | 402 | 2261 | 2018 | 84.5 | globlastp |
| LBY503 | switchgrass\|12v1\|FE623680 | 403 | 2262 | 2018 | 84.5 | globlastp |
| LBY503 | sorghum\|13v2\|BE357042 | 404 | 2263 | 2018 | 84.3 | globlastp |
| LBY503 | foxtail_millet\|14v1\|JK577911_P1 | 405 | 2264 | 2018 | 84.2 | globlastp |
| LBY503 | switchgrass\|12v1\|FE616314 | 406 | 2265 | 2018 | 83.9 | globlastp |
| LBY503 | maize\|15v1\|AI783262_T1 | 407 | — | 2018 | 82.71 | glotblastn |
| LBY503 | maize\|15v1\|AI586890_T1 | 408 | — | 2018 | 82.07 | glotblastn |
| LBY503 | oat\|14v1\|GO592557_P1 | 409 | 2266 | 2018 | 80.3 | globlastp |
| LYD1004 | bean\|13v1\|CA916311_P1 | 1448 | 2582 | 2044 | 87.2 | globlastp |
| LYD1004 | chickpea\|13v2\|SRR133517.121571_P1 | 1449 | 2583 | 2044 | 81.8 | globlastp |
| LYD1004 | trigonella\|11v1\|SRR066194X116512 | 1450 | 2584 | 2044 | 81.6 | globlastp |
| LYD1004 | medicago\|13v1\|AW256662_P1 | 1451 | 2585 | 2044 | 81.4 | globlastp |
| LYD1004 | clover\|14v1\|BB904109_P1 | 1452 | 2586 | 2044 | 81 | globlastp |
| LYD1004 | clover\|14v1\|ERR351507S19XK19C729545_P1 | 1453 | 2587 | 2044 | 80.6 | globlastp |
| LYD1004 | lupin\|13v4\|SRR520491.1000312_P1 | 1454 | 2588 | 2044 | 80.5 | globlastp |
| LYD1004 | clover\|14v1\|ERR351507S19XK19C152356_P1 | 1455 | 2589 | 2044 | 80.4 | globlastp |
| LYD1004 | lupin\|13v4\|FG094293_T1 | 1456 | — | 2044 | 80.23 | glotblastn |
| LBY504 | brachypodium\|14v1\|GT795463_P1 | 1964 | 3037 | 2072 | 83.7 | globlastp |
| LBY476 | sugarcane\|10v1\|CA078224_P1 | 293 | 2169 | 2002 | 90.5 | globlastp |
| LBY476 | sorghum\|13v2\|XM_002458928_P1 | 294 | 2170 | 2002 | 89.9 | globlastp |
| LBY476 | maize\|15v1\|AW573317_T1 | 295 | — | 2002 | 87.77 | glotblastn |
| LBY476 | foxtail_millet\|14v1\|JK603839_P1 | 296 | 2171 | 2002 | 84.7 | globlastp |
| LBY476 | maize\|15v1\|AY106934_T1 | 297 | — | 2002 | 84.17 | glotblastn |
| LBY476 | echinochloa\|14v1\|SRR522894X341645D1_P1 | 298 | 2172 | 2002 | 83.9 | globlastp |
| LBY476 | switchgrass\|12v1\|FE599695_P1 | 299 | 2173 | 2002 | 83.2 | globlastp |
| LBY476 | cenchrus\|13v1\|SRR124128X101486D1_P1 | 300 | 2174 | 2002 | 82.5 | globlastp |
| LBY476 | switchgrass\|12v1\|DN151394_P1 | 301 | 2175 | 2002 | 82.5 | globlastp |
| LBY476 | millet\|10v1\|EVO454PM145898_P1 | 302 | 2176 | 2002 | 81.8 | globlastp |
| LBY531 | switchgrass\|12v1\|FE642054 | 1240 | 2419 | 2038 | 96.4 | globlastp |
| LBY531 | foxtail_millet\|14v1\|XM_004985221_P1 | 1241 | 2420 | 2038 | 95.9 | globlastp |
| LBY531 | switchgrass\|12v1\|FE604325 | 1242 | 2421 | 2038 | 95.9 | globlastp |
| LBY531 | millet\|10v1\|EVO454PM072614_P1 | 1243 | 2422 | 2038 | 94.9 | globlastp |
| LBY531 | maize\|15v1\|AW066575_P1 | 1244 | 2423 | 2038 | 93.5 | globlastp |
| LBY531 | maize\|15v1\|AI622747_P1 | 1245 | 2424 | 2038 | 92.9 | globlastp |
| LBY531 | barley\|15v2\|BF256959_P1 | 1246 | 2425 | 2038 | 86.3 | globlastp |
| LBY531 | brachypodium\|14v1\|DV470416_P1 | 1247 | 2426 | 2038 | 85.7 | globlastp |
| LBY531 | rye\|12v1\|DRR001012.139933 | 1248 | 2427 | 2038 | 85.3 | globlastp |
| LBY531 | wheat\|12v3\|BE403342 | 1249 | 2428 | 2038 | 85.1 | globlastp |
| LBY531 | rice\|15v1\|C73762 | 1250 | 2429 | 2038 | 84.9 | globlastp |
| LBY531 | aegilops\|16v1\|AET16V1CRP039875_P1 | 1251 | 2430 | 2038 | 84.8 | globlastp |
| LBY513 | lovegrass\|gb167\|EH183468_P1 | 437 | 2023 | 2023 | 100 | globlastp |
| LBY513 | lovegrass\|gb167\|EH186935_P1 | 438 | 2023 | 2023 | 100 | globlastp |
| LBY513 | millet\|10v1\|EVO454PM030353_P1 | 439 | 2023 | 2023 | 100 | globlastp |
| LBY513 | millet\|10v1\|EVO454PM049043_P1 | 440 | 2023 | 2023 | 100 | globlastp |
| LBY513 | millet\|10v1\|EVO454PM169574_P1 | 441 | 2023 | 2023 | 100 | globlastp |
| LBY513 | millet\|10v1\|EVO454PM672023_P1 | 442 | 2023 | 2023 | 100 | globlastp |
| LBY513 | sugarcane\|10v1\|BQ530247 | 443 | 2023 | 2023 | 100 | globlastp |
| LBY513 | sugarcane\|10v1\|BU102892 | 444 | 2023 | 2023 | 100 | globlastp |
| LBY513 | sugarcane\|10v1\|CA118978 | 445 | 2023 | 2023 | 100 | globlastp |
| LBY513 | cenchrus\|13v1\|SRR124128X106992D1_T1 | 446 | — | 2023 | 100 | glotblastn |
| LBY513 | cenchrus\|13v1\|SRR124128X116673D1_T1 | 447 | — | 2023 | 100 | glotblastn |
| LBY513 | cenchrus\|13v1\|SRR124129X10058D1_T1 | 448 | — | 2023 | 100 | glotblastn |
| LBY513 | echinochloa\|14v1\|ECHC14V1K19C176424_T1 | 449 | — | 2023 | 100 | glotblastn |
| LBY513 | echinochloa\|14v1\|SRR522894X15312D1_T1 | 450 | — | 2023 | 100 | glotblastn |
| LBY513 | echinochloa\|14v1\|SRR522894X2471D1_T1 | 451 | — | 2023 | 100 | glotblastn |
| LBY513 | echinochloa\|14v1\|SRR522894X76496D1_T1 | 452 | — | 2023 | 100 | glotblastn |
| LBY513 | maize\|15v1\|AI600758_T1 | 453 | — | 2023 | 100 | glotblastn |
| LBY513 | maize\|15v1\|AI943867_T1 | 454 | — | 2023 | 100 | glotblastn |
| LBY513 | sorghum\|13v2\|BE352860 | 455 | — | 2023 | 100 | glotblastn |
| LBY513 | sorghum\|13v2\|BG239888 | 456 | — | 2023 | 100 | glotblastn |
| LBY513 | switchgrass\|12v1\|DN142793 | 457 | — | 2023 | 100 | glotblastn |
| LBY513 | switchgrass\|12v1\|DN144365 | 458 | — | 2023 | 100 | glotblastn |
| LBY513 | switchgrass\|12v1\|DN145979 | 459 | — | 2023 | 100 | glotblastn |
| LBY513 | switchgrass\|12v1\|FE604279 | 460 | — | 2023 | 100 | glotblastn |
| LBY513 | switchgrass\|12v1\|FE607101 | 461 | — | 2023 | 100 | glotblastn |
| LBY513 | switchgrass\|12v1\|GR878306 | 462 | — | 2023 | 100 | glotblastn |
| LBY513 | switchgrass\|12v1\|SRR187765.222627 | 463 | — | 2023 | 100 | glotblastn |
| LBY513 | maize\|15v1\|GRMZM5G803604_T01_T1 | 464 | — | 2023 | 98.21 | glotblastn |
| LBY513 | echinochloa\|14v1\|SRR522894X100841D1_T1 | 465 | — | 2023 | 98.21 | glotblastn |
| LBY513 | rice\|15v1\|AA750787 | 466 | — | 2023 | 98.21 | glotblastn |
| LBY513 | rice\|15v1\|AU182630 | 467 | — | 2023 | 98.21 | glotblastn |
| LBY513 | rice\|15v1\|BE040456 | 468 | — | 2023 | 98.21 | glotblastn |
| LBY513 | rice\|15v1\|BE040466 | 469 | — | 2023 | 98.21 | glotblastn |
| LBY513 | sorghum\|13v2\|CX608526 | 470 | — | 2023 | 98.21 | glotblastn |
| LBY513 | aegilops\|16v1\|BG274144_T1 | 471 | — | 2023 | 96.43 | glotblastn |
| LBY513 | aegilops\|16v1\|BQ840958_T1 | 472 | — | 2023 | 96.43 | glotblastn |
| LBY513 | banana\|14v1\|BBS2426T3_T1 | 473 | — | 2023 | 96.43 | glotblastn |
| LBY513 | banana\|14v1\|DN238746_T1 | 474 | — | 2023 | 96.43 | glotblastn |
| LBY513 | banana\|14v1\|FF557268_T1 | 475 | — | 2023 | 96.43 | glotblastn |
| LBY513 | banana\|14v1\|FF559646_T1 | 476 | — | 2023 | 96.43 | glotblastn |
| LBY513 | banana\|14v1\|FL657314_T1 | 477 | — | 2023 | 96.43 | glotblastn |
| LBY513 | brachypodium\|14v1\|DV472432_T1 | 478 | — | 2023 | 96.43 | glotblastn |
| LBY513 | brachypodium\|14v1\|DV476660_T1 | 479 | — | 2023 | 96.43 | glotblastn |
| LBY513 | brachypodium\|14v1\|DV476925_T1 | 480 | — | 2023 | 96.43 | glotblastn |
| LBY513 | brachypodium\|14v1\|GT772561_T1 | 481 | — | 2023 | 96.43 | glotblastn |
| LBY513 | chrysanthemum\|14v1\|CCOR13V1K19C1090585_T1 | 482 | — | 2023 | 96.43 | glotblastn |
| LBY513 | coconut\|14v1\|COCOS14V1K19C902245_T1 | 483 | — | 2023 | 96.43 | glotblastn |
| LBY513 | maize\|15v1\|AI901642_T1 | 484 | — | 2023 | 96.43 | glotblastn |
| LBY513 | oat\|14v1\|GO588808_T1 | 485 | — | 2023 | 96.43 | glotblastn |
| LBY513 | oat\|14v1\|GO589037_T1 | 486 | — | 2023 | 96.43 | glotblastn |
| LBY513 | oat\|14v1\|SRR020741X117779D1_T1 | 487 | — | 2023 | 96.43 | glotblastn |
| LBY513 | oat\|14v1\|SRR020741X137581D1_T1 | 488 | — | 2023 | 96.43 | glotblastn |
| LBY513 | oat\|14v1\|SRR345677X5289D1_T1 | 489 | — | 2023 | 96.43 | glotblastn |
| LBY513 | oil_palm\|11v1\|ES323728_T1 | 490 | — | 2023 | 96.43 | glotblastn |
| LBY513 | oil_palm\|11v1\|SRR190698.122295_T1 | 491 | — | 2023 | 96.43 | glotblastn |
| LBY513 | pineapple\|14v1\|DT337812_T1 | 492 | — | 2023 | 96.43 | glotblastn |
| LBY513 | rye\|12v1\|BE494033 | 493 | — | 2023 | 96.43 | glotblastn |
| LBY513 | rye\|12v1\|BE494229 | 494 | — | 2023 | 96.43 | glotblastn |
| LBY513 | rye\|12v1\|BF145651 | 495 | — | 2023 | 96.43 | glotblastn |
| LBY513 | wheat\|12v3\|BE401476 | 496 | — | 2023 | 96.43 | glotblastn |
| LBY513 | wheat\|12v3\|BE414086 | 497 | — | 2023 | 96.43 | glotblastn |
| LBY513 | wheat\|12v3\|BE426170 | 498 | — | 2023 | 96.43 | glotblastn |
| LBY513 | wheat\|12v3\|BQ295226 | 499 | — | 2023 | 96.43 | glotblastn |
| LBY513 | wheat\|12v3\|CA486115 | 500 | — | 2023 | 96.43 | glotblastn |
| LBY513 | cynodon\|10v1\|ES295082_P1 | 501 | 2290 | 2023 | 96.4 | globlastp |
| LBY513 | pseudoroegneria\|gb167\|FF349746 | 502 | 2291 | 2023 | 96.4 | globlastp |
| LBY513 | apple\|11v1\|CN493146_T1 | 503 | — | 2023 | 94.64 | glotblastn |
| LBY513 | beech\|11v1\|SRR006293.1820_T1 | 504 | — | 2023 | 94.64 | glotblastn |
| LBY513 | beech\|11v1\|SRR006294.10276_T1 | 505 | — | 2023 | 94.64 | glotblastn |
| LBY513 | castorbean\|14v2\|EE255857_T1 | 506 | — | 2023 | 94.64 | glotblastn |
| LBY513 | castorbean\|14v2\|T23266_T1 | 507 | — | 2023 | 94.64 | glotblastn |
| LBY513 | coconut\|14v1\|COCOS14V1K19C1152749_T1 | 508 | — | 2023 | 94.64 | glotblastn |
| LBY513 | coconut\|14v1\|COCOS14V1K19C924050_T1 | 509 | — | 2023 | 94.64 | glotblastn |
| LBY513 | cowpea\|12v1\|FC458190_T1 | 510 | — | 2023 | 94.64 | glotblastn |
| LBY513 | cowpea\|12v1\|FC458697_T1 | 511 | — | 2023 | 94.64 | glotblastn |
| LBY513 | fescue\|13v1\|CK802961_T1 | 512 | — | 2023 | 94.64 | glotblastn |
| LBY513 | fescue\|13v1\|GO894407_T1 | 513 | — | 2023 | 94.64 | glotblastn |
| LBY513 | fescue\|13v1\|HO060304_T1 | 514 | — | 2023 | 94.64 | glotblastn |
| LBY513 | fescue\|13v1\|HO061029_T1 | 515 | — | 2023 | 94.64 | glotblastn |
| LBY513 | fescue\|13v1\|HO061053_T1 | 516 | — | 2023 | 94.64 | glotblastn |
| LBY513 | fescue\|13v1\|HO061596_T1 | 517 | — | 2023 | 94.64 | glotblastn |
| LBY513 | fescue\|13v1\|SRR493690.100035_T1 | 518 | — | 2023 | 94.64 | glotblastn |
| LBY513 | fescue\|13v1\|SRR493690.100889_T1 | 519 | — | 2023 | 94.64 | glotblastn |
| LBY513 | fescue\|13v1\|SRR493690.103828_T1 | 520 | — | 2023 | 94.64 | glotblastn |
| LBY513 | fescue\|13v1\|SRR493690.106164_T1 | 521 | — | 2023 | 94.64 | glotblastn |
| LBY513 | fescue\|13v1\|SRR493690.109847_T1 | 522 | — | 2023 | 94.64 | glotblastn |
| LBY513 | fescue\|13v1\|SRR493690.12204_T1 | 523 | — | 2023 | 94.64 | glotblastn |
| LBY513 | fescue\|13v1\|SRR493690.25835_T1 | 524 | — | 2023 | 94.64 | glotblastn |
| LBY513 | fescue\|13v1\|SRR493690.28423_T1 | 525 | — | 2023 | 94.64 | glotblastn |
| LBY513 | hevea\|10v1\|GD273176_T1 | 526 | — | 2023 | 94.64 | glotblastn |
| LBY513 | humulus\|11v1\|ES653136XX1_T1 | 527 | — | 2023 | 94.64 | glotblastn |
| LBY513 | humulus\|11v1\|ES653136XX2_T1 | 528 | — | 2023 | 94.64 | glotblastn |
| LBY513 | humulus\|11v1\|EX517204_T1 | 529 | — | 2023 | 94.64 | glotblastn |
| LBY513 | humulus\|11v1\|SRR098683X100179_T1 | 530 | — | 2023 | 94.64 | glotblastn |
| LBY513 | humulus\|11v1\|SRR098684X97282_T1 | 531 | — | 2023 | 94.64 | glotblastn |
| LBY513 | lolium\|13v1\|SRR029311X4402_T1 | 532 | — | 2023 | 94.64 | glotblastn |
| LBY513 | lolium\|13v1\|SRR029314X11383_T1 | 533 | — | 2023 | 94.64 | glotblastn |
| LBY513 | lovegrass\|gb167\|EH187862_T1 | 534 | — | 2023 | 94.64 | glotblastn |
| LBY513 | lupin\|13v4\|LA13V2PRD031061_T1 | 535 | — | 2023 | 94.64 | glotblastn |
| LBY513 | momordica\|10v1\|SRR071315S0013633_T1 | 536 | — | 2023 | 94.64 | glotblastn |
| LBY513 | momordica\|10v1\|SRR071315S0028084_T1 | 537 | — | 2023 | 94.64 | glotblastn |
| LBY513 | momordica\|10v1\|SRR071315S0182183_T1 | 538 | — | 2023 | 94.64 | glotblastn |
| LBY513 | oat\|14v1\|CN820921_T1 | 539 | — | 2023 | 94.64 | glotblastn |
| LBY513 | oat\|14v1\|GO582711_T1 | 540 | — | 2023 | 94.64 | glotblastn |
| LBY513 | oat\|14v1\|SRR020741X103985D1_T1 | 541 | — | 2023 | 94.64 | glotblastn |
| LBY513 | oat\|14v1\|SRR020741X207807D1_T1 | 542 | — | 2023 | 94.64 | glotblastn |
| LBY513 | oat\|14v1\|SRR020741X264542D1_T1 | 543 | — | 2023 | 94.64 | glotblastn |
| LBY513 | oil_palm\|11v1\|EL683873_T1 | 544 | — | 2023 | 94.64 | glotblastn |
| LBY513 | oil_palm\|11v1\|EL690151_T1 | 545 | — | 2023 | 94.64 | glotblastn |
| LBY513 | peanut\|13v1\|CD037942_T1 | 546 | — | 2023 | 94.64 | glotblastn |
| LBY513 | peanut\|13v1\|CX128135_T1 | 547 | — | 2023 | 94.64 | glotblastn |
| LBY513 | pigeonpea\|11v1\|GR472975_T1 | 548 | — | 2023 | 94.64 | glotblastn |
| LBY513 | pineapple\|14v1\|ACOM14V1K19C1768375_T1 | 549 | — | 2023 | 94.64 | glotblastn |
| LBY513 | platanus\|11v1\|SRR096786X114875_T1 | 550 | — | 2023 | 94.64 | glotblastn |
| LBY513 | platanus\|11v1\|SRR096786X12333_T1 | 551 | — | 2023 | 94.64 | glotblastn |
| LBY513 | prunus_mume\|13v1\|BU573607 | 552 | — | 2023 | 94.64 | glotblastn |
| LBY513 | rice\|15v1\|CR284953 | 553 | — | 2023 | 94.64 | glotblastn |
| LBY513 | sarracenia\|11v1\|SRR192669.109103 | 554 | — | 2023 | 94.64 | glotblastn |
| LBY513 | soybean\|15v1\|GLYMA10G40461 | 555 | — | 2023 | 94.64 | glotblastn |
| LBY513 | watermelon\|11v1\|AM725840 | 556 | — | 2023 | 94.64 | glotblastn |
| LBY513 | watermelon\|11v1\|CK700754 | 557 | — | 2023 | 94.64 | glotblastn |
| LBY513 | watermelon\|11v1\|CK753817 | 558 | — | 2023 | 94.64 | glotblastn |
| LBY513 | watermelon\|11v1\|VMEL06249616890605 | 559 | — | 2023 | 94.64 | glotblastn |
| LBY513 | acacia\|10v1\|FS586790_P1 | 560 | 2292 | 2023 | 94.6 | globlastp |
| LBY513 | acacia\|10v1\|GR482067_P1 | 561 | 2292 | 2023 | 94.6 | globlastp |
| LBY513 | acacia\|10v1\|GR483036_P1 | 562 | 2292 | 2023 | 94.6 | globlastp |
| LBY513 | bruguiera\|gb166\|BP941946_P1 | 563 | 2293 | 2023 | 94.6 | globlastp |
| LBY513 | cassava\|09v1\|CK641576_P1 | 564 | 2292 | 2023 | 94.6 | globlastp |
| LBY513 | cassava\|09v1\|CK650046_P1 | 565 | 2292 | 2023 | 94.6 | globlastp |
| LBY513 | cassava\|09v1\|CK650291_P1 | 566 | 2292 | 2023 | 94.6 | globlastp |
| LBY513 | cassava\|09v1\|DV449004_P1 | 567 | 2293 | 2023 | 94.6 | globlastp |
| LBY513 | cucumber\|09v1\|CK086154_P1 | 568 | 2292 | 2023 | 94.6 | globlastp |
| LBY513 | cucumber\|09v1\|CV002820_P1 | 569 | 2292 | 2023 | 94.6 | globlastp |
| LBY513 | cucumber\|09v1\|DV737232_P1 | 570 | 2292 | 2023 | 94.6 | globlastp |
| LBY513 | cyamopsis\|10v1\|EG975677_P1 | 571 | 2292 | 2023 | 94.6 | globlastp |
| LBY513 | jatropha\|09v1\|GO247651_P1 | 572 | 2292 | 2023 | 94.6 | globlastp |
| LBY513 | liquorice\|gb171\|ES346825_P1 | 573 | 2292 | 2023 | 94.6 | globlastp |
| LBY513 | liquorice\|gb171\|FS238607_P1 | 574 | 2292 | 2023 | 94.6 | globlastp |
| LBY513 | liriodendron\|gb166\|CV005069_P1 | 575 | 2292 | 2023 | 94.6 | globlastp |
| LBY513 | melon\|10v1\|AM725840_P1 | 576 | 2292 | 2023 | 94.6 | globlastp |
| LBY513 | melon\|10v1\|DV633962_P1 | 577 | 2292 | 2023 | 94.6 | globlastp |
| LBY513 | melon\|10v1\|EB714473_P1 | 578 | 2292 | 2023 | 94.6 | globlastp |
| LBY513 | prunus\|10v1\|BU573607 | 579 | 2292 | 2023 | 94.6 | globlastp |
| LBY513 | walnuts\|gb166\|CV196136 | 580 | 2293 | 2023 | 94.6 | globlastp |
| LBY513 | walnuts\|gb166\|EL891340 | 581 | 2293 | 2023 | 94.6 | globlastp |
| LBY513 | bruguiera\|gb166\|BP945786_P1 | 582 | 2294 | 2023 | 92.9 | globlastp |
| LBY513 | cyamopsis\|10v1\|EG978905_P1 | 583 | 2295 | 2023 | 92.9 | globlastp |
| LBY513 | eucalyptus\|11v2\|CT980724_P1 | 584 | 2296 | 2023 | 92.9 | globlastp |
| LBY513 | eucalyptus\|11v2\|CT981398_P1 | 585 | 2296 | 2023 | 92.9 | globlastp |
| LBY513 | kiwi\|gb166\|FG405142_P1 | 586 | 2297 | 2023 | 92.9 | globlastp |
| LBY513 | kiwi\|gb166\|FG412757_P1 | 587 | 2297 | 2023 | 92.9 | globlastp |
| LBY513 | kiwi\|gb166\|FG486080_P1 | 588 | 2297 | 2023 | 92.9 | globlastp |
| LBY513 | liriodendron\|gb166\|DT580082_P1 | 589 | 2298 | 2023 | 92.9 | globlastp |
| LBY513 | oak\|10v1\|FP042548_P1 | 590 | 2297 | 2023 | 92.9 | globlastp |
| LBY513 | prunus\|10v1\|CB820537 | 591 | 2299 | 2023 | 92.9 | globlastp |
| LBY513 | rhizophora\|10v1\|SRR005793S0071605 | 592 | 2300 | 2023 | 92.9 | globlastp |
| LBY513 | tea\|10v1\|CV014186 | 593 | 2297 | 2023 | 92.9 | globlastp |
| LBY513 | tea\|10v1\|CV014681 | 594 | 2297 | 2023 | 92.9 | globlastp |
| LBY513 | walnuts\|gb166\|EL894134 | 595 | 2295 | 2023 | 92.9 | globlastp |
| LBY513 | amorphophallus\|11v2\|SRR089351X101252_T1 | 596 | — | 2023 | 92.86 | glotblastn |
| LBY513 | apple\|11v1\|CN443986_T1 | 597 | — | 2023 | 92.86 | glotblastn |
| LBY513 | apple\|11v1\|CN492101_T1 | 598 | — | 2023 | 92.86 | glotblastn |
| LBY513 | aristolochia\|10v1\|SRR039082S0049100_T1 | 599 | — | 2023 | 92.86 | glotblastn |
| LBY513 | aristolochia\|10v1\|SRR039082S0089692_T1 | 600 | — | 2023 | 92.86 | glotblastn |
| LBY513 | barley\|15v2\|AJ462032_T1 | 601 | — | 2023 | 92.86 | glotblastn |
| LBY513 | bean\|13v1\|CA897319_T1 | 602 | — | 2023 | 92.86 | glotblastn |
| LBY513 | cannabis\|12v1\|GR220957_T1 | 603 | — | 2023 | 92.86 | glotblastn |
| LBY513 | chestnut\|14v1\|SRR006295X101220D1_T1 | 604 | — | 2023 | 92.86 | glotblastn |
| LBY513 | chickpea\|13v2\|DY475504_T1 | 605 | — | 2023 | 92.86 | glotblastn |
| LBY513 | chickpea\|13v2\|FE671284_T1 | 606 | — | 2023 | 92.86 | glotblastn |
| LBY513 | chickpea\|13v2\|SRR133517.156798_T1 | 607 | — | 2023 | 92.86 | glotblastn |
| LBY513 | cucurbita\|11v1\|SRR091276X100642_T1 | 608 | — | 2023 | 92.86 | glotblastn |
| LBY513 | cucurbita\|11v1\|SRR091276X102745_T1 | 609 | — | 2023 | 92.86 | glotblastn |
| LBY513 | cucurbita\|11v1\|SRR091276X103415_T1 | 610 | — | 2023 | 92.86 | glotblastn |
| LBY513 | cucurbita\|11v1\|SRR091276X109421_T1 | 611 | — | 2023 | 92.86 | glotblastn |
| LBY513 | cucurbita\|11v1\|SRR091276X140164_T1 | 612 | — | 2023 | 92.86 | glotblastn |
| LBY513 | cucurbita\|11v1\|SRR091276X175796_T1 | 613 | — | 2023 | 92.86 | glotblastn |
| LBY513 | epimedium\|11v1\|SRR013502.11858_T1 | 614 | — | 2023 | 92.86 | glotblastn |
| LBY513 | euphorbia\|11v1\|BP958366_T1 | 615 | — | 2023 | 92.86 | glotblastn |
| LBY513 | fescue\|13v1\|DT682316_T1 | 616 | — | 2023 | 92.86 | glotblastn |
| LBY513 | fescue\|13v1\|DT686692_T1 | 617 | — | 2023 | 92.86 | glotblastn |
| LBY513 | ginger\|gb164\|DY354000_T1 | 618 | — | 2023 | 92.86 | glotblastn |
| LBY513 | grape\|13v1\|CA816657_T1 | 619 | — | 2023 | 92.86 | glotblastn |
| LBY513 | hornbeam\|12v1\|SRR364455.108119_T1 | 620 | — | 2023 | 92.86 | glotblastn |
| LBY513 | hornbeam\|12v1\|SRR364455.108894_T1 | 621 | — | 2023 | 92.86 | glotblastn |
| LBY513 | hornbeam\|12v1\|SRR364455.115899_T1 | 622 | — | 2023 | 92.86 | glotblastn |
| LBY513 | hornbeam\|12v1\|SRR364455.119140_T1 | 623 | — | 2023 | 92.86 | glotblastn |
| LBY513 | hornbeam\|12v1\|SRR364455.124680_T1 | 624 | — | 2023 | 92.86 | glotblastn |
| LBY513 | lolium\|13v1\|ES700401_T1 | 625 | — | 2023 | 92.86 | glotblastn |
| LBY513 | lupin\|13v4\|FG089586_T1 | 626 | — | 2023 | 92.86 | glotblastn |
| LBY513 | lupin\|13v4\|FG094277_T1 | 627 | — | 2023 | 92.86 | glotblastn |
| LBY513 | phyla\|11v2\|SRR099035X2694_T1 | 628 | — | 2023 | 92.86 | glotblastn |
| LBY513 | pigeonpea\|11v1\|GW355381_T1 | 629 | — | 2023 | 92.86 | glotblastn |
| LBY513 | poplar\|13v1\|AI163105_T1 | 630 | — | 2023 | 92.86 | glotblastn |
| LBY513 | poplar\|13v1\|BI072655_T1 | 631 | — | 2023 | 92.86 | glotblastn |
| LBY513 | prunus_mume\|13v1\|CB820537 | 632 | — | 2023 | 92.86 | glotblastn |
| LBY513 | rose\|12v1\|EC587323 | 633 | — | 2023 | 92.86 | glotblastn |
| LBY513 | rye\|12v1\|DRR001012.5236 | 634 | — | 2023 | 92.86 | glotblastn |
| LBY513 | sarracenia\|11v1\|SRR192669.132067 | 635 | — | 2023 | 92.86 | glotblastn |
| LBY513 | sarracenia\|11v1\|SRR192669.225873 | 636 | — | 2023 | 92.86 | glotblastn |
| LBY513 | sesame\|12v1\|BU669372 | 637 | — | 2023 | 92.86 | glotblastn |
| LBY513 | sesame\|12v1\|BU670364 | 638 | — | 2023 | 92.86 | glotblastn |
| LBY513 | sesame\|12v1\|SESI12V1390013 | 639 | — | 2023 | 92.86 | glotblastn |
| LBY513 | strawberry\|11v1\|CO379217 | 640 | — | 2023 | 92.86 | glotblastn |
| LBY513 | strawberry\|11v1\|CO380760 | 641 | — | 2023 | 92.86 | glotblastn |
| LBY513 | wheat\|12v3\|ERR125556X157618D1 | 642 | — | 2023 | 92.86 | glotblastn |
| LBY513 | avocado\|10v1\|FD505544_P1 | 643 | 2301 | 2023 | 91.1 | globlastp |
| LBY513 | oak\|10v1\|FP041749_P1 | 644 | 2302 | 2023 | 91.1 | globlastp |
| LBY513 | papaya\|gb165\|EX277096_P1 | 645 | 2303 | 2023 | 91.1 | globlastp |
| LBY513 | salvia\|10v1\|CV163580 | 646 | 2304 | 2023 | 91.1 | globlastp |
| LBY513 | salvia\|10v1\|FE536790 | 647 | 2304 | 2023 | 91.1 | globlastp |
| LBY513 | salvia\|10v1\|FE537264 | 648 | 2304 | 2023 | 91.1 | globlastp |
| LBY513 | tea\|10v1\|CV013574 | 649 | 2305 | 2023 | 91.1 | globlastp |
| LBY513 | aquilegia\|10v2\|CRPAC012097_T1 | 650 | — | 2023 | 91.07 | glotblastn |
| LBY513 | basilicum\|13v1\|DY324691_T1 | 651 | — | 2023 | 91.07 | glotblastn |
| LBY513 | basilicum\|13v1\|DY326679_T1 | 652 | — | 2023 | 91.07 | glotblastn |
| LBY513 | blueberry\|12v1\|CV190088_T1 | 653 | — | 2023 | 91.07 | glotblastn |
| LBY513 | blueberry\|12v1\|CV191502_T1 | 654 | — | 2023 | 91.07 | glotblastn |
| LBY513 | blueberry\|12v1\|SRR353282X100263D1_T1 | 655 | — | 2023 | 91.07 | glotblastn |
| LBY513 | blueberry\|12v1\|SRR353282X102250D1_T1 | 656 | — | 2023 | 91.07 | glotblastn |
| LBY513 | blueberry\|12v1\|SRR353282X15195D1_T1 | 657 | — | 2023 | 91.07 | glotblastn |
| LBY513 | blueberry\|12v1\|SRR353282X16229D1_T1 | 658 | — | 2023 | 91.07 | glotblastn |
| LBY513 | blueberry\|12v1\|SRR353282X17004D1_T1 | 659 | — | 2023 | 91.07 | glotblastn |
| LBY513 | blueberry\|12v1\|SRR353282X17196D1_T1 | 660 | — | 2023 | 91.07 | glotblastn |
| LBY513 | blueberry\|12v1\|SRR353282X20850D1_T1 | 661 | — | 2023 | 91.07 | glotblastn |
| LBY513 | blueberry\|12v1\|SRR353282X24311D1_T1 | 662 | — | 2023 | 91.07 | glotblastn |
| LBY513 | blueberry\|12v1\|SRR353282X36421D1_T1 | 663 | — | 2023 | 91.07 | glotblastn |
| LBY513 | blueberry\|12v1\|SRR353282X37592D1_T1 | 664 | — | 2023 | 91.07 | glotblastn |
| LBY513 | blueberry\|12v1\|SRR353282X42887D1_T1 | 665 | — | 2023 | 91.07 | glotblastn |
| LBY513 | blueberry\|12v1\|SRR353282X45156D1_T1 | 666 | — | 2023 | 91.07 | glotblastn |
| LBY513 | blueberry\|12v1\|SRR353282X49490D1_T1 | 667 | — | 2023 | 91.07 | glotblastn |
| LBY513 | blueberry\|12v1\|SRR353282X54713D1_T1 | 668 | — | 2023 | 91.07 | glotblastn |
| LBY513 | blueberry\|12v1\|SRR353282X61496D1_T1 | 669 | — | 2023 | 91.07 | glotblastn |
| LBY513 | blueberry\|12v1\|SRR353283X75685D1_T1 | 670 | — | 2023 | 91.07 | glotblastn |
| LBY513 | chelidonium\|11v1\|SRR084752X17894_T1 | 671 | — | 2023 | 91.07 | glotblastn |
| LBY513 | chestnut\|14v1\|SRR006295X106323D1_T1 | 672 | — | 2023 | 91.07 | glotblastn |
| LBY513 | echinacea\|13v1\|EPURP13V11664396_T1 | 673 | — | 2023 | 91.07 | glotblastn |
| LBY513 | echinacea\|13v1\|EPURP13V11825739_T1 | 674 | — | 2023 | 91.07 | glotblastn |
| LBY513 | euonymus\|11v1\|SRR070038X110034_T1 | 675 | — | 2023 | 91.07 | glotblastn |
| LBY513 | euphorbia\|11v1\|DR066792_T1 | 676 | — | 2023 | 91.07 | glotblastn |
| LBY513 | euphorbia\|11v1\|SRR098678X119600_T1 | 677 | — | 2023 | 91.07 | glotblastn |
| LBY513 | gnetum\|10v1\|CB081841_T1 | 678 | — | 2023 | 91.07 | glotblastn |
| LBY513 | grape\|13v1\|GSVIVT01015056001_T1 | 679 | — | 2023 | 91.07 | glotblastn |
| LBY513 | hevea\|10v1\|EC601261_T1 | 680 | — | 2023 | 91.07 | glotblastn |
| LBY513 | hornbeam\|12v1\|SRR364455.115594_T1 | 681 | — | 2023 | 91.07 | glotblastn |
| LBY513 | nasturtium\|11v1\|SRR032558.145936_T1 | 682 | — | 2023 | 91.07 | glotblastn |
| LBY513 | onion\|14v1\|SRR073446X100359D1_T1 | 683 | — | 2023 | 91.07 | glotblastn |
| LBY513 | onion\|14v1\|SRR073446X100706D1_T1 | 684 | — | 2023 | 91.07 | glotblastn |
| LBY513 | onion\|14v1\|SRR073446X102184D1_T1 | 685 | — | 2023 | 91.07 | glotblastn |
| LBY513 | onion\|14v1\|SRR073446X144419D1_T1 | 686 | — | 2023 | 91.07 | glotblastn |
| LBY513 | onion\|14v1\|SRR073446X176467D1_T1 | 687 | — | 2023 | 91.07 | glotblastn |
| LBY513 | onion\|14v1\|SRR073446X216970D1_T1 | 688 | — | 2023 | 91.07 | glotblastn |
| LBY513 | onion\|14v1\|SRR073446X242051D1_T1 | 689 | — | 2023 | 91.07 | glotblastn |
| LBY513 | onion\|14v1\|SRR073446X389098D1_T1 | 690 | — | 2023 | 91.07 | glotblastn |
| LBY513 | papaya\|gb165\|EX261582_T1 | 691 | — | 2023 | 91.07 | glotblastn |
| LBY513 | peanut\|13v1\|EG030397_T1 | 692 | — | 2023 | 91.07 | glotblastn |
| LBY513 | peanut\|13v1\|SRR042421X12118_T1 | 693 | — | 2023 | 91.07 | glotblastn |
| LBY513 | phyla\|11v2\|SRR099037X13387_T1 | 694 | — | 2023 | 91.07 | glotblastn |
| LBY513 | phyla\|11v2\|SRR099037X299368_T1 | 695 | — | 2023 | 91.07 | glotblastn |
| LBY513 | platanus\|11v1\|SRR096786X100530_T1 | 696 | — | 2023 | 91.07 | glotblastn |
| LBY513 | platanus\|11v1\|SRR096786X100602_T1 | 697 | — | 2023 | 91.07 | glotblastn |
| LBY513 | poplar\|13v1\|AI161950_T1 | 698 | — | 2023 | 91.07 | glotblastn |
| LBY513 | poplar\|13v1\|BI139168_T1 | 699 | — | 2023 | 91.07 | glotblastn |
| LBY513 | primula\|11v1\|SRR098679X104533_T1 | 700 | — | 2023 | 91.07 | glotblastn |
| LBY513 | primula\|11v1\|SRR098679X105331_T1 | 701 | — | 2023 | 91.07 | glotblastn |
| LBY513 | primula\|11v1\|SRR098679X108787_T1 | 702 | — | 2023 | 91.07 | glotblastn |
| LBY513 | primula\|11v1\|SRR098681X11330_T1 | 703 | — | 2023 | 91.07 | glotblastn |
| LBY513 | primula\|11v1\|SRR098682X40544_T1 | 704 | — | 2023 | 91.07 | glotblastn |
| LBY513 | rose\|12v1\|BI978062 | 705 | — | 2023 | 91.07 | glotblastn |
| LBY513 | rose\|12v1\|BQ104531 | 706 | — | 2023 | 91.07 | glotblastn |
| LBY513 | rose\|12v1\|EC586266 | 707 | — | 2023 | 91.07 | glotblastn |
| LBY513 | rye\|12v1\|DRR001015.129456 | 708 | — | 2023 | 91.07 | glotblastn |
| LBY513 | soybean\|15v1\|GLYMA20G26871 | 709 | — | 2023 | 91.07 | glotblastn |
| LBY513 | tripterygium\|11v1\|SRR098677X110691 | 710 | — | 2023 | 91.07 | glotblastn |
| LBY513 | tripterygium\|11v1\|SRR098677X174612 | 711 | — | 2023 | 91.07 | glotblastn |
| LBY513 | tripterygium\|11v1\|SRR098677X18476 | 712 | — | 2023 | 91.07 | glotblastn |
| LBY513 | cenchrus\|13v1\|SRR124129X100489D1_T1 | 713 | — | 2023 | 89.47 | glotblastn |
| LBY513 | humulus\|11v1\|SRR098687X125111XX2_T1 | 714 | — | 2023 | 89.47 | glotblastn |
| LBY513 | antirrhinum\|gb166\|AJ791910_P1 | 715 | 2306 | 2023 | 89.3 | globlastp |
| LBY513 | avocado\|10v1\|CV458911_P1 | 716 | 2307 | 2023 | 89.3 | globlastp |
| LBY513 | cleome_gynandra\|10v1\|SRR015532S0007782_P1 | 717 | 2308 | 2023 | 89.3 | globlastp |
| LBY513 | cleome_gynandra\|10v1\|SRR015532S0012009_P1 | 718 | 2308 | 2023 | 89.3 | globlastp |
| LBY513 | cleome_gynandra\|10v1\|SRR015532S0017409_P1 | 719 | 2308 | 2023 | 89.3 | globlastp |
| LBY513 | cleome_gynandra\|10v1\|SRR015532S0043370_P1 | 720 | 2308 | 2023 | 89.3 | globlastp |
| LBY513 | cleome_spinosa\|10v1\|GR935012_P1 | 721 | 2309 | 2023 | 89.3 | globlastp |
| LBY513 | cleome_spinosa\|10v1\|SRR015531S0000467_P1 | 722 | 2309 | 2023 | 89.3 | globlastp |
| LBY513 | cleome_spinosa\|10v1\|SRR015531S0008587_P1 | 723 | 2309 | 2023 | 89.3 | globlastp |
| LBY513 | cleome_spinosa\|10v1\|SRR015531S0012433_P1 | 724 | 2309 | 2023 | 89.3 | globlastp |
| LBY513 | coffea\|10v1\|DV664039_P1 | 725 | 2310 | 2023 | 89.3 | globlastp |
| LBY513 | cynara\|gb167\|GE589746_P1 | 726 | 2311 | 2023 | 89.3 | globlastp |
| LBY513 | cynara\|gb167\|GE590559_P1 | 727 | 2311 | 2023 | 89.3 | globlastp |
| LBY513 | gerbera\|09v1\|AJ750274_P1 | 728 | 2311 | 2023 | 89.3 | globlastp |
| LBY513 | gerbera\|09v1\|AJ756171_P1 | 729 | 2311 | 2023 | 89.3 | globlastp |
| LBY513 | heritiera\|10v1\|SRR005794S0000692_P1 | 730 | 2312 | 2023 | 89.3 | globlastp |
| LBY513 | iceplant\|gb164\|BE034926_P1 | 731 | 2313 | 2023 | 89.3 | globlastp |
| LBY513 | iceplant\|gb164\|BE035628_P1 | 732 | 2313 | 2023 | 89.3 | globlastp |
| LBY513 | jatropha\|09v1\|GO247323_P1 | 733 | 2314 | 2023 | 89.3 | globlastp |
| LBY513 | kiwi\|gb166\|FG516890_P1 | 734 | 2315 | 2023 | 89.3 | globlastp |
| LBY513 | lotus\|09v1\|AW163971_P1 | 735 | 2312 | 2023 | 89.3 | globlastp |
| LBY513 | lotus\|09v1\|LLCN825643_P1 | 736 | 2312 | 2023 | 89.3 | globlastp |
| LBY513 | safflower\|gb162\|EL399737 | 737 | 2311 | 2023 | 89.3 | globlastp |
| LBY513 | salvia\|10v1\|SRR014553S0002050 | 738 | 2316 | 2023 | 89.3 | globlastp |
| LBY513 | tamarix\|gb166\|EG971872 | 739 | 2317 | 2023 | 89.3 | globlastp |
| LBY513 | tragopogon\|10v1\|SRR020205S0040815 | 740 | 2311 | 2023 | 89.3 | globlastp |
| LBY513 | ambrosia\|11v1\|SRR346943.100529_T1 | 741 | — | 2023 | 89.29 | glotblastn |
| LBY513 | ambrosia\|11v1\|SRR346946.15558_T1 | 742 | — | 2023 | 89.29 | glotblastn |
| LBY513 | apple\|11v1\|CO754334_T1 | 743 | — | 2023 | 89.29 | glotblastn |
| LBY513 | aquilegia\|10v2\|CRPAC025632_T1 | 744 | — | 2023 | 89.29 | glotblastn |
| LBY513 | arabidopsis_lyrata\|13v1\|AA394809_T1 | 745 | — | 2023 | 89.29 | glotblastn |
| LBY513 | arabidopsis_lyrata\|13v1\|BP661342_T1 | 746 | — | 2023 | 89.29 | glotblastn |
| LBY513 | arabidopsis_lyrata\|13v1\|XM_002869142_T1 | 747 | — | 2023 | 89.29 | glotblastn |
| LBY513 | arabidopsis\|13v2\|AT3G43970_T1 | 748 | — | 2023 | 89.29 | glotblastn |
| LBY513 | arabidopsis\|13v2\|AT3G44010_T1 | 749 | — | 2023 | 89.29 | glotblastn |
| LBY513 | arabidopsis\|13v2\|AT4G33865_T1 | 750 | — | 2023 | 89.29 | glotblastn |
| LBY513 | arnica\|11v1\|SRR099034X23332XX1_T1 | 751 | — | 2023 | 89.29 | glotblastn |
| LBY513 | b_juncea\|12v1\|BJUN12V11599938_T1 | 752 | — | 2023 | 89.29 | glotblastn |
| LBY513 | bean\|13v1\|CA897446_T1 | 753 | — | 2023 | 89.29 | glotblastn |
| LBY513 | blueberry\|12v1\|SRR353283X3955D1_T1 | 754 | — | 2023 | 89.29 | glotblastn |
| LBY513 | cacao\|13v1\|CU474381_T1 | 755 | — | 2023 | 89.29 | glotblastn |
| LBY513 | cannabis\|12v1\|SOLX00051744_T1 | 756 | — | 2023 | 89.29 | glotblastn |
| LBY513 | cannabis\|12v1\|SOLX00064590_T1 | 757 | — | 2023 | 89.29 | glotblastn |
| LBY513 | centaurea\|11v1\|EH725865_T1 | 758 | — | 2023 | 89.29 | glotblastn |
| LBY513 | centaurea\|11v1\|SRR346938.100883_T1 | 759 | — | 2023 | 89.29 | glotblastn |
| LBY513 | centaurea\|11v1\|SRR346938.110437_T1 | 760 | — | 2023 | 89.29 | glotblastn |
| LBY513 | centaurea\|11v1\|SRR346938.143089_T1 | 761 | — | 2023 | 89.29 | glotblastn |
| LBY513 | cichorium\|14v1\|CII14V1K19C133923_T1 | 762 | — | 2023 | 89.29 | glotblastn |
| LBY513 | cirsium\|11v1\|SRR346952.1014708XX1_T1 | 763 | — | 2023 | 89.29 | glotblastn |
| LBY513 | cirsium\|11v1\|SRR346952.164324_T1 | 764 | — | 2023 | 89.29 | glotblastn |
| LBY513 | cirsium\|11v1\|SRR346952.636896_T1 | 765 | — | 2023 | 89.29 | glotblastn |
| LBY513 | clover\|14v1\|ERR351507S19XK19C327482_T1 | 766 | — | 2023 | 89.29 | glotblastn |
| LBY513 | clover\|14v1\|ERR351507S19XK19C623715_T1 | 767 | — | 2023 | 89.29 | glotblastn |
| LBY513 | clover\|14v1\|ERR351507S19XK19C687346_T1 | 768 | — | 2023 | 89.29 | glotblastn |
| LBY513 | clover\|14v1\|FY459516_T1 | 769 | — | 2023 | 89.29 | glotblastn |
| LBY513 | cotton\|11v1\|BE053032_T1 | 770 | — | 2023 | 89.29 | glotblastn |
| LBY513 | cotton\|11v1\|BE053566_T1 | 771 | — | 2023 | 89.29 | glotblastn |
| LBY513 | cotton\|11v1\|BF269343_T1 | 772 | — | 2023 | 89.29 | glotblastn |
| LBY513 | cotton\|11v1\|DT050901_T1 | 773 | — | 2023 | 89.29 | glotblastn |
| LBY513 | cotton\|11v1\|SRR032799.588132_T1 | 774 | — | 2023 | 89.29 | glotblastn |
| LBY513 | cyclamen\|14v1\|AJ886308_T1 | 775 | — | 2023 | 89.29 | glotblastn |
| LBY513 | cyclamen\|14v1\|B14ROOTK19C133438_T1 | 776 | — | 2023 | 89.29 | glotblastn |
| LBY513 | distylium\|11v1\|SRR065077X11923_T1 | 777 | — | 2023 | 89.29 | glotblastn |
| LBY513 | eucalyptus\|11v2\|SRR001660X158011_T1 | 778 | — | 2023 | 89.29 | glotblastn |
| LBY513 | euonymus\|11v1\|SRR070038X106229_T1 | 779 | — | 2023 | 89.29 | glotblastn |
| LBY513 | euonymus\|11v1\|SRR070038X107720_T1 | 780 | — | 2023 | 89.29 | glotblastn |
| LBY513 | euonymus\|11v1\|SRR070038X111924_T1 | 781 | — | 2023 | 89.29 | glotblastn |
| LBY513 | euonymus\|11v1\|SRR070038X180895_T1 | 782 | — | 2023 | 89.29 | glotblastn |
| LBY513 | euonymus\|11v1\|SRR070038X181027_T1 | 783 | — | 2023 | 89.29 | glotblastn |
| LBY513 | euonymus\|11v1\|SRR070038X235624_T1 | 784 | — | 2023 | 89.29 | glotblastn |
| LBY513 | euonymus\|11v1\|SRR070038X534576_T1 | 785 | — | 2023 | 89.29 | glotblastn |
| LBY513 | euphorbia\|11v1\|BP957639_T1 | 786 | — | 2023 | 89.29 | glotblastn |
| LBY513 | flaveria\|11v1\|SRR149229.106684_T1 | 787 | — | 2023 | 89.29 | glotblastn |
| LBY513 | flaveria\|11v1\|SRR149229.132129XX1_T1 | 788 | — | 2023 | 89.29 | glotblastn |
| LBY513 | flaveria\|11v1\|SRR149229.16609_T1 | 789 | — | 2023 | 89.29 | glotblastn |
| LBY513 | flaveria\|11v1\|SRR149229.215492_T1 | 790 | — | 2023 | 89.29 | glotblastn |
| LBY513 | flaveria\|11v1\|SRR149232.108534_T1 | 791 | — | 2023 | 89.29 | glotblastn |
| LBY513 | flaveria\|11v1\|SRR149232.163436_T1 | 792 | — | 2023 | 89.29 | glotblastn |
| LBY513 | flaveria\|11v1\|SRR149232.180207_T1 | 793 | — | 2023 | 89.29 | glotblastn |
| LBY513 | flaveria\|11v1\|SRR149232.215851_T1 | 794 | — | 2023 | 89.29 | glotblastn |
| LBY513 | flaveria\|11v1\|SRR149238.106095_T1 | 795 | — | 2023 | 89.29 | glotblastn |
| LBY513 | flaveria\|11v1\|SRR149241.155940_T1 | 796 | — | 2023 | 89.29 | glotblastn |
| LBY513 | fraxinus\|11v1\|SRR058827.110440_T1 | 797 | — | 2023 | 89.29 | glotblastn |
| LBY513 | fraxinus\|11v1\|SRR058827.119609_T1 | 798 | — | 2023 | 89.29 | glotblastn |
| LBY513 | fraxinus\|11v1\|SRR058827.126938_T1 | 799 | — | 2023 | 89.29 | glotblastn |
| LBY513 | fraxinus\|11v1\|SRR058827.20338_T1 | 800 | — | 2023 | 89.29 | glotblastn |
| LBY513 | ginger\|gb164\|DY346271_T1 | 801 | — | 2023 | 89.29 | glotblastn |
| LBY513 | gnetum\|10v1\|CB081091XX2_T1 | 802 | — | 2023 | 89.29 | glotblastn |
| LBY513 | gossypium_raimondii\|13v1\|BE052046_T1 | 803 | — | 2023 | 89.29 | glotblastn |
| LBY513 | gossypium_raimondii\|13v1\|BE053032_T1 | 804 | — | 2023 | 89.29 | glotblastn |
| LBY513 | gossypium_raimondii\|13v1\|BE053413_T1 | 805 | — | 2023 | 89.29 | glotblastn |
| LBY513 | gossypium_raimondii\|13v1\|BE053566_T1 | 806 | — | 2023 | 89.29 | glotblastn |
| LBY513 | gossypium_raimondii\|13v1\|BF269343_T1 | 807 | — | 2023 | 89.29 | glotblastn |
| LBY513 | guizotia\|10v1\|GE563377_T1 | 808 | — | 2023 | 89.29 | glotblastn |
| LBY513 | lettuce\|12v1\|DW045430_T1 | 809 | — | 2023 | 89.29 | glotblastn |
| LBY513 | lettuce\|12v1\|DW046368_T1 | 810 | — | 2023 | 89.29 | glotblastn |
| LBY513 | medicago\|13v1\|AJ388673_T1 | 811 | — | 2023 | 89.29 | glotblastn |
| LBY513 | medicago\|13v1\|AW126377_T1 | 812 | — | 2023 | 89.29 | glotblastn |
| LBY513 | monkeyflower\|12v1\|DV206069_T1 | 813 | — | 2023 | 89.29 | glotblastn |
| LBY513 | nasturtium\|11v1\|SRR032558.100924_T1 | 814 | — | 2023 | 89.29 | glotblastn |
| LBY513 | olea\|13v1\|SRR014463X32111D1_T1 | 815 | — | 2023 | 89.29 | glotblastn |
| LBY513 | olea\|13v1\|SRR014463X38974D1_T1 | 816 | — | 2023 | 89.29 | glotblastn |
| LBY513 | olea\|13v1\|SRR014463X51600D1_T1 | 817 | — | 2023 | 89.29 | glotblastn |
| LBY513 | olea\|13v1\|SRR014464X45707D1_T1 | 818 | — | 2023 | 89.29 | glotblastn |
| LBY513 | onion\|14v1\|SRR073446X167599D1_T1 | 819 | — | 2023 | 89.29 | glotblastn |
| LBY513 | onion\|14v1\|SRR073446X301835D1_T1 | 820 | — | 2023 | 89.29 | glotblastn |
| LBY513 | onion\|14v1\|SRR573726X556896D1_T1 | 821 | — | 2023 | 89.29 | glotblastn |
| LBY513 | peanut\|13v1\|ES720987_T1 | 822 | — | 2023 | 89.29 | glotblastn |
| LBY513 | phalaenopsis\|11v1\|CB033142_T1 | 823 | — | 2023 | 89.29 | glotblastn |
| LBY513 | phyla\|11v2\|SRR099035X36790_T1 | 824 | — | 2023 | 89.29 | glotblastn |
| LBY513 | phyla\|11v2\|SRR099037X121996_T1 | 825 | — | 2023 | 89.29 | glotblastn |
| LBY513 | pineapple\|14v1\|ACOM14V1K19C1355391_T1 | 826 | — | 2023 | 89.29 | glotblastn |
| LBY513 | plantago\|11v2\|SRR066373X107833_T1 | 827 | — | 2023 | 89.29 | glotblastn |
| LBY513 | podocarpus\|10v1\|SRR065014S0004944_T1 | 828 | — | 2023 | 89.29 | glotblastn |
| LBY513 | poppy\|11v1\|FE965866_T1 | 829 | — | 2023 | 89.29 | glotblastn |
| LBY513 | poppy\|11v1\|SRR030259.105648_T1 | 830 | — | 2023 | 89.29 | glotblastn |
| LBY513 | poppy\|11v1\|SRR030259.1_T1 | 831 | — | 2023 | 89.29 | glotblastn |
| LBY513 | poppy\|11v1\|SRR030261.15163_T1 | 832 | — | 2023 | 89.29 | glotblastn |
| LBY513 | poppy\|11v1\|SRR096789.111068_T1 | 833 | — | 2023 | 89.29 | glotblastn |
| LBY513 | rosmarinus\|15v1\|SRR290363X136196D1 | 834 | — | 2023 | 89.29 | glotblastn |
| LBY513 | rosmarinus\|15v1\|SRR290363X243167D1 | 835 | — | 2023 | 89.29 | glotblastn |
| LBY513 | rosmarinus\|15v1\|SRR290363X384517D1 | 836 | — | 2023 | 89.29 | glotblastn |
| LBY513 | safflower\|gb162\|EL402487 | 837 | — | 2023 | 89.29 | glotblastn |
| LBY513 | salvia\|10v1\|CV165612 | 838 | — | 2023 | 89.29 | glotblastn |
| LBY513 | sarracenia\|11v1\|SRR192669.107333 | 839 | — | 2023 | 89.29 | glotblastn |
| LBY513 | sarracenia\|11v1\|SRR192669.117238 | 840 | — | 2023 | 89.29 | glotblastn |
| LBY513 | sarracenia\|11v1\|SRR192669.134284 | 841 | — | 2023 | 89.29 | glotblastn |
| LBY513 | sarracenia\|11v1\|SRR192669.145162 | 842 | — | 2023 | 89.29 | glotblastn |
| LBY513 | scabiosa\|11v1\|SRR063723X101391 | 843 | — | 2023 | 89.29 | glotblastn |
| LBY513 | scabiosa\|11v1\|SRR063723X140942 | 844 | — | 2023 | 89.29 | glotblastn |
| LBY513 | sunflower\|12v1\|AJ827905 | 845 | — | 2023 | 89.29 | glotblastn |
| LBY513 | sunflower\|12v1\|CD851819 | 846 | — | 2023 | 89.29 | glotblastn |
| LBY513 | trigonella\|11v1\|SRR066194X101679 | 847 | — | 2023 | 89.29 | glotblastn |
| LBY513 | trigonella\|11v1\|SRR066194X111831 | 848 | — | 2023 | 89.29 | glotblastn |
| LBY513 | trigonella\|11v1\|SRR066194X156931 | 849 | — | 2023 | 89.29 | glotblastn |
| LBY513 | trigonella\|11v1\|SRR066198X820727 | 850 | — | 2023 | 89.29 | glotblastn |
| LBY513 | triphysaria\|13v1\|BM357050 | 851 | — | 2023 | 89.29 | glotblastn |
| LBY513 | triphysaria\|13v1\|BM357795 | 852 | — | 2023 | 89.29 | glotblastn |
| LBY513 | triphysaria\|13v1\|CB815103 | 853 | — | 2023 | 89.29 | glotblastn |
| LBY513 | triphysaria\|13v1\|EX988373 | 854 | — | 2023 | 89.29 | glotblastn |
| LBY513 | triphysaria\|13v1\|EX995278 | 855 | — | 2023 | 89.29 | glotblastn |
| LBY513 | triphysaria\|13v1\|EX996315 | 856 | — | 2023 | 89.29 | glotblastn |
| LBY513 | triphysaria\|13v1\|EY005059 | 857 | — | 2023 | 89.29 | glotblastn |
| LBY513 | triphysaria\|13v1\|EY005988 | 858 | — | 2023 | 89.29 | glotblastn |
| LBY513 | triphysaria\|13v1\|EY006603 | 859 | — | 2023 | 89.29 | glotblastn |
| LBY513 | triphysaria\|13v1\|SRR023500X12390 | 860 | — | 2023 | 89.29 | glotblastn |
| LBY513 | triphysaria\|13v1\|SRR023500X162314 | 861 | — | 2023 | 89.29 | glotblastn |
| LBY513 | triphysaria\|13v1\|SRR023500X202565 | 862 | — | 2023 | 89.29 | glotblastn |
| LBY513 | zostera\|12v1\|AM768067 | 863 | — | 2023 | 89.29 | glotblastn |
| LBY513 | zostera\|12v1\|AM772908 | 864 | — | 2023 | 89.29 | glotblastn |
| LBY513 | rye\|12v1\|DRR001012.135378 | 865 | 2318 | 2023 | 88.5 | globlastp |
| LBY513 | rye\|12v1\|DRR001012.5414 | 866 | — | 2023 | 87.93 | glotblastn |
| LBY513 | antirrhinum\|gb166\|AJ791309_P1 | 867 | 2319 | 2023 | 87.5 | globlastp |
| LBY513 | artemisia\|10v1\|EY053931_P1 | 868 | 2320 | 2023 | 87.5 | globlastp |
| LBY513 | artemisia\|10v1\|EY056391_P1 | 869 | 2321 | 2023 | 87.5 | globlastp |
| LBY513 | artemisia\|10v1\|SRR019254S0000314_P1 | 870 | 2321 | 2023 | 87.5 | globlastp |
| LBY513 | dandelion\|10v1\|DY802956_P1 | 871 | 2322 | 2023 | 87.5 | globlastp |
| LBY513 | dandelion\|10v1\|DY808364_P1 | 872 | 2322 | 2023 | 87.5 | globlastp |
| LBY513 | dandelion\|10v1\|DY814332_P1 | 873 | 2322 | 2023 | 87.5 | globlastp |
| LBY513 | eggplant\|10v1\|FS000177_P1 | 874 | 2323 | 2023 | 87.5 | globlastp |
| LBY513 | gerbera\|09v1\|AJ750687_P1 | 875 | 2320 | 2023 | 87.5 | globlastp |
| LBY513 | ipomoea_nil\|10v1\|BJ553086_P1 | 876 | 2324 | 2023 | 87.5 | globlastp |
| LBY513 | ipomoea_nil\|10v1\|BJ555156_P1 | 877 | 2324 | 2023 | 87.5 | globlastp |
| LBY513 | orobanche\|10v1\|SRR023189S0002773_P1 | 878 | 2325 | 2023 | 87.5 | globlastp |
| LBY513 | orobanche\|10v1\|SRR023189S0002881_P1 | 879 | 2325 | 2023 | 87.5 | globlastp |
| LBY513 | orobanche\|10v1\|SRR023495S0011843_P1 | 880 | 2323 | 2023 | 87.5 | globlastp |
| LBY513 | potato\|10v1\|AJ487327_P1 | 881 | 2323 | 2023 | 87.5 | globlastp |
| LBY513 | potato\|10v1\|BG591697_P1 | 882 | 2323 | 2023 | 87.5 | globlastp |
| LBY513 | potato\|10v1\|BI432659_P1 | 883 | 2323 | 2023 | 87.5 | globlastp |
| LBY513 | radish\|gb164\|EV535232 | 884 | 2326 | 2023 | 87.5 | globlastp |
| LBY513 | radish\|gb164\|EV545954 | 885 | 2326 | 2023 | 87.5 | globlastp |
| LBY513 | solanum_phureja\|09v1\|SPHBG131985 | 886 | 2323 | 2023 | 87.5 | globlastp |
| LBY513 | solanum_phureja\|09v1\|SPHTOMTRALTAC | 887 | 2323 | 2023 | 87.5 | globlastp |
| LBY513 | tamarix\|gb166\|CF199311 | 888 | 2327 | 2023 | 87.5 | globlastp |
| LBY513 | tobacco\|gb162\|CV015987 | 889 | 2323 | 2023 | 87.5 | globlastp |
| LBY513 | tobacco\|gb162\|CV016189 | 890 | 2323 | 2023 | 87.5 | globlastp |
| LBY513 | tobacco\|gb162\|CV016256 | 891 | 2323 | 2023 | 87.5 | globlastp |
| LBY513 | amaranthus\|13v1\|SRR172675X257034D1_T1 | 892 | — | 2023 | 87.5 | glotblastn |
| LBY513 | ambrosia\|11v1\|SRR346935.317945_T1 | 893 | — | 2023 | 87.5 | glotblastn |
| LBY513 | ambrosia\|11v1\|SRR346943.111478_T1 | 894 | — | 2023 | 87.5 | glotblastn |
| LBY513 | b_juncea\|12v1\|E6ANDIZ01AY4SA_T1 | 895 | — | 2023 | 87.5 | glotblastn |
| LBY513 | b_juncea\|12v1\|E6ANDIZ02H43JH_T1 | 896 | — | 2023 | 87.5 | glotblastn |
| LBY513 | b_oleracea\|14v1\|DW998741_T1 | 897 | — | 2023 | 87.5 | glotblastn |
| LBY513 | b_rapa\|11v1\|CD817638_T1 | 898 | — | 2023 | 87.5 | glotblastn |
| LBY513 | beet\|12v1\|BE590366_T1 | 899 | — | 2023 | 87.5 | glotblastn |
| LBY513 | beet\|12v1\|FG345439_T1 | 900 | — | 2023 | 87.5 | glotblastn |
| LBY513 | beet\|12v1\|FG345552_T1 | 901 | — | 2023 | 87.5 | glotblastn |
| LBY513 | canola\|11v1\|DW998741_T1 | 902 | — | 2023 | 87.5 | glotblastn |
| LBY513 | catharanthus\|11v1\|SRR098691X20049_T1 | 903 | — | 2023 | 87.5 | glotblastn |
| LBY513 | chrysanthemum\|14v1\|CCOR13V1K19C1256811_T1 | 904 | — | 2023 | 87.5 | glotblastn |
| LBY513 | chrysanthemum\|14v1\|CCOR13V1K19C1438397_T1 | 905 | — | 2023 | 87.5 | glotblastn |
| LBY513 | chrysanthemum\|14v1\|CCOR13V1K19C1606645_T1 | 906 | — | 2023 | 87.5 | glotblastn |
| LBY513 | chrysanthemum\|14v1\|CCOR13V1K19C861999_T1 | 907 | — | 2023 | 87.5 | glotblastn |
| LBY513 | chrysanthemum\|14v1\|CCOR13V1K23C1259280_T1 | 908 | — | 2023 | 87.5 | glotblastn |
| LBY513 | chrysanthemum\|14v1\|CCOR13V1K23C873542_T1 | 909 | — | 2023 | 87.5 | glotblastn |
| LBY513 | chrysanthemum\|14v1\|CCOR13V1K40C410908_T1 | 910 | — | 2023 | 87.5 | glotblastn |
| LBY513 | chrysanthemum\|14v1\|DK942867_T1 | 911 | — | 2023 | 87.5 | glotblastn |
| LBY513 | chrysanthemum\|14v1\|E7LEAFK19C150697_T1 | 912 | — | 2023 | 87.5 | glotblastn |
| LBY513 | chrysanthemum\|14v1\|SRR290491X102690D1_T1 | 913 | — | 2023 | 87.5 | glotblastn |
| LBY513 | chrysanthemum\|14v1\|SRR290491X105382D1_T1 | 914 | — | 2023 | 87.5 | glotblastn |
| LBY513 | chrysanthemum\|14v1\|SRR290491X286594D1_T1 | 915 | — | 2023 | 87.5 | glotblastn |
| LBY513 | chrysanthemum\|14v1\|SRR525216X29674D1_T1 | 916 | — | 2023 | 87.5 | glotblastn |
| LBY513 | chrysanthemum\|14v1\|SRR525216X68354D1_T1 | 917 | — | 2023 | 87.5 | glotblastn |
| LBY513 | cichorium\|14v1\|DT210897_T1 | 918 | — | 2023 | 87.5 | glotblastn |
| LBY513 | cichorium\|14v1\|EH698665_T1 | 919 | — | 2023 | 87.5 | glotblastn |
| LBY513 | cirsium\|11v1\|SRR346952.235769_T1 | 920 | — | 2023 | 87.5 | glotblastn |
| LBY513 | cirsium\|11v1\|SRR346952.287796_T1 | 921 | — | 2023 | 87.5 | glotblastn |
| LBY513 | cirsium\|11v1\|SRR346952.632534_T1 | 922 | — | 2023 | 87.5 | glotblastn |
| LBY513 | clementine\|11v1\|BQ624532_T1 | 923 | — | 2023 | 87.5 | glotblastn |
| LBY513 | clementine\|11v1\|BQ624678_T1 | 924 | — | 2023 | 87.5 | glotblastn |
| LBY513 | conyza\|15v1\|BSS2K19C408934T1T1_T1 | 925 | — | 2023 | 87.5 | glotblastn |
| LBY513 | conyza\|15v1\|CONY15V1K35C871321T1_T1 | 926 | — | 2023 | 87.5 | glotblastn |
| LBY513 | cotton\|11v1\|DV850213_T1 | 927 | — | 2023 | 87.5 | glotblastn |
| LBY513 | cotton\|11v1\|GFXAF195864X1_T1 | 928 | — | 2023 | 87.5 | glotblastn |
| LBY513 | cucurbita\|11v1\|SRR091276X149141_T1 | 929 | — | 2023 | 87.5 | glotblastn |
| LBY513 | eschscholzia\|11v1\|SRR014116.101743_T1 | 930 | — | 2023 | 87.5 | glotblastn |
| LBY513 | eschscholzia\|11v1\|SRR014116.107607_T1 | 931 | — | 2023 | 87.5 | glotblastn |
| LBY513 | eschscholzia\|11v1\|SRR014116.110585_T1 | 932 | — | 2023 | 87.5 | glotblastn |
| LBY513 | eschscholzia\|11v1\|SRR014116.11627_T1 | 933 | — | 2023 | 87.5 | glotblastn |
| LBY513 | eschscholzia\|11v1\|SRR014116.123025_T1 | 934 | — | 2023 | 87.5 | glotblastn |
| LBY513 | euonymus\|11v1\|SRR070038X119475_T1 | 935 | — | 2023 | 87.5 | glotblastn |
| LBY513 | flaveria\|11v1\|SRR149241.15656_T1 | 936 | — | 2023 | 87.5 | glotblastn |
| LBY513 | flax\|11v1\|EU828936_T1 | 937 | — | 2023 | 87.5 | glotblastn |
| LBY513 | flax\|11v1\|EU829520_T1 | 938 | — | 2023 | 87.5 | glotblastn |
| LBY513 | flax\|11v1\|EU830619_T1 | 939 | — | 2023 | 87.5 | glotblastn |
| LBY513 | flax\|11v1\|JG017847_T1 | 940 | — | 2023 | 87.5 | glotblastn |
| LBY513 | flax\|11v1\|JG018319_T1 | 941 | — | 2023 | 87.5 | glotblastn |
| LBY513 | flax\|11v1\|JG019976_T1 | 942 | — | 2023 | 87.5 | glotblastn |
| LBY513 | flax\|11v1\|JG021803_T1 | 943 | — | 2023 | 87.5 | glotblastn |
| LBY513 | lettuce\|12v1\|DW044367_T1 | 944 | — | 2023 | 87.5 | glotblastn |
| LBY513 | monkeyflower\|12v1\|DV207380_T1 | 945 | — | 2023 | 87.5 | glotblastn |
| LBY513 | monkeyflower\|12v1\|DV208351_T1 | 946 | — | 2023 | 87.5 | glotblastn |
| LBY513 | nasturtium\|11v1\|GH162359_T1 | 947 | — | 2023 | 87.5 | glotblastn |
| LBY513 | nicotiana_benthamiana\|12v1\|AY310769_T1 | 948 | — | 2023 | 87.5 | glotblastn |
| LBY513 | nicotiana_benthamiana\|12v1\|BP747716_T1 | 949 | — | 2023 | 87.5 | glotblastn |
| LBY513 | nicotiana_benthamiana\|12v1\|BP748323_T1 | 950 | — | 2023 | 87.5 | glotblastn |
| LBY513 | olea\|13v1\|SRR014465X35062D1_T1 | 951 | — | 2023 | 87.5 | glotblastn |
| LBY513 | orange\|11v1\|BQ624532_T1 | 923 | — | 2023 | 87.5 | glotblastn |
| LBY513 | pepper\|14v1\|BM061408_T1 | 952 | — | 2023 | 87.5 | glotblastn |
| LBY513 | plantago\|11v2\|SRR066373X102435_T1 | 953 | — | 2023 | 87.5 | glotblastn |
| LBY513 | plantago\|11v2\|SRR066373X206266_T1 | 954 | — | 2023 | 87.5 | glotblastn |
| LBY513 | poppy\|11v1\|SRR096789.335411_T1 | 955 | — | 2023 | 87.5 | glotblastn |
| LBY513 | quinoa\|13v2\|CN782294 | 956 | — | 2023 | 87.5 | glotblastn |
| LBY513 | quinoa\|13v2\|SRR315568X106617 | 957 | — | 2023 | 87.5 | glotblastn |
| LBY513 | quinoa\|13v2\|SRR315568X130032 | 958 | — | 2023 | 87.5 | glotblastn |
| LBY513 | scabiosa\|11v1\|SRR063723X101723 | 959 | — | 2023 | 87.5 | glotblastn |
| LBY513 | scabiosa\|11v1\|SRR063723X101889 | 960 | — | 2023 | 87.5 | glotblastn |
| LBY513 | scabiosa\|11v1\|SRR063723X103826 | 961 | — | 2023 | 87.5 | glotblastn |
| LBY513 | scabiosa\|11v1\|SRR063723X105332 | 962 | — | 2023 | 87.5 | glotblastn |
| LBY513 | scabiosa\|11v1\|SRR063723X119678 | 963 | — | 2023 | 87.5 | glotblastn |
| LBY513 | sciadopitys\|10v1\|SRR065035S0006771 | 964 | — | 2023 | 87.5 | glotblastn |
| LBY513 | sciadopitys\|10v1\|SRR065035S0022547 | 965 | — | 2023 | 87.5 | glotblastn |
| LBY513 | sunflower\|12v1\|BQ912058 | 966 | — | 2023 | 87.5 | glotblastn |
| LBY513 | sunflower\|12v1\|BU671997 | 967 | — | 2023 | 87.5 | glotblastn |
| LBY513 | sunflower\|12v1\|CD847608 | 968 | — | 2023 | 87.5 | glotblastn |
| LBY513 | sunflower\|12v1\|DY926505 | 969 | — | 2023 | 87.5 | glotblastn |
| LBY513 | sunflower\|12v1\|DY928859 | 970 | — | 2023 | 87.5 | glotblastn |
| LBY513 | sunflower\|12v1\|DY929418 | 971 | — | 2023 | 87.5 | glotblastn |
| LBY513 | sunflower\|12v1\|DY935107 | 972 | — | 2023 | 87.5 | glotblastn |
| LBY513 | sunflower\|12v1\|DY954429 | 973 | — | 2023 | 87.5 | glotblastn |
| LBY513 | sunflower\|12v1\|DY956036 | 974 | — | 2023 | 87.5 | glotblastn |
| LBY513 | sunflower\|12v1\|EE652848 | 975 | — | 2023 | 87.5 | glotblastn |
| LBY513 | tomato\|13v1\|TOMTRALTAC | 976 | — | 2023 | 87.5 | glotblastn |
| LBY513 | tragopogon\|10v1\|SRR020205S0084440 | 977 | — | 2023 | 87.5 | glotblastn |
| LBY513 | triphysaria\|13v1\|EY012026 | 978 | — | 2023 | 87.5 | glotblastn |
| LBY513 | triphysaria\|13v1\|SRR023500X107980 | 979 | — | 2023 | 87.5 | glotblastn |
| LBY513 | utricularia\|11v1\|SRR094438.106502 | 980 | — | 2023 | 87.5 | glotblastn |
| LBY513 | valeriana\|11v1\|SRR099039X108096 | 981 | — | 2023 | 87.5 | glotblastn |
| LBY513 | valeriana\|11v1\|SRR099040X56593 | 982 | — | 2023 | 87.5 | glotblastn |
| LBY513 | vicia\|14v1\|SRR403894S19XK19C11960 | 983 | — | 2023 | 87.5 | glotblastn |
| LBY513 | vicia\|14v1\|SRR403894S19XK19C5713 | 984 | — | 2023 | 87.5 | glotblastn |
| LBY513 | cenchrus\|13v1\|EB652918_P1 | 985 | 2328 | 2023 | 86.2 | globlastp |
| LBY513 | amaranthus\|13v1\|SRR172675X498556D1_T1 | 986 | — | 2023 | 85.71 | glotblastn |
| LBY513 | amborella\|12v3\|FD437065_T1 | 987 | — | 2023 | 85.71 | glotblastn |
| LBY513 | ambrosia\|11v1\|SRR346943.120675_T1 | 988 | — | 2023 | 85.71 | glotblastn |
| LBY513 | amsonia\|11v1\|SRR098688X116594_T1 | 989 | — | 2023 | 85.71 | glotblastn |
| LBY513 | arabidopsis\|13v2\|EVGN454EU75IKH02FPYIG_T1 | 990 | — | 2023 | 85.71 | glotblastn |
| LBY513 | artemisia\|10v1\|SRR019254S0032045_T1 | 991 | — | 2023 | 85.71 | glotblastn |
| LBY513 | basilicum\|13v1\|B10LEAF562437_T1 | 992 | — | 2023 | 85.71 | glotblastn |
| LBY513 | catharanthus\|11v1\|EG560679_T1 | 993 | — | 2023 | 85.71 | glotblastn |
| LBY513 | catharanthus\|11v1\|SRR098691X101766_T1 | 994 | — | 2023 | 85.71 | glotblastn |
| LBY513 | chrysanthemum\|14v1\|SRR290491X10939D1_T1 | 995 | — | 2023 | 85.71 | glotblastn |
| LBY513 | clementine\|11v1\|CK701900_T1 | 996 | — | 2023 | 85.71 | glotblastn |
| LBY513 | conyza\|15v1\|BSS2K29C201653T1_T1 | 997 | — | 2023 | 85.71 | glotblastn |
| LBY513 | conyza\|15v1\|BSS2K35S016413T1_T1 | 998 | — | 2023 | 85.71 | glotblastn |
| LBY513 | cycas\|14v1\|CB089816_T1 | 999 | — | 2023 | 85.71 | glotblastn |
| LBY513 | fagopyrum\|11v1\|SRR063689X101129_T1 | 1000 | — | 2023 | 85.71 | glotblastn |
| LBY513 | fagopyrum\|11v1\|SRR063689X136871_T1 | 1001 | — | 2023 | 85.71 | glotblastn |
| LBY513 | fagopyrum\|11v1\|SRR063689X70691_T1 | 1002 | — | 2023 | 85.71 | glotblastn |
| LBY513 | fagopyrum\|11v1\|SRR063703X102151_T1 | 1003 | — | 2023 | 85.71 | glotblastn |
| LBY513 | fagopyrum\|11v1\|SRR063703X106973_T1 | 1004 | — | 2023 | 85.71 | glotblastn |
| LBY513 | flax\|11v1\|EU829511_T1 | 1005 | — | 2023 | 85.71 | glotblastn |
| LBY513 | ginseng\|13v1\|GR872898_T1 | 1006 | — | 2023 | 85.71 | glotblastn |
| LBY513 | guizotia\|10v1\|GE571326_T1 | 1007 | — | 2023 | 85.71 | glotblastn |
| LBY513 | lettuce\|12v1\|DW056459_T1 | 1008 | — | 2023 | 85.71 | glotblastn |
| LBY513 | nicotiana_benthamiana\|12v1\|CN655219_T1 | 1009 | — | 2023 | 85.71 | glotblastn |
| LBY513 | orobanche\|10v1\|SRR023189S0011692_T1 | 1010 | — | 2023 | 85.71 | glotblastn |
| LBY513 | orobanche\|10v1\|SRR023495S0001912_T1 | 1011 | — | 2023 | 85.71 | glotblastn |
| LBY513 | pine\|14v1\|AW064954_T1 | 1012 | — | 2023 | 85.71 | glotblastn |
| LBY513 | pine\|14v1\|PT14V1PRD018430_T1 | 1013 | — | 2023 | 85.71 | glotblastn |
| LBY513 | poplar\|13v1\|XM_002305098_T1 | 1014 | — | 2023 | 85.71 | glotblastn |
| LBY513 | poppy\|11v1\|SRR096789.254703_T1 | 1015 | — | 2023 | 85.71 | glotblastn |
| LBY513 | sequoia\|10v1\|SRR065044S0009922 | 1016 | — | 2023 | 85.71 | glotblastn |
| LBY513 | silene\|11v1\|SRR096785X140733 | 1017 | — | 2023 | 85.71 | glotblastn |
| LBY513 | silene\|11v1\|SRR096785X165328 | 1018 | — | 2023 | 85.71 | glotblastn |
| LBY513 | spinach\|15v1\|SO15V1K19C228054T1 | 1019 | — | 2023 | 85.71 | glotblastn |
| LBY513 | spinach\|15v1\|SO15V1K23C26866T1 | 1020 | — | 2023 | 85.71 | glotblastn |
| LBY513 | spinach\|15v1\|SO15V1K35C570616T1 | 1021 | — | 2023 | 85.71 | glotblastn |
| LBY513 | sunflower\|12v1\|DY910930 | 1022 | — | 2023 | 85.71 | glotblastn |
| LBY513 | tabernaemontana\|11v1\|SRR098689X144524 | 1023 | — | 2023 | 85.71 | glotblastn |
| LBY513 | taxus\|10v1\|SRR032523S0022889 | 1024 | — | 2023 | 85.71 | glotblastn |
| LBY513 | thellungiella_halophilum\|13v1\| | 1025 | — | 2023 | 85.71 | glotblastn |
| | BY823689 | | | | | |
| LBY513 | utricularia\|11v1\|SRR094438.101720 | 1026 | — | 2023 | 85.71 | glotblastn |
| LBY513 | artemisia\|10v1\|EY035725_P1 | 1027 | 2329 | 2023 | 85.7 | globlastp |
| LBY513 | artemisia\|10v1\|EY088280_P1 | 1028 | 2329 | 2023 | 85.7 | globlastp |
| LBY513 | artemisia\|10v1\|GW328083_P1 | 1029 | 2329 | 2023 | 85.7 | globlastp |
| LBY513 | artemisia\|10v1\|SRR019254S0045330_P1 | 1030 | 2329 | 2023 | 85.7 | globlastp |
| LBY513 | cryptomeria\|gb166\|BP174124_P1 | 1031 | 2330 | 2023 | 85.7 | globlastp |
| LBY513 | ipomoea_batatas\|10v1\|CB330424_P1 | 1032 | 2331 | 2023 | 85.7 | globlastp |
| LBY513 | ipomoea_batatas\|10v1\|CB330530_P1 | 1033 | 2331 | 2023 | 85.7 | globlastp |
| LBY513 | ipomoea_batatas\|10v1\|EE875380_P1 | 1034 | 2331 | 2023 | 85.7 | globlastp |
| LBY513 | ipomoea_nil\|10v1\|CJ747779_P1 | 1035 | 2331 | 2023 | 85.7 | globlastp |
| LBY513 | nuphar\|gb166\|CD472432_P1 | 1036 | 2332 | 2023 | 85.7 | globlastp |
| LBY513 | petunia\|gb171\|AF049923_P1 | 1037 | 2333 | 2023 | 85.7 | globlastp |
| LBY513 | petunia\|gb171\|CV296223_P1 | 1038 | 2333 | 2023 | 85.7 | globlastp |
| LBY513 | petunia\|gb171\|CV300161_P1 | 1039 | 2333 | 2023 | 85.7 | globlastp |
| LBY513 | radish\|gb164\|EW724855 | 1040 | 2334 | 2023 | 85.7 | globlastp |
| LBY513 | radish\|gb164\|EX897531 | 1041 | 2335 | 2023 | 85.7 | globlastp |
| LBY513 | amaranthus\|13v1\|SRR172675X119467D1_T1 | 1042 | — | 2023 | 83.93 | glotblastn |
| LBY513 | amorphophallus\|11v2\|SRR089351X100580_T1 | 1043 | — | 2023 | 83.93 | glotblastn |
| LBY513 | artemisia\|10v1\|EY113273_T1 | 1044 | — | 2023 | 83.93 | glotblastn |
| LBY513 | banana\|14v1\|FL667108_T1 | 1045 | — | 2023 | 83.93 | glotblastn |
| LBY513 | cacao\|13v1\|SRR851105X6124076D1_T1 | 1046 | — | 2023 | 83.93 | glotblastn |
| LBY513 | epimedium\|11v1\|SRR013504.12680XX2_T1 | 1047 | — | 2023 | 83.93 | glotblastn |
| LBY513 | euphorbia\|11v1\|DV112809_T1 | 1048 | — | 2023 | 83.93 | glotblastn |
| LBY513 | ginseng\|13v1\|GR871284_T1 | 1049 | — | 2023 | 83.93 | glotblastn |
| LBY513 | ginseng\|13v1\|GR871554_T1 | 1050 | — | 2023 | 83.93 | glotblastn |
| LBY513 | ginseng\|13v1\|SRR547984.121353_T1 | 1051 | — | 2023 | 83.93 | glotblastn |
| LBY513 | maritime_pine\|10v1\|BX248857_T1 | 1052 | — | 2023 | 83.93 | glotblastn |
| LBY513 | onion\|14v1\|ALLC13V1K19C590376_T1 | 1053 | — | 2023 | 83.93 | glotblastn |
| LBY513 | onion\|14v1\|BQ580015_T1 | 1054 | — | 2023 | 83.93 | glotblastn |
| LBY513 | onion\|14v1\|SRR073446X101601D1_T1 | 1055 | — | 2023 | 83.93 | glotblastn |
| LBY513 | onion\|14v1\|SRR073446X103274D1_T1 | 1056 | — | 2023 | 83.93 | glotblastn |
| LBY513 | onion\|14v1\|SRR073446X113063D1_T1 | 1057 | — | 2023 | 83.93 | glotblastn |
| LBY513 | onion\|14v1\|SRR073446X114142D1_T1 | 1058 | — | 2023 | 83.93 | glotblastn |
| LBY513 | onion\|14v1\|SRR073446X151374D1_T1 | 1059 | — | 2023 | 83.93 | glotblastn |
| LBY513 | onion\|14v1\|SRR073446X153602D1_T1 | 1060 | — | 2023 | 83.93 | glotblastn |
| LBY513 | parsley\|14v1\|BSS12K19C280141_T1 | 1061 | — | 2023 | 83.93 | glotblastn |
| LBY513 | podocarpus\|10v1\|SRR065014S0123423_T1 | 1062 | — | 2023 | 83.93 | glotblastn |
| LBY513 | quinoa\|13v2\|GE746607 | 1063 | — | 2023 | 83.93 | glotblastn |
| LBY513 | sunflower\|12v1\|CD849206 | 1064 | — | 2023 | 83.93 | glotblastn |
| LBY513 | sunflower\|12v1\|DY955910 | 1065 | — | 2023 | 83.93 | glotblastn |
| LBY513 | tabernaemontana\|11v1\|SRR098689X21237 | 1066 | — | 2023 | 83.93 | glotblastn |
| LBY513 | thalictrum\|11v1\|SRR096787X103872 | 1067 | — | 2023 | 83.93 | glotblastn |
| LBY513 | thalictrum\|11v1\|SRR096787X163408 | 1068 | — | 2023 | 83.93 | glotblastn |
| LBY513 | thellungiella_halophilum\|13v1\| | 1069 | — | 2023 | 83.93 | glotblastn |
| | BQ060414 | | | | | |
| LBY513 | thellungiella_halophilum\|13v1\| | 1070 | — | 2023 | 83.93 | glotblastn |
| | BY804276 | | | | | |
| LBY513 | thellungiella_parvulum\|13v1\|BY804276 | 1071 | — | 2023 | 83.93 | glotblastn |
| LBY513 | utricularia\|11v1\|SRR094438.117113 | 1072 | — | 2023 | 83.93 | glotblastn |
| LBY513 | utricularia\|11v1\|SRR094438.132088 | 1073 | — | 2023 | 83.93 | glotblastn |
| LBY513 | lotus\|09v1\|AI967334_P1 | 1074 | 2336 | 2023 | 83.9 | globlastp |
| LBY513 | senecio\|gb170\|SRR006592S0002910 | 1075 | 2337 | 2023 | 83.9 | globlastp |
| LBY513 | chelidonium\|11v1\|SRR084752X39898_P1 | 1076 | 2338 | 2023 | 83.6 | globlastp |
| LBY513 | maize\|15v1\|AI901354_P1 | 1077 | 2339 | 2023 | 83.1 | globlastp |
| LBY513 | onion\|14v1\|SRR073446X351073D1_P1 | 1078 | 2340 | 2023 | 82.3 | globlastp |
| LBY513 | b_juncea\|12v1\|E6ANDIZ01A1Q6U_T1 | 1079 | — | 2023 | 82.14 | glotblastn |
| LBY513 | b_juncea\|12v1\|E6ANDIZ01A49O0_T1 | 1080 | — | 2023 | 82.14 | glotblastn |
| LBY513 | b_juncea\|12v1\|E6ANDIZ01A5Y92_T1 | 1081 | — | 2023 | 82.14 | glotblastn |
| LBY513 | b_juncea\|12v1\|E6ANDIZ01AG8NQ_T1 | 1082 | — | 2023 | 82.14 | glotblastn |
| LBY513 | b_juncea\|12v1\|E6ANDIZ01AGDC7_T1 | 1083 | — | 2023 | 82.14 | glotblastn |
| LBY513 | b_juncea\|12v1\|E6ANDIZ01ANXJ2_T1 | 1084 | — | 2023 | 82.14 | glotblastn |
| LBY513 | b_juncea\|12v1\|E6ANDIZ01AZTWP_T1 | 1085 | — | 2023 | 82.14 | glotblastn |
| LBY513 | b_juncea\|12v1\|E6ANDIZ01BDY6E_T1 | 1086 | — | 2023 | 82.14 | glotblastn |
| LBY513 | b_juncea\|12v1\|E6ANDIZ01DJ9AO_T1 | 1087 | — | 2023 | 82.14 | glotblastn |
| LBY513 | b_oleracea\|14v1\|CA991805_T1 | 1088 | — | 2023 | 82.14 | glotblastn |
| LBY513 | b_oleracea\|14v1\|CN736524_T1 | 1089 | — | 2023 | 82.14 | glotblastn |
| LBY513 | b_oleracea\|14v1\|CV433061_T1 | 1090 | — | 2023 | 82.14 | glotblastn |
| LBY513 | b_rapa\|11v1\|CD812601_T1 | 1091 | — | 2023 | 82.14 | glotblastn |
| LBY513 | b_rapa\|11v1\|H74413_T1 | 1092 | — | 2023 | 82.14 | glotblastn |
| LBY513 | b_rapa\|11v1\|L47880_T1 | 1093 | — | 2023 | 82.14 | glotblastn |
| LBY513 | bupleurum\|11v1\|SRR301254.10300_T1 | 1094 | — | 2023 | 82.14 | glotblastn |
| LBY513 | bupleurum\|11v1\|SRR301254.103318_T1 | 1095 | — | 2023 | 82.14 | glotblastn |
| LBY513 | bupleurum\|11v1\|SRR301254.110759_T1 | 1096 | — | 2023 | 82.14 | glotblastn |
| LBY513 | bupleurum\|11v1\|SRR301254.125613_T1 | 1097 | — | 2023 | 82.14 | glotblastn |
| LBY513 | bupleurum\|11v1\|SRR301254.139308_T1 | 1098 | — | 2023 | 82.14 | glotblastn |
| LBY513 | bupleurum\|11v1\|SRR301254.21923_T1 | 1099 | — | 2023 | 82.14 | glotblastn |
| LBY513 | canola\|11v1\|CN726167_T1 | 1100 | — | 2023 | 82.14 | glotblastn |
| LBY513 | canola\|11v1\|CN726236_T1 | 1101 | — | 2023 | 82.14 | glotblastn |
| LBY513 | canola\|11v1\|CN735511_T1 | 1102 | — | 2023 | 82.14 | glotblastn |
| LBY513 | canola\|11v1\|CN736524_T1 | 1103 | — | 2023 | 82.14 | glotblastn |
| LBY513 | canola\|11v1\|EE469116_T1 | 1104 | — | 2023 | 82.14 | glotblastn |
| LBY513 | carrot\|14v1\|JG754096_T1 | 1105 | — | 2023 | 82.14 | glotblastn |
| LBY513 | cedrus\|11v1\|SRR065007X104561_T1 | 1106 | — | 2023 | 82.14 | glotblastn |
| LBY513 | cedrus\|11v1\|SRR065007X154702_T1 | 1107 | — | 2023 | 82.14 | glotblastn |
| LBY513 | chrysanthemum\|14v1\|SRR290491X564611D1_T1 | 1108 | — | 2023 | 82.14 | glotblastn |
| LBY513 | cirsium\|11v1\|SRR346952.1017825XX2_T1 | 1109 | — | 2023 | 82.14 | glotblastn |
| LBY513 | cleome_spinosa\|10v1\|SRR015531S0052640_T1 | 1110 | — | 2023 | 82.14 | glotblastn |
| LBY513 | euphorbia\|11v1\|DV116543_T1 | 1111 | — | 2023 | 82.14 | glotblastn |
| LBY513 | ginseng\|13v1\|SRR547977.146033_T1 | 1112 | — | 2023 | 82.14 | glotblastn |
| LBY513 | ginseng\|13v1\|SRR768790.155808_T1 | 1113 | — | 2023 | 82.14 | glotblastn |
| LBY513 | maritime_pine\|10v1\|BX248946_T1 | 1114 | — | 2023 | 82.14 | glotblastn |
| LBY513 | pine\|14v1\|AA739725_T1 | 1115 | — | 2023 | 82.14 | glotblastn |
| LBY513 | pseudotsuga\|10v1\|SRR065119S0006354 | 1116 | — | 2023 | 82.14 | glotblastn |
| LBY513 | pseudotsuga\|10v1\|SRR065119S0010186 | 1117 | — | 2023 | 82.14 | glotblastn |
| LBY513 | radish\|gb164\|EY899914 | 1118 | — | 2023 | 82.14 | glotblastn |
| LBY513 | senecio\|gb170\|SRR006592S0001401 | 1119 | — | 2023 | 82.14 | glotblastn |
| LBY513 | sequoia\|10v1\|SRR065044S0000860 | 1120 | — | 2023 | 82.14 | glotblastn |
| LBY513 | spikemoss\|gb165\|DN838456 | 1121 | — | 2023 | 82.14 | glotblastn |
| LBY513 | spikemoss\|gb165\|DN838655 | 1122 | — | 2023 | 82.14 | glotblastn |
| LBY513 | spruce\|11v1\|CO203286 | 1123 | — | 2023 | 82.14 | glotblastn |
| LBY513 | spruce\|11v1\|EF087258 | 1124 | — | 2023 | 82.14 | glotblastn |
| LBY513 | spruce\|11v1\|ES245255 | 1125 | — | 2023 | 82.14 | glotblastn |
| LBY513 | spruce\|11v1\|ES249869 | 1126 | — | 2023 | 82.14 | glotblastn |
| LBY513 | spruce\|11v1\|EX333531 | 1127 | — | 2023 | 82.14 | glotblastn |
| LBY513 | spruce\|11v1\|EX357566 | 1128 | — | 2023 | 82.14 | glotblastn |
| LBY513 | spruce\|11v1\|EX359263 | 1129 | — | 2023 | 82.14 | glotblastn |
| LBY513 | spruce\|11v1\|GE482591 | 1130 | — | 2023 | 82.14 | glotblastn |
| LBY513 | spruce\|11v1\|GT886623 | 1131 | — | 2023 | 82.14 | glotblastn |
| LBY513 | spruce\|11v1\|SRR064180X104511 | 1132 | — | 2023 | 82.14 | glotblastn |
| LBY513 | spruce\|11v1\|SRR064180X225972 | 1133 | — | 2023 | 82.14 | glotblastn |
| LBY513 | spruce\|11v1\|SRR064180X626011 | 1134 | — | 2023 | 82.14 | glotblastn |
| LBY513 | spruce\|11v1\|SRR065813X163037 | 1135 | — | 2023 | 82.14 | glotblastn |
| LBY513 | spruce\|11v1\|SRR065813X312205 | 1136 | — | 2023 | 82.14 | glotblastn |
| LBY513 | spruce\|11v1\|SRR065814X106468 | 1137 | — | 2023 | 82.14 | glotblastn |
| LBY513 | sunflower\|12v1\|EE659372 | 1138 | — | 2023 | 82.14 | glotblastn |
| LBY513 | taxus\|10v1\|SRR032523S0040793XX2 | 1139 | — | 2023 | 82.14 | glotblastn |
| LBY513 | vinca\|11v1\|SRR098690X128177 | 1140 | — | 2023 | 82.14 | glotblastn |
| LBY513 | radish\|gb164\|EV544151 | 1141 | 2341 | 2023 | 82.1 | globlastp |
| LBY513 | radish\|gb164\|EW715111 | 1142 | 2341 | 2023 | 82.1 | globlastp |
| LBY513 | radish\|gb164\|EW733092 | 1143 | 2341 | 2023 | 82.1 | globlastp |
| LBY513 | zamia\|gb166\|FD765300 | 1144 | 2342 | 2023 | 82.1 | globlastp |
| LBY513 | sarracenia\|11v1\|SRR192669.102351 | 1145 | 2343 | 2023 | 81.5 | globlastp |
| LBY513 | oat\|14v1\|SRR020741X126184D1_P1 | 1146 | 2344 | 2023 | 80.6 | globlastp |
| LBY513 | cryptomeria\|gb166\|BP176028_P1 | 1147 | 2345 | 2023 | 80.4 | globlastp |
| LBY513 | radish\|gb164\|EW733197 | 1148 | 2346 | 2023 | 80.4 | globlastp |
| LBY513 | abies\|11v2\|SRR098676X102013_T1 | 1149 | — | 2023 | 80.36 | glotblastn |
| LBY513 | abies\|11v2\|SRR098676X105245_T1 | 1150 | — | 2023 | 80.36 | glotblastn |
| LBY513 | b_juncea\|12v1\|E6ANDIZ01CILYL_T1 | 1151 | — | 2023 | 80.36 | glotblastn |
| LBY513 | b_nigra\|09v1\|GT069587_T1 | 1152 | — | 2023 | 80.36 | glotblastn |
| LBY513 | bupleurum\|11v1\|SRR301254.157571_T1 | 1153 | — | 2023 | 80.36 | glotblastn |
| LBY513 | carrot\|14v1\|BSS10K19C47534_T1 | 1154 | — | 2023 | 80.36 | glotblastn |
| LBY513 | carrot\|14v1\|BSS10K23C71135_T1 | 1155 | — | 2023 | 80.36 | glotblastn |
| LBY513 | oat\|14v1\|GO598234_T1 | 1156 | — | 2023 | 80.36 | glotblastn |
| LBY513 | sesame\|12v1\|SESI12V1236725 | 1157 | — | 2023 | 80.36 | glotblastn |
| LBY513 | sunflower\|12v1\|AJ827932 | 1158 | — | 2023 | 80.36 | glotblastn |
| LBY513 | trigonella\|11v1\|SRR066194X332593 | 1159 | — | 2023 | 80.36 | glotblastn |
| LBY513 | centaurea\|11v1\|SRR346938.298678_P1 | 1160 | 2347 | 2023 | 80.3 | globlastp |
| LBY513 | oat\|14v1\|CN819856_P1 | 1161 | 2348 | 2023 | 80.3 | globlastp |
| LYD1018 | soybean\|15v1\|GLYMA15G03430 | 1734 | 2848 | 2058 | 96.7 | globlastp |
| LYD1018 | bean\|13v1\|CA896607_P1 | 1735 | 2849 | 2058 | 94.9 | globlastp |
| LYD1018 | pigeonpea\|11v1\|CK394846_P1 | 1736 | 2850 | 2058 | 94.9 | globlastp |
| LYD1018 | liquorice\|gb171\|ES346873_P1 | 1737 | 2851 | 2058 | 94 | globlastp |
| LYD1018 | cowpea\|12v1\|FC460880_P1 | 1738 | 2852 | 2058 | 92.7 | globlastp |
| LYD1018 | lupin\|13v4\|V1NGCA410623_P1 | 1739 | 2853 | 2058 | 92.2 | globlastp |
| LYD1018 | lotus\|09v1\|AW719248_P1 | 1740 | 2854 | 2058 | 92.1 | globlastp |
| LYD1018 | chickpea\|13v2\|GR408255_P1 | 1741 | 2855 | 2058 | 91.8 | globlastp |
| LYD1018 | vicia\|14v1\|HX901847 | 1742 | 2856 | 2058 | 91.8 | globlastp |
| LYD1018 | trigonella\|11v1\|SRR066194X115389 | 1743 | 2857 | 2058 | 91.5 | globlastp |
| LYD1018 | bean\|13v1\|SRR001334X299527_P1 | 1744 | 2858 | 2058 | 91.2 | globlastp |
| LYD1018 | medicago\|13v1\|AI974677_P1 | 1745 | 2859 | 2058 | 91.2 | globlastp |
| LYD1018 | chickpea\|13v2\|AJ487038_P1 | 1746 | 2860 | 2058 | 90.9 | globlastp |
| LYD1018 | cowpea\|12v1\|FC456916_P1 | 1747 | 2861 | 2058 | 90.9 | globlastp |
| LYD1018 | clover\|14v1\|ERR351507S19XK19C309364_P1 | 1748 | 2862 | 2058 | 90.7 | globlastp |
| LYD1018 | peanut\|13v1\|CX128103_P1 | 1749 | 2863 | 2058 | 90.6 | globlastp |
| LYD1018 | clover\|14v1\|FY455356_P1 | 1750 | 2864 | 2058 | 90.1 | globlastp |
| LYD1018 | medicago\|13v1\|BE124917_P1 | 1751 | 2865 | 2058 | 90.1 | globlastp |
| LYD1018 | trigonella\|11v1\|SRR066194X163347 | 1752 | 2866 | 2058 | 90.1 | globlastp |
| LYD1018 | soybean\|15v1\|GLYMA11G13580 | 1753 | 2867 | 2058 | 89.8 | globlastp |
| LYD1018 | clover\|14v1\|BB912396_P1 | 1754 | 2868 | 2058 | 89.7 | globlastp |
| LYD1018 | clover\|14v1\|FY456674_P1 | 1755 | 2869 | 2058 | 89.4 | globlastp |
| LYD1018 | clover\|14v1\|BB903531_P1 | 1756 | 2870 | 2058 | 89.1 | globlastp |
| LYD1018 | pigeonpea\|11v1\|GW355496_P1 | 1757 | 2871 | 2058 | 87.9 | globlastp |
| LYD1018 | prunus\|10v1\|CB818793 | 1758 | 2872 | 2058 | 87.9 | globlastp |
| LYD1018 | humulus\|11v1\|ES653530XX1_P1 | 1759 | 2873 | 2058 | 87.7 | globlastp |
| LYD1018 | clementine\|11v1\|CB292881_P1 | 1760 | 2874 | 2058 | 87.6 | globlastp |
| LYD1018 | chestnut\|14v1\|SRR006295X101083D1_P1 | 1761 | 2875 | 2058 | 87 | globlastp |
| LYD1018 | nicotiana_benthamiana\|12v1\|AB083684_P1 | 1762 | 2876 | 2058 | 87 | globlastp |
| LYD1018 | tabernaemontana\|11v1\|SRR098689X103002 | 1763 | 2877 | 2058 | 87 | globlastp |
| LYD1018 | vinca\|11v1\|SRR098690X121542 | 1764 | 2878 | 2058 | 87 | globlastp |
| LYD1018 | amsonia\|11v1\|SRR098688X101657_P1 | 1765 | 2879 | 2058 | 86.7 | globlastp |
| LYD1018 | prunus_mume\|13v1\|CB818793 | 1766 | 2880 | 2058 | 86.7 | globlastp |
| LYD1018 | cacao\|13v1\|CU474597_P1 | 1767 | 2881 | 2058 | 86.4 | globlastp |
| LYD1018 | catharanthus\|11v1\|EG558550_P1 | 1768 | 2882 | 2058 | 86.4 | globlastp |
| LYD1018 | ipomoea_nil\|10v1\|BJ565779_P1 | 1769 | 2883 | 2058 | 86.4 | globlastp |
| LYD1018 | lupin\|13v4\|VINGGBUXD8B02F4HJE_P1 | 1770 | 2884 | 2058 | 86.4 | globlastp |
| LYD1018 | soybean\|15v1\|GLYMA12G05580 | 1771 | 2885 | 2058 | 86.2 | globlastp |
| LYD1018 | beech\|11v1\|SRR006293.18962_P1 | 1772 | 2886 | 2058 | 85.9 | globlastp |
| LYD1018 | eucalyptus\|11v2\|CD669080_P1 | 1773 | 2887 | 2058 | 85.8 | globlastp |
| LYD1018 | pepper\|14v1\|BM060004_P1 | 1774 | 2888 | 2058 | 85.8 | globlastp |
| LYD1018 | petunia\|gb171\|CV294324_P1 | 1775 | 2889 | 2058 | 85.8 | globlastp |
| LYD1018 | tobacco\|gb162\|AB083684 | 1776 | 2890 | 2058 | 85.8 | globlastp |
| LYD1018 | castorbean\|14v2\|T15141_P1 | 1777 | 2891 | 2058 | 85.5 | globlastp |
| LYD1018 | grape\|13v1\|GSVIVT01010790001_P1 | 1778 | 2892 | 2058 | 85.5 | globlastp |
| LYD1018 | poplar\|13v1\|AI162647_P1 | 1779 | 2893 | 2058 | 85.2 | globlastp |
| LYD1018 | rose\|12v1\|BI977903 | 1780 | 2894 | 2058 | 84.9 | globlastp |
| LYD1018 | strawberry\|11v1\|CO817012 | 1781 | 2895 | 2058 | 84.9 | globlastp |
| LYD1018 | vinca\|11v1\|SRR098690X112745 | 1782 | 2896 | 2058 | 84.9 | globlastp |
| LYD1018 | cotton\|11v1\|AI725468_P1 | 1783 | 2897 | 2058 | 84.6 | globlastp |
| LYD1018 | flax\|11v1\|EH791615_P1 | 1784 | 2898 | 2058 | 84.6 | globlastp |
| LYD1018 | gossypium_raimondii\|13v1\|AI725468_P1 | 1785 | 2897 | 2058 | 84.6 | globlastp |
| LYD1018 | cotton\|11v1\|BE054627_P1 | 1786 | 2899 | 2058 | 84.3 | globlastp |
| LYD1018 | lupin\|13v4\|SRR520491.1067001_P1 | 1787 | 2900 | 2058 | 84.3 | globlastp |
| LYD1018 | potato\|10v1\|BF153173_P1 | 1788 | 2901 | 2058 | 84.3 | globlastp |
| LYD1018 | solanum_phureja\|09v1\|SPHZ12823 | 1789 | 2901 | 2058 | 84.3 | globlastp |
| LYD1018 | cassava\|09v1\|CK642765_P1 | 1790 | 2902 | 2058 | 84.1 | globlastp |
| LYD1018 | cannabis\|12v1\|GR221102_P1 | 1791 | 2903 | 2058 | 84 | globlastp |
| LYD1018 | gossypium_raimondii\|13v1\|BE054627_P1 | 1792 | 2904 | 2058 | 84 | globlastp |
| LYD1018 | kiwi\|gb166\|FG396871_P1 | 1793 | 2905 | 2058 | 84 | globlastp |
| LYD1018 | tomato\|13v1\|LEU64818 | 1794 | 2906 | 2058 | 84 | globlastp |
| LYD1018 | utricularia\|11v1\|SRR094438.104231 | 1795 | 2907 | 2058 | 84 | globlastp |
| LYD1018 | tripterygium\|11v1\|SRR098677X105232 | 1796 | 2908 | 2058 | 83.7 | globlastp |
| LYD1018 | flax\|11v1\|CV478460_P1 | 1797 | 2909 | 2058 | 83.5 | globlastp |
| LYD1018 | flax\|11v1\|GW867688_P1 | 1798 | 2910 | 2058 | 83.5 | globlastp |
| LYD1018 | cotton\|11v1\|CA993119_P1 | 1799 | 2911 | 2058 | 83.4 | globlastp |
| LYD1018 | cyclamen\|14v1\|B14ROOTK19C145662_P1 | 1800 | 2912 | 2058 | 83.4 | globlastp |
| LYD1018 | valeriana\|11v1\|SRR099039X100392 | 1801 | — | 2058 | 83.38 | glotblastn |
| LYD1018 | b_oleracea\|14v1\|EE523644_P1 | 1802 | 2913 | 2058 | 83.1 | globlastp |
| LYD1018 | phyla\|11v2\|SRR099035X13519_P1 | 1803 | 2914 | 2058 | 83.1 | globlastp |
| LYD1018 | thellungiella_halophilum\|13v1\| | 1804 | 2915 | 2058 | 83.1 | globlastp |
| | BY819937 | | | | | |
| LYD1018 | arabidopsis_lyrata\|13v1\|F14207_P1 | 1805 | 2916 | 2058 | 82.8 | globlastp |
| LYD1018 | arabidopsis\|13v2\|AT3G59480_P1 | 1806 | 2917 | 2058 | 82.8 | globlastp |
| LYD1018 | olea\|13v1\|SRR014463X10191D1_P1 | 1807 | 2918 | 2058 | 82.8 | globlastp |
| LYD1018 | echinacea\|13v1\|EPURP13V11035019_P1 | 1808 | 2919 | 2058 | 82.6 | globlastp |
| LYD1018 | arabidopsis_lyrata\|13v1\|F15320_P1 | 1809 | 2920 | 2058 | 82.5 | globlastp |
| LYD1018 | sesame\|12v1\|SESI12V1401733 | 1810 | 2921 | 2058 | 82.5 | globlastp |
| LYD1018 | watermelon\|11v1\|AM713748 | 1811 | 2922 | 2058 | 82.5 | globlastp |
| LYD1018 | b_rapa\|11v1\|CX194871_P1 | 1812 | 2923 | 2058 | 82.2 | globlastp |
| LYD1018 | canola\|11v1\|ES900274_P1 | 1813 | 2924 | 2058 | 82.2 | globlastp |
| LYD1018 | petunia\|gb171\|FN008478_P1 | 1814 | 2925 | 2058 | 82.2 | globlastp |
| LYD1018 | poplar\|13v1\|BI069335_P1 | 1815 | 2926 | 2058 | 82.2 | globlastp |
| LYD1018 | tripterygium\|11v1\|SRR098677X102359 | 1816 | 2927 | 2058 | 82.2 | globlastp |
| LYD1018 | canola\|11v1\|FG574532_T1 | 1817 | — | 2058 | 82.18 | glotblastn |
| LYD1018 | b_oleracea\|14v1\|EE519136_P1 | 1818 | 2928 | 2058 | 82 | globlastp |
| LYD1018 | beet\|12v1\|BVU37838_P1 | 1819 | 2929 | 2058 | 82 | globlastp |
| LYD1018 | euonymus\|11v1\|SRR070038X115006_P1 | 1820 | 2930 | 2058 | 82 | globlastp |
| LYD1018 | sunflower\|12v1\|CD852555 | 1821 | 2931 | 2058 | 82 | globlastp |
| LYD1018 | arabidopsis\|13v2\|AT2G31390_P1 | 1822 | 2932 | 2058 | 81.9 | globlastp |
| LYD1018 | arnica\|11v1\|SRR099034X115239_P1 | 1823 | 2933 | 2058 | 81.9 | globlastp |
| LYD1018 | b_oleracea\|14v1\|ES958654_P1 | 1824 | 2934 | 2058 | 81.9 | globlastp |
| LYD1018 | ginseng\|13v1\|GR874714_P1 | 1825 | 2935 | 2058 | 81.9 | globlastp |
| LYD1018 | quinoa\|13v2\|SRR315568X140769 | 1826 | — | 2058 | 81.87 | glotblastn |
| LYD1018 | b_rapa\|11v1\|ES269654_P1 | 1827 | 2936 | 2058 | 81.7 | globlastp |
| LYD1018 | euphorbia\|11v1\|SRR098678X105448_P1 | 1828 | 2937 | 2058 | 81.7 | globlastp |
| LYD1018 | b_juncea\|12v1\|E6ANDIZ01B0F4D_P1 | 1829 | 2938 | 2058 | 81.6 | globlastp |
| LYD1018 | b_oleracea\|14v1\|CN725733_P1 | 1830 | 2939 | 2058 | 81.6 | globlastp |
| LYD1018 | b_rapa\|11v1\|CD821072_P1 | 1831 | 2940 | 2058 | 81.6 | globlastp |
| LYD1018 | canola\|11v1\|CN725733_P1 | 1832 | 2940 | 2058 | 81.6 | globlastp |
| LYD1018 | canola\|11v1\|DY020630_P1 | 1833 | 2941 | 2058 | 81.6 | globlastp |
| LYD1018 | ginseng\|13v1\|HS079228_P1 | 1834 | 2942 | 2058 | 81.6 | globlastp |
| LYD1018 | ginseng\|13v1\|SRR547985.434236_P1 | 1835 | 2943 | 2058 | 81.6 | globlastp |
| LYD1018 | orobanche\|10v1\|SRR023189S0010131_P1 | 1836 | 2944 | 2058 | 81.6 | globlastp |
| LYD1018 | radish\|gb164\|EV566755 | 1837 | 2945 | 2058 | 81.6 | globlastp |
| LYD1018 | sunflower\|12v1\|CF077091 | 1838 | — | 2058 | 81.57 | glotblastn |
| LYD1018 | amaranthus\|13v1\|SRR039408X1279D1_T1 | 1839 | — | 2058 | 81.38 | glotblastn |
| LYD1018 | b_rapa\|11v1\|CD821444_P1 | 1840 | 2946 | 2058 | 81.3 | globlastp |
| LYD1018 | ginseng\|13v1\|CN847477_P1 | 1841 | 2947 | 2058 | 81.3 | globlastp |
| LYD1018 | nasturtium\|11v1\|SRR032558.129383_P1 | 1842 | 2948 | 2058 | 81.3 | globlastp |
| LYD1018 | silene\|11v1\|SRR096785X102684 | 1843 | 2949 | 2058 | 81.3 | globlastp |
| LYD1018 | thellungiella_halophilum\|13v1\| | 1844 | 2950 | 2058 | 81.3 | globlastp |
| | EE683435 | | | | | |
| LYD1018 | thellungiella_parvulum\|13v1\|BY819937 | 1845 | 2951 | 2058 | 81.3 | globlastp |
| LYD1018 | thellungiella_parvulum\|13v1\|EE683435 | 1846 | 2952 | 2058 | 81.3 | globlastp |
| LYD1018 | ambrosia\|11v1\|GR935614_T1 | 1847 | — | 2058 | 81.27 | glotblastn |
| LYD1018 | canola\|11v1\|EV148969_T1 | 1848 | — | 2058 | 81.27 | glotblastn |
| LYD1018 | quinoa\|13v2\|CQUI13V1207611 | 1849 | — | 2058 | 81.27 | glotblastn |
| LYD1018 | euonymus\|11v1\|SRR070038X151061_P1 | 1850 | 2953 | 2058 | 81.2 | globlastp |
| LYD1018 | quinoa\|13v2\|SRR315568X225240 | 1851 | — | 2058 | 81.02 | glotblastn |
| LYD1018 | b_oleracea\|14v1\|AM059314_P1 | 1852 | 2954 | 2058 | 81 | globlastp |
| LYD1018 | canola\|11v1\|EV129496_P1 | 1853 | 2954 | 2058 | 81 | globlastp |
| LYD1018 | cichorium\|14v1\|DT214100_P1 | 1854 | 2955 | 2058 | 81 | globlastp |
| LYD1018 | cichorium\|14v1\|EH704449_P1 | 1855 | 2955 | 2058 | 81 | globlastp |
| LYD1018 | melon\|10v1\|AM713748_P1 | 1856 | 2956 | 2058 | 81 | globlastp |
| LYD1018 | spinach\|15v1\|SO15V1K29C57993T1 | 1857 | 2957 | 2058 | 81 | globlastp |
| LYD1018 | triphysaria\|13v1\|BM356546 | 1858 | 2958 | 2058 | 81 | globlastp |
| LYD1018 | triphysaria\|13v1\|EX997212 | 1859 | 2959 | 2058 | 81 | globlastp |
| LYD1018 | triphysaria\|13v1\|EY010795 | 1860 | 2958 | 2058 | 81 | globlastp |
| LYD1018 | rosmarinus\|15v1\|SRR290363X100978D1 | 1861 | — | 2058 | 80.97 | glotblastn |
| LYD1018 | carrot\|14v1\|BSS10K19C100659_P1 | 1862 | 2960 | 2058 | 80.7 | globlastp |
| LYD1018 | triphysaria\|13v1\|DR172639 | 1863 | 2961 | 2058 | 80.7 | globlastp |
| LYD1018 | conyza\|15v1\|BSS2K19C226818T1_T1 | 1864 | — | 2058 | 80.66 | glotblastn |
| LYD1018 | b_oleracea\|14v1\|BG543479_T1 | 1865 | — | 2058 | 80.6 | glotblastn |
| LYD1018 | canola\|11v1\|ES958654_P1 | 1866 | 2962 | 2058 | 80.5 | globlastp |
| LYD1018 | b_rapa\|11v1\|BG543479_P1 | 1867 | 2963 | 2058 | 80.4 | globlastp |
| LYD1018 | b_rapa\|11v1\|BRA015468_P1 | 1868 | 2964 | 2058 | 80.4 | globlastp |
| LYD1018 | canola\|11v1\|CN831032_P1 | 1869 | 2963 | 2058 | 80.4 | globlastp |
| LYD1018 | canola\|11v1\|DY025567_P1 | 1870 | 2963 | 2058 | 80.4 | globlastp |
| LYD1018 | centaurea\|11v1\|EH744998_P1 | 1871 | 2965 | 2058 | 80.4 | globlastp |
| LYD1018 | cucumber\|09v1\|DN910921_P1 | 1872 | 2966 | 2058 | 80.4 | globlastp |
| LYD1018 | cynara\|gb167\|GE580887_P1 | 1873 | 2967 | 2058 | 80.4 | globlastp |
| LYD1018 | dandelion\|10v1\|DY819484_P1 | 1874 | 2968 | 2058 | 80.4 | globlastp |
| LYD1018 | lettuce\|12v1\|DW043680_P1 | 1875 | 2969 | 2058 | 80.4 | globlastp |
| LYD1018 | monkeyflower\|12v1\|CV515267_P1 | 1876 | 2970 | 2058 | 80.4 | globlastp |
| LYD1018 | oak\|10v1\|FP031209_P1 | 1877 | 2971 | 2058 | 80.4 | globlastp |
| LYD1018 | plantago\|11v2\|SRR066373X101479_P1 | 1878 | 2972 | 2058 | 80.4 | globlastp |
| LYD1018 | triphysaria\|13v1\|EY173146 | 1879 | 2973 | 2058 | 80.4 | globlastp |
| LYD1018 | b_oleracea\|14v1\|BO14V1PRD016363_T1 | 1880 | — | 2058 | 80.36 | glotblastn |
| LYD1018 | monkeyflower\|12v1\|GO984631_P1 | 1881 | 2974 | 2058 | 80.2 | globlastp |
| LYD1018 | monkeyflower\|12v1\|SRR037227.118113_P1 | 1882 | 2975 | 2058 | 80.2 | globlastp |
| LYD1018 | eschscholzia\|11v1\|SRR014116.116327_P1 | 1883 | 2976 | 2058 | 80.1 | globlastp |
| LYD1018 | primula\|11v1\|SRR098679X135201_P1 | 1884 | 2977 | 2058 | 80.1 | globlastp |
| LYD1018 | arabidopsis\|13v2\|AT1G06030_T1 | 1885 | — | 2058 | 80.06 | glotblastn |
| LYD1018 | parsley\|14v1\|BSS12K19C1009954_T1 | 1886 | — | 2058 | 80.06 | glotblastn |
| LYD1018 | platanus\|11v1\|SRR096786X104685_T1 | 1887 | — | 2058 | 80.06 | glotblastn |
| LYD1018 | strawberry\|11v1\|CRPFV010846 | 1888 | — | 2058 | 80.06 | glotblastn |
| LYD1018 | canola\|11v1\|SRR019558.4534_T1 | 1889 | — | 2058 | 80 | glotblastn |
| LBY512 | switchgrass\|12v1\|FL696171 | 1979 | 3048 | 3041 | 94 | globlastp |
| LBY512 | sorghum\|13v2\|CD233358 | 1980 | 3049 | 3041 | 92.6 | globlastp |
| LBY512 | maize\|15v1\|AW181169_P1 | 1981 | 3050 | 3041 | 88.3 | globlastp |
| LBY512 | switchgrass\|12v1\|FL697361 | 1968 | 3040 | 3041 | 88 | globlastp |
| LBY512 | rice\|15v1\|BI806657 | 1982 | 3051 | 3041 | 83.7 | globlastp |
| LBY512 | switchgrass\|12v1\|FL723961 | 1983 | 3052 | 3041 | 83.1 | globlastp |
| LBY512 | brachypodium\|14v1\|GT765241_P1 | 1984 | 3053 | 3041 | 82.6 | globlastp |
| LBY512 | maize\|15v1\|BM895989_P1 | 1985 | 3060 | 3041 | 82.5 | globlastp |
| LBY512 | aegilops\|16v1\|AET16V1CRP002315_T1 | 1969 | — | 3041 | 81.84 | glotblastn |
| LBY512 | leymus\|gb166\|EG378151_P1 | 1986 | 3054 | 3041 | 81.7 | globlastp |
| LBY512 | barley\|15v2\|AJ467312_P1 | 1987 | 3055 | 3041 | 81.7 | globlastp |
| LBY512 | rye\|12v1\|BE586843 | 1988 | 3056 | 3041 | 81.4 | globlastp |
| LBY512 | maize\|15v1\|AW455713_P1 | 1989 | 3057 | 3041 | 81.1 | globlastp |
| LBY512 | wheat\|12v3\|BE586018 | 1990 | 3058 | 3041 | 80.8 | globlastp |
| LYD1001 | arabidopsis_lyrata\|13v1\|BG459179_P1 | 1418 | 2558 | 2041 | 97.1 | globlastp |
| LYD1001 | thellungiella_halophilum\|13v1\| | 1419 | 2559 | 2041 | 91.2 | globlastp |
| | EHJGI11028155 | | | | | |
| LYD1001 | b_oleracea\|14v1\|ES994028_P1 | 1420 | 2560 | 2041 | 89.7 | globlastp |
| LYD1001 | b_rapa\|11v1\|CX269934_P1 | 1421 | 2561 | 2041 | 89.1 | globlastp |
| LYD1001 | b_oleracea\|14v1\|BQ791528_P1 | 1422 | 2562 | 2041 | 88.2 | globlastp |
| LYD1001 | canola\|11v1\|ES963848_P1 | 1423 | 2563 | 2041 | 88.2 | globlastp |
| LYD1001 | canola\|11v1\|EE554947_T1 | 1424 | — | 2041 | 87.94 | glotblastn |
| LYD1001 | canola\|11v1\|SRR329661.131355_T1 | 1425 | — | 2041 | 87.65 | glotblastn |
| LYD1001 | b_rapa\|11v1\|BQ791528_P1 | 1426 | 2564 | 2041 | 87.4 | globlastp |
| LYD1001 | thellungiella_parvulum\|13v1\|EP13V1CRP012236 | 1427 | 2565 | 2041 | 85 | globlastp |
| LBY496 | soybean\|15v1\|GLYMA02G44860T2 | 348 | 2217 | 2012 | 90.3 | globlastp |
| LBY496 | bean\|13v1\|CA916562_P1 | 349 | 2218 | 2012 | 89.9 | globlastp |
| LBY496 | pigeonpea\|11v1\|SRR054580X377616_P1 | 350 | 2219 | 2012 | 85.4 | globlastp |
| LBY469 | gossypium_raimondii\|13v1\|DN802288_P1 | 213 | 1997 | 1997 | 100 | globlastp |
| LBY469 | cacao\|13v1\|CU572451_P1 | 214 | 2095 | 1997 | 93.8 | globlastp |
| LBY469 | pteridium\|11v1\|SRR043594X149525 | 215 | 2096 | 1997 | 93.5 | globlastp |
| LBY469 | gossypium_raimondii\|13v1\|DN801949_P1 | 216 | 2097 | 1997 | 91.5 | globlastp |
| LBY469 | cotton\|11v1\|CO490938_P1 | 217 | 2098 | 1997 | 91.2 | globlastp |
| LBY469 | gossypium_raimondii\|13v1\|DW507982_P1 | 218 | 2099 | 1997 | 91.2 | globlastp |
| LBY469 | cotton\|11v1\|CO493077_P1 | 219 | 2100 | 1997 | 90.6 | globlastp |
| LBY469 | clementine\|11v1\|JGICC031239_P1 | 220 | 2101 | 1997 | 88.1 | globlastp |
| LBY469 | prunus_mume\|13v1\|SRR345675.74113 | 221 | 2102 | 1997 | 87.7 | globlastp |
| LBY469 | castorbean\|14v2\|XM_002529891_P1 | 222 | 2103 | 1997 | 87.5 | globlastp |
| LBY469 | prunus\|10v1\|CN897829 | 223 | 2104 | 1997 | 87.4 | globlastp |
| LBY469 | poplar\|13v1\|CF232795_P1 | 224 | 2105 | 1997 | 86.9 | globlastp |
| LBY469 | grape\|13v1\|GSVIVT01025202001_P1 | 225 | 2106 | 1997 | 86.8 | globlastp |
| LBY469 | poplar\|13v1\|AI166298_P1 | 226 | 2107 | 1997 | 86.6 | globlastp |
| LBY469 | apple\|11v1\|CN897829_P1 | 227 | 2108 | 1997 | 86.3 | globlastp |
| LBY469 | apple\|11v1\|CN898315_P1 | 228 | 2109 | 1997 | 86 | globlastp |
| LBY469 | cassava\|09v1\|JGICASSAVA5980VALIDM1_P1 | 229 | 2110 | 1997 | 85.7 | globlastp |
| LBY469 | pigeonpea\|11v1\|SRR054580X10370_P1 | 230 | 2111 | 1997 | 85.7 | globlastp |
| LBY469 | cassava\|09v1\|JGICASSAVA35450VALIDM1_P1 | 231 | 2112 | 1997 | 85.4 | globlastp |
| LBY469 | papaya\|gb165\|EX262040_P1 | 232 | 2113 | 1997 | 85.4 | globlastp |
| LBY469 | soybean\|15v1\|GLYMA12G29790T2 | 233 | 2114 | 1997 | 85.4 | globlastp |
| LBY469 | lupin\|13v4\|V1NGLUP13V1X1191645_P1 | 234 | 2115 | 1997 | 85.3 | globlastp |
| LBY469 | sunflower\|12v1\|BU027780 | 235 | 2116 | 1997 | 85.2 | globlastp |
| LBY469 | clover\|14v1\|ERR351507S19XK19C705332_P1 | 236 | 2117 | 1997 | 85.1 | globlastp |
| LBY469 | oak\|10v1\|FP033993_P1 | 237 | 2118 | 1997 | 85.1 | globlastp |
| LBY469 | centaurea\|11v1\|EH715623_P1 | 238 | 2119 | 1997 | 84.9 | globlastp |
| LBY469 | cirsium\|11v1\|SRR346952.106276_P1 | 239 | 2120 | 1997 | 84.5 | globlastp |
| LBY469 | clover\|14v1\|ERR351508S19XK19C361512_P1 | 240 | 2121 | 1997 | 84.5 | globlastp |
| LBY469 | lupin\|13v4\|V1NGGBUXD8B02GQ1DE_P1 | 241 | 2122 | 1997 | 84.5 | globlastp |
| LBY469 | medicago\|13v1\|AW225625_P1 | 242 | 2123 | 1997 | 84.5 | globlastp |
| LBY469 | soybean\|15v1\|GLYMA13G40000 | 243 | 2124 | 1997 | 84.5 | globlastp |
| LBY469 | beech\|11v1\|SRR006293.17903_T1 | 244 | — | 1997 | 84.5 | glotblastn |
| LBY469 | strawberry\|11v1\|SRR034860S0003237 | 245 | 2125 | 1997 | 84.4 | globlastp |
| LBY469 | cirsium\|11v1\|SRR346952.102605_P1 | 246 | 2126 | 1997 | 84.3 | globlastp |
| LBY469 | cucumber\|09v1\|AM721974_P1 | 247 | 2127 | 1997 | 84.3 | globlastp |
| LBY469 | safflower\|gb162\|EL379451 | 248 | 2128 | 1997 | 84.3 | globlastp |
| LBY469 | watermelon\|11v1\|AM721974 | 249 | 2129 | 1997 | 84.3 | globlastp |
| LBY469 | conyza\|15v1\|BSS1K23S029360T1_P1 | 250 | 2130 | 1997 | 84.1 | globlastp |
| LBY469 | bean\|13v1\|HO803311_P1 | 251 | 2131 | 1997 | 84 | globlastp |
| LBY469 | echinacea\|13v1\|EPURP13V11134053_P1 | 252 | 2132 | 1997 | 84 | globlastp |
| LBY469 | aquilegia\|10v2\|DR917634_P1 | 253 | 2133 | 1997 | 83.9 | globlastp |
| LBY469 | chickpea\|13v2\|FE668706_P1 | 254 | 2134 | 1997 | 83.6 | globlastp |
| LBY469 | cichorium\|14v1\|EL355680_P1 | 255 | 2135 | 1997 | 83.2 | globlastp |
| LBY469 | chrysanthemum\|14v1\|SRR290491X298183D1_P1 | 256 | 2136 | 1997 | 83.1 | globlastp |
| LBY469 | tomato\|13v1\|BG132246 | 257 | 2137 | 1997 | 83.1 | globlastp |
| LBY469 | chrysanthemum\|14v1\|SRR290491X204473D1_P1 | 258 | 2138 | 1997 | 82.8 | globlastp |
| LBY469 | euonymus\|11v1\|SRR070038X295120_P1 | 259 | 2139 | 1997 | 82.8 | globlastp |
| LBY469 | euphorbia\|11v1\|DV155239XX1_P1 | 260 | 2140 | 1997 | 82.8 | globlastp |
| LBY469 | nicotiana_benthamiana\|12v1\|NB12v1CRP021742_P1 | 261 | 2141 | 1997 | 82.8 | globlastp |
| LBY469 | poppy\|11v1\|SRR030259.201506_P1 | 262 | 2142 | 1997 | 82.8 | globlastp |
| LBY469 | parsley\|14v1\|BSS12K19C1087392_P1 | 263 | 2143 | 1997 | 82.7 | globlastp |
| LBY469 | poppy\|11v1\|SRR030259.11707_P1 | 264 | 2144 | 1997 | 82.6 | globlastp |
| LBY469 | chestnut\|14v1\|SRR006295X117197D1_T1 | 265 | — | 1997 | 82.35 | glotblastn |
| LBY469 | carrot\|14v1\|BSS11K19C176715_P1 | 266 | 2145 | 1997 | 82.2 | globlastp |
| LBY469 | solanum_phureja\|09v1\|SPHBG132246 | 267 | 2146 | 1997 | 82.2 | globlastp |
| LBY469 | eucalyptus\|11v2\|CD668431_P1 | 268 | 2147 | 1997 | 82.1 | globlastp |
| LBY469 | heritiera\|10v1\|SRR005795S0010059_T1 | 269 | — | 1997 | 82.06 | glotblastn |
| LBY469 | ambrosia\|11v1\|SRR346935.582632_T1 | 270 | — | 1997 | 82.03 | glotblastn |
| LBY469 | poppy\|11v1\|SRR096789.105626_P1 | 271 | 2148 | 1997 | 81.5 | globlastp |
| LBY469 | echinacea\|13v1\|EPURP13V11081591_P1 | 272 | 2149 | 1997 | 81.2 | globlastp |
| LBY469 | poppy\|11v1\|SRR096789.104888_P1 | 273 | 2150 | 1997 | 81.2 | globlastp |
| LBY469 | medicago\|13v1\|XM_003597214_P1 | 274 | 2151 | 1997 | 81.1 | globlastp |
| LBY469 | orobanche\|10v1\|SRR023189S0018036_P1 | 275 | 2152 | 1997 | 81 | globlastp |
| LBY469 | sunflower\|12v1\|EE606145 | 276 | 2153 | 1997 | 80.9 | globlastp |
| LBY469 | ginseng\|13v1\|SRR547984.141232_P1 | 277 | 2154 | 1997 | 80.7 | globlastp |
| LBY469 | solanum_phureja\|09v1\|SPHCRPSP013080 | 278 | 2155 | 1997 | 80.7 | globlastp |
| LBY469 | b_oleracea\|14v1\|EV128890_P1 | 279 | 2156 | 1997 | 80.4 | globlastp |
| LBY469 | b_rapa\|11v1\|CX188376_P1 | 280 | 2157 | 1997 | 80.4 | globlastp |
| LBY469 | pepper\|14v1\|BM067871_P1 | 281 | 2158 | 1997 | 80.2 | globlastp |
| LBY469 | nicotiana_benthamiana\|12v1\|EB447659_P1 | 282 | 2159 | 1997 | 80.1 | globlastp |
| LBY522 | sorghum\|13v2\|AW282859 | 1195 | 2381 | 2030 | 89.6 | globlastp |
| LBY522 | sugarcane\|10v1\|CA072993 | 1196 | 2381 | 2030 | 89.6 | globlastp |
| LBY522 | switchgrass\|12v1\|FE646053 | 1197 | 2382 | 2030 | 89.2 | globlastp |
| LBY522 | foxtail_millet\|14v1\|JK551107_P1 | 1198 | 2383 | 2030 | 88.8 | globlastp |
| LBY522 | switchgrass\|12v1\|FL831949 | 1199 | 2384 | 2030 | 88.5 | globlastp |
| LBY522 | maize\|15v1\|AI770819_P1 | 1200 | 2385 | 2030 | 88.1 | globlastp |
| LBY522 | maize\|15v1\|AI670272_P1 | 1201 | 2386 | 2030 | 86.9 | globlastp |
| LBY522 | brachypodium\|14v1\|GT776615_P1 | 1202 | 2387 | 2030 | 85.1 | globlastp |
| LBY522 | oat\|14v1\|CN816907_P1 | 1203 | 2388 | 2030 | 85 | globlastp |
| LBY522 | wheat\|12v3\|BQ483894 | 1204 | 2389 | 2030 | 84.8 | globlastp |
| LBY522 | aegilops\|16v1\|AET16V1CRP024001_P1 | 1205 | 2390 | 2030 | 84.7 | globlastp |
| LBY522 | rye\|12v1\|DRR001012.120642 | 1206 | 2391 | 2030 | 84.4 | globlastp |
| LBY522 | oat\|14v1\|SRR020741X154660D1_P1 | 1207 | 2392 | 2030 | 84 | globlastp |
| LBY522 | aegilops\|16v1\|AET16V1CRP050593_P1 | 1208 | 2393 | 2030 | 83.4 | globlastp |
| LBY522 | switchgrass\|12v1\|FL737054_P1 | 1209 | 2394 | 2030 | 83.3 | globlastp |
| LBY522 | foxtail_millet\|14v1\|JK568405_P1 | 1210 | 2395 | 2030 | 82.9 | globlastp |
| LBY522 | brachypodium\|14v1\|GT786191_P1 | 1211 | 2396 | 2030 | 82.9 | globlastp |
| LBY522 | echinochloa\|14v1\|SRR522894X102015D1_P1 | 1212 | 2397 | 2030 | 82.6 | globlastp |
| LBY522 | rye\|12v1\|DRR001012.119735_P1 | 1213 | 2398 | 2030 | 82.6 | globlastp |
| LBY522 | wheat\|12v3\|BE414205_P1 | 1214 | 2398 | 2030 | 82.6 | globlastp |
| LBY522 | barley\|15v2\|BI955754_P1 | 1215 | 2399 | 2030 | 82.6 | globlastp |
| LBY522 | cenchrus\|13v1\|EB655448_P1 | 1216 | 2400 | 2030 | 82.5 | globlastp |
| LBY522 | millet\|10v1\|EVO454PM013138_P1 | 1217 | 2401 | 2030 | 82.5 | globlastp |
| LBY522 | switchgrass\|12v1\|FL723709_P1 | 1218 | 2402 | 2030 | 82.4 | globlastp |
| LBY522 | echinochloa\|14v1\|ECHC14V1K19C589016_P1 | 1219 | 2403 | 2030 | 82.1 | globlastp |
| LBY522 | echinochloa\|14v1\|SRR522894X163157D1_P1 | 1220 | 2404 | 2030 | 82.1 | globlastp |
| LBY522 | sorghum\|13v2\|AW923745_P1 | 1221 | 2405 | 2030 | 82.1 | globlastp |
| LBY522 | sugarcane\|10v1\|CA068748_P1 | 1222 | 2405 | 2030 | 82.1 | globlastp |
| LBY522 | barley\|15v2\|BE603170_P1 | 1223 | 2406 | 2030 | 81.9 | globlastp |
| LBY522 | maize\|15v1\|AI714737_P1 | 1224 | 2407 | 2030 | 81.3 | globlastp |
| LBY522 | banana\|14v1\|FF560065_P1 | 1225 | 2408 | 2030 | 80.5 | globlastp |
| LBY522 | maize\|15v1\|BQ163906_P1 | 1226 | 2409 | 2030 | 80.5 | globlastp |
| LBY508 | aegilops\|16v1\|AET16V1CRP043714_P1 | 414 | 2269 | 2021 | 99.4 | globlastp |
| LBY508 | rye\|12v1\|DRR001012.156893 | 415 | 2270 | 2021 | 99.2 | globlastp |
| LBY508 | wheat\|12v3\|BF475131 | 416 | 2271 | 2021 | 98.6 | globlastp |
| LBY508 | wheat\|12v3\|BE419241 | 417 | 2272 | 2021 | 97 | globlastp |
| LBY508 | oat\|14v1\|SRR020741X270190D1_P1 | 418 | 2273 | 2021 | 96.5 | globlastp |
| LBY508 | oat\|14v1\|CN814967_P1 | 419 | 2274 | 2021 | 96.3 | globlastp |
| LBY508 | brachypodium\|14v1\|DV487889_P1 | 420 | 2275 | 2021 | 95.7 | globlastp |
| LBY508 | oat\|14v1\|SRR020741X18398D1_T1 | 421 | — | 2021 | 95.53 | glotblastn |
| LBY508 | rye\|12v1\|DRR001012.107395 | 422 | 2276 | 2021 | 94.1 | globlastp |
| LBY508 | rice\|15v1\|AI978507 | 423 | 2277 | 2021 | 93.1 | globlastp |
| LBY508 | foxtail_millet\|14v1\|EC612770_P1 | 424 | 2278 | 2021 | 91.9 | globlastp |
| LBY508 | wheat\|12v3\|BE497801 | 425 | 2279 | 2021 | 91.9 | globlastp |
| LBY508 | switchgrass\|12v1\|FE608411 | 426 | 2280 | 2021 | 91.5 | globlastp |
| LBY508 | sugarcane\|10v1\|CA091538 | 427 | 2281 | 2021 | 91.1 | globlastp |
| LBY508 | echinochloa\|14v1\|SRR522894X101166D1_P1 | 428 | 2282 | 2021 | 90.9 | globlastp |
| LBY508 | sorghum\|13v2\|AW283062 | 429 | 2283 | 2021 | 90.4 | globlastp |
| LBY508 | rye\|12v1\|DRR001012.822331 | 430 | 2284 | 2021 | 90 | globlastp |
| LBY508 | switchgrass\|12v1\|FE627371 | 431 | — | 2021 | 89.43 | glotblastn |
| LBY508 | maize\|15v1\|BG320869_P1 | 432 | 2285 | 2021 | 87.9 | globlastp |
| LBY508 | millet\|10v1\|CD726688_P1 | 433 | 2286 | 2021 | 87.2 | globlastp |
| LBY501 | solanum_phureja\|09v1\|SPHBG600777 | 375 | 2243 | 2016 | 95.4 | globlastp |
| LBY501 | pepper\|14v1\|CASEOUL14007498_P1 | 376 | 2244 | 2016 | 90.1 | globlastp |
| LBY501 | nicotiana_benthamiana\|12v1\|FG167752_P1 | 377 | 2245 | 2016 | 88.9 | globlastp |
| LBY492 | foxtail_millet\|14v1\|JK565007_P1 | 345 | 2214 | 2010 | 88.1 | globlastp |
| LBY492 | switchgrass\|12v1\|FE631167 | 346 | 2215 | 2010 | 84.7 | globlastp |
| LBY492 | maize\|15v1\|BG462557_P1 | 347 | 2216 | 2010 | 83.9 | globlastp |
| LBY473 | switchgrass\|12v1\|FL697025 | 291 | 2167 | 2000 | 89.5 | globlastp |
| LBY473 | sorghum\|13v2\|XM_002440640 | 292 | 2168 | 2000 | 80.3 | globlastp |
| LYD1017 | pigeonpea\|11v1\|SRR054580X107042_P1 | 1645 | 2764 | 2057 | 96.2 | globlastp |
| LYD1017 | soybean\|15v1\|GLYMA19G37480 | 1646 | 2765 | 2057 | 96.2 | globlastp |
| LYD1017 | soybean\|15v1\|GLYMA03G34800 | 1647 | 2766 | 2057 | 96.1 | globlastp |
| LYD1017 | lotus\|09v1\|AU089077_P1 | 1648 | 2767 | 2057 | 91.9 | globlastp |
| LYD1017 | medicago\|13v1\|BQ148942_P1 | 1649 | 2768 | 2057 | 91.6 | globlastp |
| LYD1017 | peanut\|13v1\|SRR042414X47238_P1 | 1650 | 2769 | 2057 | 90.4 | globlastp |
| LYD1017 | lupin\|13v4\|SRR520490.152467_P1 | 1651 | 2770 | 2057 | 90.3 | globlastp |
| LYD1017 | chickpea\|13v2\|SRR133517.14651_P1 | 1652 | 2771 | 2057 | 89.9 | globlastp |
| LYD1017 | clover\|14v1\|ERR351508S19XK19C111401_P1 | 1653 | 2772 | 2057 | 89.7 | globlastp |
| LYD1017 | clover\|14v1\|ERR351507S19XK19C153786_P1 | 1654 | 2773 | 2057 | 89.5 | globlastp |
| LYD1017 | clover\|14v1\|ERR351507S19XK19C212484_P1 | 1655 | 2774 | 2057 | 89.3 | globlastp |
| LYD1017 | lupin\|13v4\|SRR520490.124880_P1 | 1656 | 2775 | 2057 | 88.9 | globlastp |
| LYD1017 | cacao\|13v1\|CU542570_P1 | 1657 | 2776 | 2057 | 86.7 | globlastp |
| LYD1017 | pigeonpea\|11v1\|SRR054580X105784_P1 | 1658 | 2777 | 2057 | 86.1 | globlastp |
| LYD1017 | bean\|13v1\|SRR001334X110833_P1 | 1659 | 2778 | 2057 | 85.6 | globlastp |
| LYD1017 | gossypium_raimondii\|13v1\|AI729695_P1 | 1660 | 2779 | 2057 | 85.2 | globlastp |
| LYD1017 | cotton\|11v1\|AI729695_P1 | 1661 | 2780 | 2057 | 84.8 | globlastp |
| LYD1017 | beech\|11v1\|SRR006293.3441_P1 | 1662 | 2781 | 2057 | 84.6 | globlastp |
| LYD1017 | cassava\|09v1\|CK645702_P1 | 1663 | 2782 | 2057 | 84.2 | globlastp |
| LYD1017 | poplar\|13v1\|BI068709_P1 | 1664 | 2783 | 2057 | 84.2 | globlastp |
| LYD1017 | aristolochia\|10v1\|FD756061_P1 | 1665 | 2784 | 2057 | 83.9 | globlastp |
| LYD1017 | coconut\|14v1\|COCOS14V1K19C1046186_P1 | 1666 | 2785 | 2057 | 83.9 | globlastp |
| LYD1017 | eucalyptus\|11v2\|CB967838_P1 | 1667 | 2786 | 2057 | 83.9 | globlastp |
| LYD1017 | medicago\|13v1\|EV260263_P1 | 1668 | 2787 | 2057 | 83.7 | globlastp |
| LYD1017 | blueberry\|12v1\|SRR353282X20421D1_T1 | 1669 | — | 2057 | 83.68 | glotblastn |
| LYD1017 | coconut\|14v1\|COCOS14V1K19C1159975_P1 | 1670 | 2788 | 2057 | 83.5 | globlastp |
| LYD1017 | nicotiana_benthamiana\|12v1\|FG137879_P1 | 1671 | 2789 | 2057 | 83.5 | globlastp |
| LYD1017 | tomato\|13v1\|AW623225 | 1672 | 2790 | 2057 | 83.5 | globlastp |
| LYD1017 | tripterygium\|11v1\|SRR098677X106645 | 1673 | 2791 | 2057 | 83.5 | globlastp |
| LYD1017 | chickpea\|13v2\|SRR133517.630443_P1 | 1674 | 2792 | 2057 | 83.3 | globlastp |
| LYD1017 | coconut\|14v1\|COCOS14V1K19C1317565_P1 | 1675 | 2793 | 2057 | 83.3 | globlastp |
| LYD1017 | grape\|13v1\|GSVIVT01033767001_P1 | 1676 | 2794 | 2057 | 83.3 | globlastp |
| LYD1017 | monkeyflower\|12v1\|SRR037227.107918_P1 | 1677 | 2795 | 2057 | 82.6 | globlastp |
| LYD1017 | sesame\|12v1\|SESI12V1395133 | 1678 | 2796 | 2057 | 82.6 | globlastp |
| LYD1017 | phyla\|11v2\|SRR099035X12272_T1 | 1679 | — | 2057 | 82.55 | glotblastn |
| LYD1017 | euonymus\|11v1\|SRR070038X412073_P1 | 1680 | 2797 | 2057 | 82.4 | globlastp |
| LYD1017 | euonymus\|11v1\|SRR070038X168886_P1 | 1681 | 2798 | 2057 | 82.2 | globlastp |
| LYD1017 | nicotiana_benthamiana\|12v1\|AM809948_P1 | 1682 | 2799 | 2057 | 82.2 | globlastp |
| LYD1017 | oil_palm\|11v1\|EL690173_P1 | 1683 | 2800 | 2057 | 82.2 | globlastp |
| LYD1017 | rosmarinus\|15v1\|SRR290363X191066D1 | 1684 | 2801 | 2057 | 82.2 | globlastp |
| LYD1017 | amborella\|12v3\|FD438286_P1 | 1685 | 2802 | 2057 | 82 | globlastp |
| LYD1017 | b_juncea\|12v1\|E6ANDIZ01BEWVL_P1 | 1686 | 2803 | 2057 | 82 | globlastp |
| LYD1017 | canola\|11v1\|DY020163_P1 | 1687 | 2804 | 2057 | 82 | globlastp |
| LYD1017 | canola\|11v1\|SRR019557.30392_P1 | 1688 | 2805 | 2057 | 82 | globlastp |
| LYD1017 | clementine\|11v1\|JGICC010322_P1 | 1689 | 2806 | 2057 | 82 | globlastp |
| LYD1017 | thellungiella_parvulum\|13v1\|AK353142 | 1690 | 2807 | 2057 | 82 | globlastp |
| LYD1017 | b_oleracea\|14v1\|EE555829_P1 | 1691 | 2808 | 2057 | 81.8 | globlastp |
| LYD1017 | b_rapa\|11v1\|DY020163_P1 | 1692 | 2809 | 2057 | 81.8 | globlastp |
| LYD1017 | b_oleracea\|14v1\|DY020163_P1 | 1693 | 2810 | 2057 | 81.6 | globlastp |
| LYD1017 | banana\|14v1\|MAGEN2012035215_P1 | 1694 | 2811 | 2057 | 81.6 | globlastp |
| LYD1017 | orange\|11v1\|JGICC010322_P1 | 1695 | 2812 | 2057 | 81.6 | globlastp |
| LYD1017 | prunus\|10v1\|CO753572 | 1696 | 2813 | 2057 | 81.6 | globlastp |
| LYD1017 | b_rapa\|11v1\|ES271389_P1 | 1697 | 2814 | 2057 | 81.4 | globlastp |
| LYD1017 | orobanche\|10v1\|SRR023189S0020745_P1 | 1698 | 2815 | 2057 | 81.4 | globlastp |
| LYD1017 | sciadopitys\|10v1\|SRR065035S0002965 | 1699 | 2816 | 2057 | 81.4 | globlastp |
| LYD1017 | thellungiella_halophilum\|13v1\| | 1700 | 2817 | 2057 | 81.4 | globlastp |
| | AK353142 | | | | | |
| LYD1017 | cacao\|13v1\|SRR531454.931018_P1 | 1701 | 2818 | 2057 | 81.3 | globlastp |
| LYD1017 | prunus_mume\|13v1\|GE653308 | 1702 | 2819 | 2057 | 81.3 | globlastp |
| LYD1017 | maritime_pine\|10v1\|BX249648_P1 | 1703 | 2820 | 2057 | 81.2 | globlastp |
| LYD1017 | poplar\|13v1\|AI165974_P1 | 1704 | 2821 | 2057 | 81.2 | globlastp |
| LYD1017 | banana\|14v1\|FF558504_P1 | 1705 | 2822 | 2057 | 81.1 | globlastp |
| LYD1017 | pine\|14v1\|AA739570_P1 | 1706 | 2823 | 2057 | 81.1 | globlastp |
| LYD1017 | podocarpus\|10v1\|SRR065014S0001562_P1 | 1707 | 2824 | 2057 | 81.1 | globlastp |
| LYD1017 | solanum_phureja\|09v1\|SPHBG124425 | 1708 | 2825 | 2057 | 81.1 | globlastp |
| LYD1017 | arabidopsis_lyrata\|13v1\|AV793243_P1 | 1709 | 2826 | 2057 | 80.9 | globlastp |
| LYD1017 | cephalotaxus\|11v1\|SRR064395X104611_P1 | 1710 | 2827 | 2057 | 80.9 | globlastp |
| LYD1017 | pseudotsuga\|10v1\|SRR065119S0004314 | 1711 | 2828 | 2057 | 80.9 | globlastp |
| LYD1017 | abies\|11v2\|SRR098676X105415_P1 | 1712 | 2829 | 2057 | 80.7 | globlastp |
| LYD1017 | onion\|14v1\|CF445945_P1 | 1713 | 2830 | 2057 | 80.7 | globlastp |
| LYD1017 | onion\|14v1\|SRR073446X231001D1_P1 | 1714 | 2830 | 2057 | 80.7 | globlastp |
| LYD1017 | soybean\|15v1\|GLYMA10G07560 | 1715 | 2831 | 2057 | 80.7 | globlastp |
| LYD1017 | soybean\|15v1\|GLYMA13G21440 | 1716 | 2832 | 2057 | 80.7 | globlastp |
| LYD1017 | cucumber\|09v1\|BGI454G0135430_P1 | 1717 | 2833 | 2057 | 80.6 | globlastp |
| LYD1017 | b_juncea\|12v1\|E6ANDIZ01A09MR1_P1 | 1718 | 2834 | 2057 | 80.5 | globlastp |
| LYD1017 | banana\|14v1\|FF560984_P1 | 1719 | 2835 | 2057 | 80.5 | globlastp |
| LYD1017 | poplar\|13v1\|BU894625_P1 | 1720 | 2836 | 2057 | 80.5 | globlastp |
| LYD1017 | tomato\|13v1\|BG124425 | 1721 | 2837 | 2057 | 80.5 | globlastp |
| LYD1017 | aquilegia\|10v2\|DR921496_P1 | 1722 | 2838 | 2057 | 80.3 | globlastp |
| LYD1017 | banana\|14v1\|MAGEN2012014831_P1 | 1723 | 2839 | 2057 | 80.3 | globlastp |
| LYD1017 | cedrus\|11v1\|SRR065007X104950_P1 | 1724 | 2840 | 2057 | 80.3 | globlastp |
| LYD1017 | watermelon\|11v1\|VMEL00658201782316 | 1725 | 2841 | 2057 | 80.3 | globlastp |
| LYD1017 | onion\|14v1\|SRR073446X154842D1_T1 | 1726 | — | 2057 | 80.19 | glotblastn |
| LYD1017 | platanus\|11v1\|SRR096786X107986_T1 | 1727 | — | 2057 | 80.11 | glotblastn |
| LYD1017 | arabidopsis\|13v2\|AT5G03760_P1 | 1728 | 2842 | 2057 | 80.1 | globlastp |
| LYD1017 | cassava\|09v1\|JGICASSAVA3900M1_P1 | 1729 | 2843 | 2057 | 80.1 | globlastp |
| LYD1017 | orange\|11v1\|DY281297_P1 | 1730 | 2844 | 2057 | 80.1 | globlastp |
| LYD1017 | pepper\|14v1\|CA523021_P1 | 1731 | 2845 | 2057 | 80.1 | globlastp |
| LYD1017 | spruce\|11v1\|EX331125 | 1732 | 2846 | 2057 | 80.1 | globlastp |
| LYD1017 | oak\|10v1\|FP038313_P1 | 1733 | 2847 | 2057 | 80 | globlastp |
| LYD1003 | cowpea\|12v1\|FF391447_P1 | 1435 | 2571 | 2043 | 90 | globlastp |
| LYD1003 | bean\|13v1\|CA910364_P1 | 1436 | 2572 | 2043 | 88.9 | globlastp |
| LYD1003 | pigeonpea\|11v1\|SRR054580X103519_P1 | 1437 | 2573 | 2043 | 88.1 | globlastp |
| LYD1003 | soybean\|15v1\|GLYMA03G12130 | 1438 | 2574 | 2043 | 85.1 | globlastp |
| LYD1003 | clover\|14v1\|ERR351507S29XK29C690849_P1 | 1439 | 2575 | 2043 | 82.4 | globlastp |
| LYD1003 | clover\|14v1\|ERR351507S19XK19C414583_P1 | 1440 | 2576 | 2043 | 81.6 | globlastp |
| LYD1003 | lupin\|13v4\|V1NGLUP13V1X1102578_P1 | 1441 | 2577 | 2043 | 81.4 | globlastp |
| LYD1003 | clover\|14v1\|ERR351507S29XK29C110503_P1 | 1442 | 2578 | 2043 | 81.3 | globlastp |
| LYD1003 | trigonella\|11v1\|SRR066194X155397 | 1443 | 2579 | 2043 | 81.2 | globlastp |
| LYD1003 | medicago\|13v1\|AL367559_P1 | 1444 | 2580 | 2043 | 81 | globlastp |
| LYD1003 | oak\|10v1\|DB996976_T1 | 1445 | — | 2043 | 80.49 | glotblastn |
| LYD1003 | peanut\|13v1\|SRR042414X76851_T1 | 1446 | — | 2043 | 80.27 | glotblastn |
| LYD1003 | chickpea\|13v2\|SRR133517.122271_P1 | 1447 | 2581 | 2043 | 80.1 | globlastp |
| LBY479 | sorghum\|13v2\|CD219498 | 303 | 2177 | 2005 | 93.3 | globlastp |
| LBY479 | switchgrass\|12v1\|FE608398 | 304 | 2178 | 2005 | 84.5 | globlastp |
| LBY479 | foxtail_millet\|14v1\|XM_004974003_T1 | 305 | — | 2005 | 83.33 | glotblastn |
| LBY479 | rice\|15v1\|AU095483 | 306 | 2179 | 2005 | 83.1 | globlastp |
| LBY479 | millet\|10v1\|EVO454PM024498_T1 | 307 | — | 2005 | 81.09 | glotblastn |
| LBY471 | sorghum\|13v2\|BE364962 | 283 | — | 1998 | 84.66 | glotblastn |
| LBY515 | cotton\|11v1\|BE053126_P1 | 1991 | 3059 | 3043 | 97.2 | globlastp |
| LYD1012 | soybean\|15v1\|GLYMA02G06280 | 1486 | 2619 | 2052 | 96.3 | globlastp |
| LYD1012 | pigeonpea\|11v1\|SRR054580X155219_P1 | 1487 | 2620 | 2052 | 93 | globlastp |
| LYD1012 | bean\|13v1\|SRR001335X393372_P1 | 1488 | 2621 | 2052 | 92.4 | globlastp |
| LYD1012 | chickpea\|13v2\|FL512420_P1 | 1489 | 2622 | 2052 | 89.5 | globlastp |
| LYD1012 | lotus\|09v1\|AV777894_P1 | 1490 | 2623 | 2052 | 87.9 | globlastp |
| LYD1012 | medicago\|13v1\|AW191234_P1 | 1491 | 2624 | 2052 | 87.1 | globlastp |
| LYD1012 | trigonella\|11v1\|SRR066194X125169 | 1492 | 2625 | 2052 | 86.9 | globlastp |
| LYD1012 | peanut\|13v1\|GO342102_P1 | 1493 | 2626 | 2052 | 86.7 | globlastp |
| LYD1012 | lupin\|13v4\|V1NGGBUXD8B02HMD3F_P1 | 1494 | 2627 | 2052 | 86.2 | globlastp |
| LYD1012 | clover\|14v1\|BB917874_P1 | 1495 | 2628 | 2052 | 85.7 | globlastp |
| LYD1012 | lupin\|13v4\|SRR520490.338122_P1 | 1496 | 2629 | 2052 | 85.6 | globlastp |
| LYD1012 | clover\|14v1\|ERR351507S19XK19C202874_P1 | 1497 | 2630 | 2052 | 85.5 | globlastp |
| LYD1012 | chickpea\|13v2\|SRR133517.295354_P1 | 1498 | 2631 | 2052 | 82.2 | globlastp |
| LYD1012 | grape\|13v1\|GSVIVT01018949001_P1 | 1499 | 2632 | 2052 | 81.7 | globlastp |
| LYD1012 | oak\|10v1\|FP030466_P1 | 1500 | 2633 | 2052 | 81.6 | globlastp |
| LYD1012 | euonymus\|11v1\|SRR070038X216143_P1 | 1501 | 2634 | 2052 | 81.5 | globlastp |
| LYD1012 | tripterygium\|11v1\|SRR098677X107156 | 1502 | 2635 | 2052 | 81.3 | globlastp |
| LYD1012 | chestnut\|14v1\|SRR006295X51476D1_P1 | 1503 | 2636 | 2052 | 81.2 | globlastp |
| LYD1012 | prunus\|10v1\|BU041298 | 1504 | 2637 | 2052 | 81.1 | globlastp |
| LYD1012 | tripterygium\|11v1\|SRR098677X100580 | 1505 | 2638 | 2052 | 81.1 | globlastp |
| LYD1012 | medicago\|13v1\|XM_003611960_P1 | 1506 | 2639 | 2052 | 81 | globlastp |
| LYD1012 | chelidonium\|11v1\|SRR084752X106610_P1 | 1507 | 2640 | 2052 | 80.5 | globlastp |
| LYD1012 | euonymus\|11v1\|SRR070038X105618_P1 | 1508 | 2641 | 2052 | 80.4 | globlastp |
| LYD1012 | cacao\|13v1\|CU482624_P1 | 1509 | 2642 | 2052 | 80.3 | globlastp |
| LYD1012 | cassava\|09v1\|JGICASSAVA18794VALIDM1_T1 | 1510 | — | 2052 | 80.17 | glotblastn |
| LYD1012 | cotton\|11v1\|CO125766XX1_T1 | 1511 | — | 2052 | 80.17 | glotblastn |
| LYD1012 | poppy\|11v1\|FE965118_T1 | 1512 | — | 2052 | 80.12 | glotblastn |
| LYD1012 | castorbean\|14v2\|EE259207_P1 | 1513 | 2643 | 2052 | 80.1 | globlastp |
| LYD1012 | prunus_mume\|13v1\|BU041298 | 1514 | 2644 | 2052 | 80.1 | globlastp |
| LYD1016 | soybean\|15v1\|GLYMA16G25780T2 | 1635 | 2754 | 2056 | 94.1 | globlastp |
| LYD1016 | pigeonpea\|11v1\|SRR054580X173690_P1 | 1636 | 2755 | 2056 | 92.3 | globlastp |
| LYD1016 | bean\|13v1\|EE985444_P1 | 1637 | 2756 | 2056 | 88.3 | globlastp |
| LYD1016 | chickpea\|13v2\|SRR133517.120112_P1 | 1638 | 2757 | 2056 | 82.4 | globlastp |
| LYD1016 | medicago\|13v1\|AJ547971_P1 | 1639 | 2758 | 2056 | 82.4 | globlastp |
| LYD1016 | lupin\|13v4\|SRR520490.22474_P1 | 1640 | 2759 | 2056 | 82 | globlastp |
| LYD1016 | clover\|14v1\|BB912743_P1 | 1641 | 2760 | 2056 | 80.7 | globlastp |
| LYD1016 | clover\|14v1\|ERR351507S19XK19C493635_P1 | 1642 | 2761 | 2056 | 80.6 | globlastp |
| LYD1016 | clover\|14v1\|ERR351507S19XK19C187560_P1 | 1643 | 2762 | 2056 | 80.5 | globlastp |
| LYD1016 | clover\|14v1\|ERR351507S19XK19C635492_P1 | 1644 | 2763 | 2056 | 80.4 | globlastp |
| LYD1007 | soybean\|15v1\|GLYMA14G09070 | 1463 | 2596 | 2047 | 93.6 | globlastp |
| LYD1007 | bean\|13v1\|SRR090491X1542292_P1 | 1464 | 2597 | 2047 | 87.9 | globlastp |
| LYD1007 | pigeonpea\|11v1\|SRR054580X318066_P1 | 1465 | 2598 | 2047 | 87.5 | globlastp |
| LYD1005 | soybean\|15v1\|GLYMA13G33270 | 1457 | 2590 | 2045 | 93.7 | globlastp |
| LYD1005 | pigeonpea\|11v1\|SRR054580X107390_P1 | 1458 | 2591 | 2045 | 90.3 | globlastp |
| LYD1005 | bean\|13v1\|FE900075_P1 | 1459 | 2592 | 2045 | 89.5 | globlastp |
| LYD1005 | cowpea\|12v1\|FC460094_P1 | 1460 | 2593 | 2045 | 85.6 | globlastp |
| LBY500 | potato\|10v1\|BG097676_P1 | 368 | 2236 | 2015 | 97.8 | globlastp |
| LBY500 | solanum_phureja\|09v1\|SPHBG128023 | 369 | 2237 | 2015 | 97.6 | globlastp |
| LBY500 | eggplant\|10v1\|FS005335_P1 | 370 | 2238 | 2015 | 94.1 | globlastp |
| LBY500 | tobacco\|gb162\|AJ344582 | 371 | 2239 | 2015 | 91.4 | globlastp |
| LBY500 | nicotiana_benthamiana\|12v1\|BP748527_P1 | 372 | 2240 | 2015 | 91.2 | globlastp |
| LBY500 | pepper\|14v1\|CA515210_P1 | 373 | 2241 | 2015 | 87.1 | globlastp |
| LBY500 | basilicum\|13v1\|B10LEAF297745_P1 | 374 | 2242 | 2015 | 81.2 | globlastp |
| MGP93 | maize\|15v1\|AI947423_P1 | 1921 | 3007 | 2060 | 96.9 | globlastp |
| MGP93 | maize\|15v1\|AI622296_P1 | 1922 | 3008 | 2060 | 95.7 | globlastp |
| MGP93 | echinochloa\|14v1\|SRR522894X211138D1_P1 | 1923 | 3009 | 2060 | 94.9 | globlastp |
| MGP93 | echinochloa\|14v1\|SRR522894X106593D1_P1 | 1924 | 3010 | 2060 | 94.7 | globlastp |
| MGP93 | switchgrass\|12v1\|DN145791 | 1925 | 3011 | 2060 | 94.7 | globlastp |
| MGP93 | echinochloa\|14v1\|SRR522894X114938D1_P1 | 1926 | 3012 | 2060 | 94.5 | globlastp |
| MGP93 | switchgrass\|12v1\|FL811936 | 1927 | 3013 | 2060 | 94.5 | globlastp |
| MGP93 | foxtail_millet\|14v1\|EC613344_P1 | 1928 | 3014 | 2060 | 93.3 | globlastp |
| MGP93 | millet\|10v1\|CD726238_P1 | 1929 | 3015 | 2060 | 93.3 | globlastp |
| MGP93 | barley\|15v2\|BE412887_P1 | 1930 | 3016 | 2060 | 90.6 | globlastp |
| MGP93 | wheat\|12v3\|BE405383 | 1931 | 3017 | 2060 | 90.4 | globlastp |
| MGP93 | aegilops\|16v1\|AET16V1PRD020861_P1 | 1932 | 3018 | 2060 | 90.1 | globlastp |
| MGP93 | oat\|14v1\|GO589828_P1 | 1933 | 3019 | 2060 | 89.9 | globlastp |
| MGP93 | rye\|12v1\|DRR001012.109373 | 1934 | 3020 | 2060 | 89.9 | globlastp |
| MGP93 | rye\|12v1\|DRR001012.139646 | 1935 | 3021 | 2060 | 89.6 | globlastp |
| MGP93 | oat\|14v1\|SRR020741X72887D1_P1 | 1936 | 3022 | 2060 | 89.4 | globlastp |
| MGP93 | rye\|12v1\|BE637400 | 1937 | — | 2060 | 88.92 | glotblastn |
| MGP93 | fescue\|13v1\|GO856840_P1 | 1938 | 3023 | 2060 | 88 | globlastp |
| MGP93 | echinochloa\|14v1\|ECHC14V1K19C121507_P1 | 1974 | 3044 | 2060 | 87.7 | globlastp |
| MGP93 | fescue\|13v1\|DT705720_P1 | 1939 | 3024 | 2060 | 87.2 | globlastp |
| MGP93 | brachypodium\|14v1\|DV487244_P1 | 1940 | 3025 | 2060 | 85.2 | globlastp |
| MGP93 | rice\|15v1\|BF430679 | 1941 | 3026 | 2060 | 84.6 | globlastp |
| MGP93 | sugarcane\|10v1\|CA112624 | 1975 | 3045 | 2060 | 82.7 | globlastp |
| MGP93 | pineapple\|14v1\|DT337737_P1 | 1976 | 3046 | 2060 | 82.2 | globlastp |
| MGP93 | banana\|14v1\|BBS2536T3_T1 | 1942 | — | 2060 | 80.96 | glotblastn |
| MGP93 | ginseng\|13v1\|CN846498_T1 | 1943 | — | 2060 | 80.96 | glotblastn |
| MGP93 | banana\|14v1\|FF560365_T1 | 1944 | — | 2060 | 80.72 | glotblastn |
| MGP93 | coconut\|14v1\|COCOS14V1K19C1221983_T1 | 1945 | — | 2060 | 80.58 | glotblastn |
| MGP93 | ginseng\|13v1\|GR874879_T1 | 1946 | — | 2060 | 80.48 | glotblastn |
| MGP93 | banana\|14v1\|MAGEN2012004792_T1 | 1947 | — | 2060 | 80.24 | glotblastn |
| MGP93 | ginseng\|13v1\|HS076135_T1 | 1948 | — | 2060 | 80.24 | glotblastn |
| MGP93 | tragopogon\|10v1\|SRR020205S0012301 | 1949 | — | 2060 | 80.24 | glotblastn |
| MGP93 | watermelon\|11v1\|AM728680 | 1950 | 3027 | 2060 | 80.2 | globlastp |
| MGP93 | oil_palm\|11v1\|EL563847_T1 | 1951 | — | 2060 | 80.1 | glotblastn |
| MGP93 | carrot\|14v1\|BSS10K19C111202_P1 | 1977 | 3047 | 2060 | 80 | globlastp |
| MGP93 | carrot\|14v1\|BSS10K23C77081_P1 | 1978 | 3047 | 2060 | 80 | globlastp |
| MGP93 | rice\|15v1\|BE229534 | 1952 | 3028 | 2060 | 80 | globlastp |
| MGP93 | sorghum\|13v2\|CN123895 | 1953 | 3029 | 2060 | 80 | globlastp |
| MGP93 | switchgrass\|12v1\|FL777300 | 1954 | 3030 | 2060 | 80 | globlastp |
| MGP93 | ginseng\|13v1\|SRR547977.611104_T1 | 1955 | — | 2060 | 80 | glotblastn |
| MGP93 | tripterygium\|11v1\|SRR098677X106498 | 1956 | — | 2060 | 80 | glotblastn |
| LYD1010 | soybean\|15v1\|GLYMA15G15900 | 1965 | 3038 | 2075 | 90.4 | globlastp |
| LYD1010 | soybean\|15v1\|GLYMA09G04960 | 1966 | 3039 | 2075 | 90.3 | globlastp |
| LYD1010 | pigeonpea\|11v1\|SRR054580X109243_T1 | 1967 | — | 2075 | 83.07 | glotblastn |
| LBY499 | solanum_phureja\|09v1\|SPHBG127512 | 365 | 2233 | 2014 | 97.3 | globlastp |
| LBY499 | potato\|10v1\|BQ115852_P1 | 366 | 2234 | 2014 | 96.9 | globlastp |
| LBY499 | nicotiana_benthamiana\|12v1\|CK286241_P1 | 367 | 2235 | 2014 | 82.9 | globlastp |
| LBY489 | sorghum\|13v2\|XM_002448806 | 315 | 2186 | 2009 | 96.9 | globlastp |
| LBY489 | sugarcane\|10v1\|CA076404 | 316 | 2187 | 2009 | 96.5 | globlastp |
| LBY489 | sorghum\|13v2\|AW284823 | 317 | 2188 | 2009 | 93.4 | globlastp |
| LBY489 | sugarcane\|10v1\|CA092373 | 318 | 2189 | 2009 | 93.4 | globlastp |
| LBY489 | maize\|15v1\|AI665539_P1 | 319 | 2190 | 2009 | 91.8 | globlastp |
| LBY489 | foxtail_millet\|14v1\|JK558521_P1 | 320 | 2191 | 2009 | 91.4 | globlastp |
| LBY489 | maize\|15v1\|BE509744_P1 | 321 | 2192 | 2009 | 90.6 | globlastp |
| LBY489 | foxtail_millet\|14v1\|JK606931_P1 | 322 | 2193 | 2009 | 90.2 | globlastp |
| LBY489 | millet\|10v1\|EVO454PM060601_P1 | 323 | 2194 | 2009 | 90.2 | globlastp |
| LBY489 | switchgrass\|12v1\|FE613991_P1 | 324 | 2195 | 2009 | 89.1 | globlastp |
| LBY489 | switchgrass\|12v1\|FE613991 | 325 | — | 2009 | 89.1 | globlastp |
| LBY489 | millet\|10v1\|EVO454PM002774_P1 | 326 | 2196 | 2009 | 88.7 | globlastp |
| LBY489 | rye\|12v1\|DRR001012.114703 | 327 | 2197 | 2009 | 88.3 | globlastp |
| LBY489 | wheat\|12v3\|BG263041 | 328 | 2198 | 2009 | 88.3 | globlastp |
| LBY489 | brachypodium\|14v1\|DV471332_P1 | 329 | 2199 | 2009 | 87.5 | globlastp |
| LBY489 | lolium\|13v1\|SRR029314X19942_P1 | 330 | 2200 | 2009 | 87.5 | globlastp |
| LBY489 | oat\|14v1\|CN819770_P1 | 331 | 2201 | 2009 | 87.5 | globlastp |
| LBY489 | brachypodium\|14v1\|DV484571_P1 | 332 | 2202 | 2009 | 87.1 | globlastp |
| LBY489 | fescue\|13v1\|DT674585_P1 | 333 | 2203 | 2009 | 87.1 | globlastp |
| LBY489 | leymus\|gb166\|EG383182_P1 | 334 | 2204 | 2009 | 87.1 | globlastp |
| LBY489 | barley\|15v2\|BF623521_P1 | 335 | 2205 | 2009 | 86.7 | globlastp |
| LBY489 | oat\|14v1\|GO594479_P1 | 336 | 2206 | 2009 | 86.3 | globlastp |
| LBY489 | oat\|14v1\|CN820438_P1 | 337 | 2207 | 2009 | 85.9 | globlastp |
| LBY489 | rice\|15v1\|BI811216 | 338 | 2208 | 2009 | 85.9 | globlastp |
| LBY489 | wheat\|12v3\|BQ743750 | 339 | 2209 | 2009 | 85.5 | globlastp |
| LBY489 | aegilops\|16v1\|BQ840797_P1 | 340 | 2210 | 2009 | 85.2 | globlastp |
| LBY489 | rye\|12v1\|BE493965 | 341 | 2211 | 2009 | 85.2 | globlastp |
| LBY489 | rye\|12v1\|DRR001012.125345 | 342 | 2212 | 2009 | 85.2 | globlastp |
| LBY489 | lovegrass\|gb167\|EH189799_T1 | 343 | — | 2009 | 84.77 | glotblastn |
| LBY489 | barley\|15v2\|BG344091_P1 | 344 | 2213 | 2009 | 83.3 | globlastp |
| LBY497 | soybean\|15v1\|GLYMA07G05700 | 351 | 2220 | 2013 | 95 | globlastp |
| LBY497 | pigeonpea\|11v1\|GR466346_P1 | 352 | 2221 | 2013 | 90.7 | globlastp |
| LBY497 | bean\|13v1\|SRR001334X142305_P1 | 353 | 2222 | 2013 | 89.7 | globlastp |
| LBY497 | clover\|14v1\|ERR351507S19XK19C272731_P1 | 354 | 2223 | 2013 | 88.2 | globlastp |
| LBY497 | clover\|14v1\|ERR351507S19XK19C188720_P1 | 355 | 2224 | 2013 | 87.3 | globlastp |
| LBY497 | clover\|14v1\|ERR351507S19XK19C202174_P1 | 356 | 2225 | 2013 | 87 | globlastp |
| LBY497 | lupin\|13v4\|SRR520490.67911_P1 | 357 | 2226 | 2013 | 87 | globlastp |
| LBY497 | medicago\|13v1\|AL369443_P1 | 358 | 2227 | 2013 | 86.8 | globlastp |
| LBY497 | lupin\|13v4\|FG092094_P1 | 359 | 2228 | 2013 | 86.3 | globlastp |
| LBY497 | medicago\|13v1\|BF636710_T1 | 360 | — | 2013 | 84.93 | glotblastn |
| LBY497 | pigeonpea\|11v1\|SRR054580X108533_P1 | 361 | 2229 | 2013 | 84.2 | globlastp |
| LBY497 | peanut\|13v1\|EH048085_P1 | 362 | 2230 | 2013 | 83.7 | globlastp |
| LBY497 | peanut\|13v1\|GO262067_P1 | 363 | 2231 | 2013 | 83.7 | globlastp |
| LBY497 | soybean\|15v1\|GLYMA03G42130 | 364 | 2232 | 2013 | 83.5 | globlastp |
| LYD1014 | soybean\|15v1\|GLYMA15G01520T2 | 1604 | 2724 | 2054 | 97 | globlastp |
| LYD1014 | cowpea\|12v1\|FF386481_P1 | 1605 | 2725 | 2054 | 91.9 | globlastp |
| LYD1014 | bean\|13v1\|CA900757_P1 | 1606 | 2726 | 2054 | 90.6 | globlastp |
| LYD1014 | pigeonpea\|11v1\|GW350399_P1 | 1607 | 2727 | 2054 | 89.4 | globlastp |
| LYD1014 | lupin\|13v4\|CA410384_P1 | 1608 | 2728 | 2054 | 84.6 | globlastp |
| LYD1014 | chickpea\|13v2\|GR913408_P1 | 1609 | 2729 | 2054 | 84.1 | globlastp |
| LYD1014 | peanut\|13v1\|GO263051_P1 | 1610 | 2730 | 2054 | 83.2 | globlastp |
| LYD1014 | peanut\|13v1\|EH043496_P1 | 1611 | 2731 | 2054 | 82.9 | globlastp |
| LYD1014 | eucalyptus\|11v2\|CD668678_P1 | 1612 | 2732 | 2054 | 82.8 | globlastp |
| LYD1014 | clover\|14v1\|ERR351507S19XK19C157230_P1 | 1613 | 2733 | 2054 | 82.6 | globlastp |
| LYD1014 | lotus\|09v1\|BI418197_P1 | 1614 | 2734 | 2054 | 82.5 | globlastp |
| LYD1014 | clover\|14v1\|BB918828_P1 | 1615 | 2735 | 2054 | 82.3 | globlastp |
| LYD1014 | strawberry\|11v1\|DY667002 | 1616 | 2736 | 2054 | 82.3 | globlastp |
| LYD1014 | trigonella\|11v1\|SRR066194X112836 | 1617 | 2737 | 2054 | 82.1 | globlastp |
| LYD1014 | medicago\|13v1\|AW256848_P1 | 1618 | 2738 | 2054 | 81.8 | globlastp |
| LYD1014 | cassava\|09v1\|CK642968_P1 | 1619 | 2739 | 2054 | 81.3 | globlastp |
| LYD1014 | clover\|14v1\|ERR351508S19XK19C107545_P1 | 1620 | 2740 | 2054 | 81.3 | globlastp |
| LYD1014 | poplar\|13v1\|BI124534_P1 | 1621 | 2741 | 2054 | 81.3 | globlastp |
| LYD1014 | prunus\|10v1\|BU042455 | 1622 | 2742 | 2054 | 81.3 | globlastp |
| LYD1014 | beech\|11v1\|SRR006293.10404_T1 | 1623 | — | 2054 | 81.27 | glotblastn |
| LYD1014 | cacao\|13v1\|CF973925_P1 | 1624 | 2743 | 2054 | 80.8 | globlastp |
| LYD1014 | clover\|14v1\|ERR351507S19XK19C574920_P1 | 1625 | 2744 | 2054 | 80.8 | globlastp |
| LYD1014 | apple\|11v1\|CN492219_P1 | 1626 | 2745 | 2054 | 80.3 | globlastp |
| LYD1014 | prunus_mume\|13v1\|BU042455 | 1627 | 2746 | 2054 | 80.3 | globlastp |
| LYD1014 | chestnut\|14v1\|SRR006295X15304D1_P1 | 1628 | 2747 | 2054 | 80 | globlastp |
| LYD1014 | echinacea\|13v1\|EPURP13V12240262_P1 | 1629 | 2748 | 2054 | 80 | globlastp |
| LYD1014 | euonymus\|11v1\|SRR070038X1229_P1 | 1630 | 2749 | 2054 | 80 | globlastp |
| LYD1014 | flaveria\|11v1\|SRR149229.103918_P1 | 1631 | 2750 | 2054 | 80 | globlastp |
| LYD1011 | pigeonpea\|11v1\|SRR054580X117661_P1 | 1481 | 2614 | 2051 | 90.6 | globlastp |
| LYD1011 | soybean\|15v1\|GLYMA05G02460 | 1482 | 2615 | 2051 | 87.9 | globlastp |
| LYD1011 | soybean\|15v1\|GLYMA17G09450 | 1483 | 2616 | 2051 | 86.5 | globlastp |
| LYD1011 | chickpea\|13v2\|SRR133517.215562_P1 | 1484 | 2617 | 2051 | 81.8 | globlastp |
| LYD1011 | medicago\|13v1\|BE239695_P1 | 1485 | 2618 | 2051 | 81.3 | globlastp |
| LBY130 | soybean\|15v1\|GLYMA12G02620 | 193 | 2077 | 1992 | 86.5 | globlastp |
| LBY130 | bean\|13v1\|FE689698_P1 | 194 | 2078 | 1992 | 86.1 | globlastp |
| LBY130 | soybean\|15v1\|GLYMA11G10330 | 195 | — | 1992 | 85.45 | glotblastn |
| LBY130 | pigeonpea\|11v1\|SRR054580X14750_P1 | 196 | 2079 | 1992 | 85.1 | globlastp |
| LBY130 | lotus\|09v1\|AI967920_P1 | 197 | 2080 | 1992 | 84.9 | globlastp |
| LBY130 | lupin\|13v4\|FG089628_P1 | 198 | 2081 | 1992 | 84.6 | globlastp |
| LBY130 | clover\|14v1\|ERR351507S19XK19C223066_P1 | 199 | 2082 | 1992 | 82.9 | globlastp |
| LBY130 | orange\|11v1\|CX295809_P1 | 200 | 2083 | 1992 | 80.2 | globlastp |
| LBY130 | cacao\|13v1\|CU510566_P1 | 201 | 2084 | 1992 | 80.1 | globlastp |
| LBY130 | clementine\|11v1\|CX295809_P1 | 202 | 2085 | 1992 | 80 | globlastp |
| LBY472 | foxtail_millet\|14v1\|XM_004965362_P1 | 284 | 2160 | 1999 | 84.8 | globlastp |
| LBY472 | sorghum\|13v2\|CN134223 | 285 | 2161 | 1999 | 84.6 | globlastp |
| LBY472 | sugarcane\|10v1\|CA204014 | 286 | 2162 | 1999 | 82.8 | globlastp |
| LBY472 | switchgrass\|12v1\|SRR187769.1120571 | 287 | 2163 | 1999 | 82.8 | globlastp |
| LBY472 | foxtail_millet\|14v1\|XM_004952292_P1 | 288 | 2164 | 1999 | 82.6 | globlastp |
| LBY472 | switchgrass\|12v1\|DN150687 | 289 | 2165 | 1999 | 81.6 | globlastp |
| LBY472 | maize\|15v1\|BQ293638_P1 | 290 | 2166 | 1999 | 80.5 | globlastp |
| LBY524 | brachypodium\|14v1\|DV471701_P1 | 1227 | 2410 | 2032 | 87.5 | globlastp |
| LBY524 | foxtail_millet\|14v1\|XM_004967751_P1 | 1228 | 2411 | 2032 | 87.5 | globlastp |
| LBY524 | aegilops\|16v1\|AET16V1PRD037427_P1 | 1229 | 2412 | 2032 | 87.4 | globlastp |
| LBY524 | rye\|12v1\|DRR001012.119869 | 1230 | 2413 | 2032 | 87.1 | globlastp |
| LBY524 | wheat\|12v3\|SRR400820X103516D1 | 1231 | — | 2032 | 86.93 | glotblastn |
| LBY524 | switchgrass\|12v1\|FL702922 | 1232 | 2414 | 2032 | 86.5 | globlastp |
| LBY524 | sorghum\|13v2\|XM_002457550 | 1233 | 2415 | 2032 | 86.3 | globlastp |
| LBY524 | maize\|15v1\|CB179463_P1 | 1234 | 2416 | 2032 | 84.7 | globlastp |
| LBY524 | wheat\|12v3\|CD921949 | 1235 | — | 2032 | 84.11 | glotblastn |
| LBY524 | aegilops\|16v1\|EMT03321_T1 | 1236 | — | 2032 | 81.19 | glotblastn |
| LYD1000 | arabidopsis_lyrata\|13v1\|AA042729_P1 | 1366 | 2523 | 2040 | 98.1 | globlastp |
| LYD1000 | thellungiella_halophilum\|13v1\| | 1367 | 2524 | 2040 | 97.1 | globlastp |
| | EHJGI11022769 | | | | | |
| LYD1000 | b_oleracea\|14v1\|EE471828_P1 | 1368 | 2525 | 2040 | 96.1 | globlastp |
| LYD1000 | canola\|11v1\|EE471828_P1 | 1369 | 2525 | 2040 | 96.1 | globlastp |
| LYD1000 | radish\|gb164\|EV527129 | 1370 | 2525 | 2040 | 96.1 | globlastp |
| LYD1000 | b_rapa\|11v1\|EE471828_P1 | 1371 | 2526 | 2040 | 95.1 | globlastp |
| LYD1000 | cleome_gynandra\|10v1\|SRR015532S0143810_P1 | 1372 | 2527 | 2040 | 93.2 | globlastp |
| LYD1000 | thellungiella_halophilum\|13v1\| | 1373 | 2528 | 2040 | 93.2 | globlastp |
| | EHJGI11014138 | | | | | |
| LYD1000 | arabidopsis_lyrata\|13v1\|AA713092_T1 | 1374 | — | 2040 | 92.23 | glotblastn |
| LYD1000 | arabidopsis_lyrata\|13v1\|BX828810_P1 | 1375 | 2529 | 2040 | 92.2 | globlastp |
| LYD1000 | arabidopsis\|13v2\|AT4G29850_P1 | 1376 | 2529 | 2040 | 92.2 | globlastp |
| LYD1000 | b_juncea\|12v1\|E6ANDIZ01ECWL8_P1 | 1377 | 2530 | 2040 | 91.3 | globlastp |
| LYD1000 | b_oleracea\|14v1\|DY019540_P1 | 1378 | 2531 | 2040 | 91.3 | globlastp |
| LYD1000 | b_oleracea\|14v1\|EG020144_P1 | 1379 | 2532 | 2040 | 91.3 | globlastp |
| LYD1000 | b_rapa\|11v1\|DY019540_P1 | 1380 | 2531 | 2040 | 91.3 | globlastp |
| LYD1000 | b_rapa\|11v1\|EG020144_P1 | 1381 | 2530 | 2040 | 91.3 | globlastp |
| LYD1000 | canola\|11v1\|DY001689_P1 | 1382 | 2531 | 2040 | 91.3 | globlastp |
| LYD1000 | canola\|11v1\|EE456525_P1 | 1383 | 2531 | 2040 | 91.3 | globlastp |
| LYD1000 | canola\|11v1\|EG020144_P1 | 1384 | 2532 | 2040 | 91.3 | globlastp |
| LYD1000 | canola\|11v1\|ES917681_P1 | 1385 | 2530 | 2040 | 91.3 | globlastp |
| LYD1000 | cleome_spinosa\|10v1\|SRR015531S0032410_T1 | 1386 | — | 2040 | 91.26 | glotblastn |
| LYD1000 | b_juncea\|12v1\|E6ANDIZ01B1A7E_P1 | 1387 | 2533 | 2040 | 90.3 | globlastp |
| LYD1000 | radish\|gb164\|EX754311 | 1388 | 2534 | 2040 | 90.3 | globlastp |
| LYD1000 | b_oleracea\|14v1\|AM386636_T1 | 1389 | — | 2040 | 89.32 | glotblastn |
| LYD1000 | b_juncea\|12v1\|E6ANDIZ01EHDCX_P1 | 1390 | 2535 | 2040 | 89.3 | globlastp |
| LYD1000 | canola\|11v1\|EE458864_P1 | 1391 | 2536 | 2040 | 89.3 | globlastp |
| LYD1000 | b_juncea\|12v1\|BJUN12V11064618_P1 | 1392 | 2537 | 2040 | 88.3 | globlastp |
| LYD1000 | b_rapa\|11v1\|CD819607_P1 | 1393 | 2538 | 2040 | 88.3 | globlastp |
| LYD1000 | nasturtium\|11v1\|SRR032558.101636_P1 | 1394 | 2539 | 2040 | 86.4 | globlastp |
| LYD1000 | papaya\|gb165\|EX288082_P1 | 1395 | 2540 | 2040 | 86.4 | globlastp |
| LYD1000 | humulus\|11v1\|GD246115_P1 | 1396 | 2541 | 2040 | 85.4 | globlastp |
| LYD1000 | cacao\|13v1\|CU480878_P1 | 1397 | 2542 | 2040 | 84.5 | globlastp |
| LYD1000 | cleome_spinosa\|10v1\|SRR015531S0105074_P1 | 1398 | 2543 | 2040 | 84.5 | globlastp |
| LYD1000 | cannabis\|12v1\|SOLX00038344_P1 | 1399 | 2544 | 2040 | 83.5 | globlastp |
| LYD1000 | euonymus\|11v1\|SRR070038X120530_P1 | 1400 | 2545 | 2040 | 83.5 | globlastp |
| LYD1000 | euonymus\|11v1\|SRR070038X195976_P1 | 1401 | 2546 | 2040 | 83.5 | globlastp |
| LYD1000 | tripterygium\|11v1\|SRR098677X150137 | 1402 | 2547 | 2040 | 83.5 | globlastp |
| LYD1000 | aristolochia\|10v1\|SRR039082S0006020_P1 | 1403 | 2548 | 2040 | 82.5 | globlastp |
| LYD1000 | clementine\|11v1\|CB611233_P1 | 1404 | 2549 | 2040 | 82.5 | globlastp |
| LYD1000 | gossypium_raimondii\|13v1\|HO101980_P1 | 1405 | 2550 | 2040 | 82.5 | globlastp |
| LYD1000 | nasturtium\|11v1\|SRR032558.184907_P1 | 1406 | 2551 | 2040 | 82.5 | globlastp |
| LYD1000 | orange\|11v1\|CB611233_P1 | 1407 | 2549 | 2040 | 82.5 | globlastp |
| LYD1000 | clover\|14v1\|ERR351508S19XK19C466522_P1 | 1408 | 2552 | 2040 | 81.6 | globlastp |
| LYD1000 | grape\|13v1\|GSVIVT01029250001_P1 | 1409 | 2553 | 2040 | 81.6 | globlastp |
| LYD1000 | grape\|13v1\|XM_002267047_P1 | 1410 | 2553 | 2040 | 81.6 | globlastp |
| LYD1000 | medicago\|13v1\|AL382541_P1 | 1411 | 2554 | 2040 | 81.6 | globlastp |
| LYD1000 | poplar\|13v1\|BI131457_P1 | 1412 | 2555 | 2040 | 81.6 | globlastp |
| LYD1000 | peanut\|13v1\|ES723345_P1 | 1413 | 2556 | 2040 | 80.6 | globlastp |
| LYD1000 | peanut\|13v1\|SRR501313X14825_P1 | 1414 | 2556 | 2040 | 80.6 | globlastp |
| LYD1000 | zostera\|12v1\|AM769331 | 1415 | 2557 | 2040 | 80.6 | globlastp |
| LYD1000 | beech\|11v1\|SRR364434.123264_T1 | 1416 | — | 2040 | 80.58 | glotblastn |
| LYD1000 | pteridium\|11v1\|SRR043594X141788 | 1417 | — | 2040 | 80.58 | glotblastn |
| LYD1015 | soybean\|15v1\|GLYMA16G01130T2 | 1632 | 2751 | 2055 | 96.6 | globlastp |
| LYD1015 | bean\|13v1\|SRR001334X124723_P1 | 1633 | 2752 | 2055 | 88.1 | globlastp |
| LYD1015 | pigeonpea\|11v1\|SRR054580X126262_P1 | 1634 | 2753 | 2055 | 87.2 | globlastp |
| LBY534 | pigeonpea\|11v1\|SRR054580X104338_P1 | 1252 | 2431 | 2039 | 96 | globlastp |
| LBY534 | bean\|13v1\|CA916483_P1 | 1253 | 2432 | 2039 | 94.8 | globlastp |
| LBY534 | cowpea\|12v1\|AM748398_P1 | 1254 | 2433 | 2039 | 94.3 | globlastp |
| LBY534 | pigeonpea\|11v1\|SRR054580X113788_P1 | 1255 | 2434 | 2039 | 92.8 | globlastp |
| LBY534 | cowpea\|12v1\|FC460829_P1 | 1256 | 2435 | 2039 | 91.9 | globlastp |
| LBY534 | bean\|13v1\|CA905879_P1 | 1257 | 2436 | 2039 | 91.6 | globlastp |
| LBY534 | lupin\|13v4\|GW583962_P1 | 1258 | 2437 | 2039 | 91.6 | globlastp |
| LBY534 | lotus\|09v1\|BI418401_P1 | 1259 | 2438 | 2039 | 91.4 | globlastp |
| LBY534 | peanut\|13v1\|EE126161_P1 | 1260 | 2439 | 2039 | 91.1 | globlastp |
| LBY534 | soybean\|15v1\|GLYMA02G05250 | 1261 | 2440 | 2039 | 90.9 | globlastp |
| LBY534 | clover\|14v1\|ERR351507S19XK19C175180_P1 | 1262 | 2441 | 2039 | 89.1 | globlastp |
| LBY534 | clover\|14v1\|ERR351507S19XK19C163788_P1 | 1263 | 2442 | 2039 | 88.8 | globlastp |
| LBY534 | trigonella\|11v1\|SRR066194X103935 | 1264 | 2443 | 2039 | 88.6 | globlastp |
| LBY534 | chickpea\|13v2\|SRR133517.104302_P1 | 1265 | 2444 | 2039 | 88.5 | globlastp |
| LBY534 | clover\|14v1\|FY455337_P1 | 1266 | 2445 | 2039 | 88.5 | globlastp |
| LBY534 | lotus\|09v1\|LLAI967507_T1 | 1267 | — | 2039 | 88.4 | glotblastn |
| LBY534 | beech\|11v1\|AM062793_T1 | 1268 | — | 2039 | 88.15 | glotblastn |
| LBY534 | soybean\|15v1\|GLYMA16G23590 | 1269 | 2446 | 2039 | 87.9 | globlastp |
| LBY534 | medicago\|13v1\|AW690447_P1 | 1270 | 2447 | 2039 | 87.7 | globlastp |
| LBY534 | clover\|14v1\|BB922364_P1 | 1271 | 2448 | 2039 | 87.6 | globlastp |
| LBY534 | cassava\|09v1\|FF380292_P1 | 1272 | 2449 | 2039 | 87.2 | globlastp |
| LBY534 | eucalyptus\|11v2\|CD669872_P1 | 1273 | 2450 | 2039 | 86.9 | globlastp |
| LBY534 | cacao\|13v1\|CU583479_P1 | 1274 | 2451 | 2039 | 86.7 | globlastp |
| LBY534 | prunus\|10v1\|CN493300 | 1275 | 2452 | 2039 | 86.7 | globlastp |
| LBY534 | prunus_mume\|13v1\|DY640450 | 1276 | — | 2039 | 85.96 | glotblastn |
| LBY534 | chestnut\|14v1\|SRR006295X104875D1_P1 | 1277 | 2453 | 2039 | 85.9 | globlastp |
| LBY534 | oak\|10v1\|DN949898_P1 | 1278 | 2454 | 2039 | 85.9 | globlastp |
| LBY534 | vicia\|14v1\|JK265608 | 1279 | 2455 | 2039 | 85.7 | globlastp |
| LBY534 | blueberry\|12v1\|SRR353282X22176D1_P1 | 1280 | 2456 | 2039 | 85.2 | globlastp |
| LBY534 | kiwi\|gb166\|FG396316_P1 | 1281 | 2457 | 2039 | 85.2 | globlastp |
| LBY534 | tripterygium\|11v1\|SRR098677X122266 | 1282 | 2458 | 2039 | 85 | globlastp |
| LBY534 | strawberry\|11v1\|DY675315 | 1283 | 2459 | 2039 | 84.8 | globlastp |
| LBY534 | cassava\|09v1\|DB939613_P1 | 1284 | 2460 | 2039 | 84.5 | globlastp |
| LBY534 | castorbean\|14v2\|T23240_P1 | 1285 | 2461 | 2039 | 84.5 | globlastp |
| LBY534 | soybean\|15v1\|GLYMA01G36990 | 1286 | 2462 | 2039 | 84.5 | globlastp |
| LBY534 | ginseng\|13v1\|CN845970_P1 | 1287 | 2463 | 2039 | 84.4 | globlastp |
| LBY534 | ginseng\|13v1\|SRR547977.131107_P1 | 1288 | 2464 | 2039 | 84.2 | globlastp |
| LBY534 | momordica\|10v1\|SRR071315S0006507_T1 | 1289 | — | 2039 | 84.2 | glotblastn |
| LBY534 | amsonia\|11v1\|SRR098688X109511_P1 | 1290 | 2465 | 2039 | 84.1 | globlastp |
| LBY534 | chickpea\|13v2\|GR405699_P1 | 1291 | 2466 | 2039 | 84 | globlastp |
| LBY534 | cucumber\|09v1\|DV632297_P1 | 1292 | 2467 | 2039 | 84 | globlastp |
| LBY534 | euonymus\|11v1\|SRR070038X120108_P1 | 1293 | 2468 | 2039 | 84 | globlastp |
| LBY534 | watermelon\|11v1\|DV632297 | 1294 | 2469 | 2039 | 84 | globlastp |
| LBY534 | catharanthus\|11v1\|EG560910_T1 | 1295 | — | 2039 | 83.82 | glotblastn |
| LBY534 | chrysanthemum\|14v1\|CCOR13V1K23C241639_P1 | 1296 | 2470 | 2039 | 83.7 | globlastp |
| LBY534 | chrysanthemum\|14v1\|SRR525216X11931D1_P1 | 1297 | 2471 | 2039 | 83.7 | globlastp |
| LBY534 | cotton\|11v1\|CO079709_P1 | 1298 | 2472 | 2039 | 83.7 | globlastp |
| LBY534 | echinacea\|13v1\|EPURP13V11097243_P1 | 1299 | 2473 | 2039 | 83.7 | globlastp |
| LBY534 | melon\|10v1\|DV632297_P1 | 1300 | 2474 | 2039 | 83.7 | globlastp |
| LBY534 | cannabis\|12v1\|EW701265_P1 | 1301 | 2475 | 2039 | 83.5 | globlastp |
| LBY534 | cichorium\|14v1\|EH684964_P1 | 1302 | 2476 | 2039 | 83.5 | globlastp |
| LBY534 | cichorium\|14v1\|FL673555_P1 | 1303 | 2477 | 2039 | 83.5 | globlastp |
| LBY534 | cotton\|11v1\|DT548607_P1 | 1304 | 2478 | 2039 | 83.5 | globlastp |
| LBY534 | euonymus\|11v1\|SRR070038X100141_P1 | 1305 | 2479 | 2039 | 83.5 | globlastp |
| LBY534 | gossypium_raimondii\|13v1\|DT548607_P1 | 1306 | 2480 | 2039 | 83.5 | globlastp |
| LBY534 | solanum_phureja\|09v1\|SPHBG128606 | 1307 | 2481 | 2039 | 83.2 | globlastp |
| LBY534 | sunflower\|12v1\|DY917646 | 1308 | 2482 | 2039 | 83.2 | globlastp |
| LBY534 | ambrosia\|11v1\|SRR346935.105563_P1 | 1309 | 2483 | 2039 | 83 | globlastp |
| LBY534 | ambrosia\|11v1\|SRR346935.157047_P1 | 1310 | 2483 | 2039 | 83 | globlastp |
| LBY534 | ambrosia\|11v1\|SRR346943.118459_P1 | 1311 | 2484 | 2039 | 83 | globlastp |
| LBY534 | cirsium\|11v1\|SRR346952.111477_P1 | 1312 | 2485 | 2039 | 83 | globlastp |
| LBY534 | cyclamen\|14v1\|B14ROOTK19C105658_P1 | 1313 | 2486 | 2039 | 83 | globlastp |
| LBY534 | eggplant\|10v1\|FS028584_P1 | 1314 | 2487 | 2039 | 83 | globlastp |
| LBY534 | potato\|10v1\|BG592390_P1 | 1315 | 2488 | 2039 | 83 | globlastp |
| LBY534 | artemisia\|10v1\|EY036029_T1 | 1316 | — | 2039 | 82.96 | glotblastn |
| LBY534 | tabernaemontana\|11v1\|SRR098689X101423 | 1317 | 2489 | 2039 | 82.9 | globlastp |
| LBY534 | centaurea\|11v1\|EH723238_P1 | 1318 | 2490 | 2039 | 82.8 | globlastp |
| LBY534 | centaurea\|11v1\|EH735887_P1 | 1319 | 2490 | 2039 | 82.8 | globlastp |
| LBY534 | centaurea\|11v1\|SRR346938.293391_P1 | 1320 | 2491 | 2039 | 82.8 | globlastp |
| LBY534 | cirsium\|11v1\|SRR346952.1001395_P1 | 1321 | 2490 | 2039 | 82.8 | globlastp |
| LBY534 | clover\|14v1\|ERR351507S19XK19C169464_P1 | 1322 | 2492 | 2039 | 82.8 | globlastp |
| LBY534 | iceplant\|gb164\|AF069324_P1 | 1323 | 2493 | 2039 | 82.8 | globlastp |
| LBY534 | olea\|13v1\|SRR014463X19632D1_P1 | 1324 | 2494 | 2039 | 82.8 | globlastp |
| LBY534 | arnica\|11v1\|SRR099034X100432_P1 | 1325 | 2495 | 2039 | 82.7 | globlastp |
| LBY534 | tomato\|13v1\|BG128606 | 1326 | 2496 | 2039 | 82.7 | globlastp |
| LBY534 | vinca\|11v1\|SRR098690X136289 | 1327 | 2497 | 2039 | 82.6 | globlastp |
| LBY534 | clover\|14v1\|ERR351508S19XK19C342354_P1 | 1328 | 2498 | 2039 | 82.5 | globlastp |
| LBY534 | sunflower\|12v1\|CD852768 | 1329 | 2499 | 2039 | 82.5 | globlastp |
| LBY534 | ginseng\|13v1\|SRR547977.261920_P1 | 1330 | 2500 | 2039 | 82.3 | globlastp |
| LBY534 | ginseng\|13v1\|SRR547977.543304_T1 | 1331 | — | 2039 | 82.22 | glotblastn |
| LBY534 | lettuce\|12v1\|DW055302_P1 | 1332 | 2501 | 2039 | 82.2 | globlastp |
| LBY534 | tobacco\|gb162\|EB446193 | 1333 | 2502 | 2039 | 82.2 | globlastp |
| LBY534 | quinoa\|13v2\|SRR315568X470264 | 1334 | — | 2039 | 82.11 | glotblastn |
| LBY534 | ginseng\|13v1\|CN847457_P1 | 1335 | 2503 | 2039 | 82 | globlastp |
| LBY534 | watermelon\|11v1\|CV000272 | 1336 | 2504 | 2039 | 82 | globlastp |
| LBY534 | cucurbita\|11v1\|FG226969_T1 | 1337 | — | 2039 | 81.77 | glotblastn |
| LBY534 | conyza\|15v1\|BSS3K19C91419T1T1_T1 | 1338 | — | 2039 | 81.73 | glotblastn |
| LBY534 | ambrosia\|11v1\|SRR346935.140520_T1 | 1339 | — | 2039 | 81.62 | glotblastn |
| LBY534 | amaranthus\|13v1\|SRR039408X4117D1_P1 | 1340 | 2505 | 2039 | 81.6 | globlastp |
| LBY534 | vinca\|11v1\|SRR098690X105721 | 1341 | — | 2039 | 81.57 | glotblastn |
| LBY534 | platanus\|11v1\|SRR096786X105442_T1 | 1342 | — | 2039 | 81.53 | glotblastn |
| LBY534 | chrysanthemum\|14v1\|SRR290491X101994D1_P1 | 1343 | 2506 | 2039 | 81.5 | globlastp |
| LBY534 | chrysanthemum\|14v1\|SRR290491X291834D1_P1 | 1344 | 2506 | 2039 | 81.5 | globlastp |
| LBY534 | cucumber\|09v1\|CV000272_P1 | 1345 | 2507 | 2039 | 81.5 | globlastp |
| LBY534 | monkeyflower\|12v1\|GR114438_P1 | 1346 | 2508 | 2039 | 81.5 | globlastp |
| LBY534 | silene\|11v1\|SRR096785X107071 | 1347 | 2509 | 2039 | 81.4 | globlastp |
| LBY534 | soybean\|15v1\|XM_006573487 | 1348 | 2510 | 2039 | 81.3 | globlastp |
| LBY534 | valeriana\|11v1\|SRR099039X104136 | 1349 | — | 2039 | 81.28 | glotblastn |
| LBY534 | chrysanthemum\|14v1\|CCOR13V1K19C1436169_P1 | 1350 | 2511 | 2039 | 81.2 | globlastp |
| LBY534 | chrysanthemum\|14v1\|CCOR13V1K23C1221603_P1 | 1351 | 2512 | 2039 | 81.2 | globlastp |
| LBY534 | chrysanthemum\|14v1\|SRR290491X275667D1_P1 | 1352 | 2511 | 2039 | 81.2 | globlastp |
| LBY534 | nicotiana_benthamiana\|12v1\|CN743675_P1 | 1353 | 2513 | 2039 | 81.2 | globlastp |
| LBY534 | quinoa\|13v2\|SRR315568X135573 | 1354 | — | 2039 | 81.13 | glotblastn |
| LBY534 | flaveria\|11v1\|SRR149229.100345_P1 | 1355 | 2514 | 2039 | 81 | globlastp |
| LBY534 | flaveria\|11v1\|SRR149229.14075_P1 | 1356 | 2514 | 2039 | 81 | globlastp |
| LBY534 | melon\|10v1\|AM713496_P1 | 1357 | 2515 | 2039 | 81 | globlastp |
| LBY534 | poplar\|13v1\|BU869852_P1 | 1358 | 2516 | 2039 | 81 | globlastp |
| LBY534 | rosmarinus\|15v1\|SRR290363X117090D1 | 1359 | 2517 | 2039 | 81 | globlastp |
| LBY534 | monkeyflower\|12v1\|CV517335_P1 | 1360 | 2518 | 2039 | 80.5 | globlastp |
| LBY534 | trigonella\|11v1\|SRR066194X10642 | 1361 | 2519 | 2039 | 80.5 | globlastp |
| LBY534 | carrot\|14v1\|JG754424_T1 | 1362 | — | 2039 | 80.25 | glotblastn |
| LBY534 | aristolochia\|10v1\|FD748957_P1 | 1363 | 2520 | 2039 | 80.2 | globlastp |
| LBY534 | kiwi\|gb166\|FG408664_P1 | 1364 | 2521 | 2039 | 80.2 | globlastp |
| LBY534 | medicago\|13v1\|AW690619_P1 | 1365 | 2522 | 2039 | 80 | globlastp |
| LBY502 | switchgrass\|12v1\|DN145863 | 1962 | 3035 | 2070 | 84.9 | globlastp |
| LBY516 | sorghum\|13v2\|BF481534 | 1164 | 2351 | 2025 | 92.5 | globlastp |
| LBY516 | foxtail_millet\|14v1\|JK589458_P1 | 1165 | 2352 | 2025 | 84 | globlastp |
| LBY516 | switchgrass\|12v1\|FL768721 | 1166 | 2353 | 2025 | 83.8 | globlastp |
| LBY516 | switchgrass\|12v1\|FL819489 | 1167 | 2354 | 2025 | 82.9 | globlastp |
| LBY516 | maize\|15v1\|CD967058_P1 | 1168 | 2355 | 2025 | 82.2 | globlastp |
| LBY468 | gossypium_raimondii\|13v1\|DV848858_P1 | 210 | 2092 | 1996 | 99.3 | globlastp |
| LBY468 | cotton\|11v1\|CO069729_P1 | 211 | 2093 | 1996 | 98.2 | globlastp |
| LBY468 | cacao\|13v1\|CU515715_P1 | 212 | 2094 | 1996 | 87.3 | globlastp |
| LBY525 | foxtail_millet\|14v1\|PHY7SI024521M_P1 | 1237 | 2417 | 2033 | 81 | globlastp |
| LBY525 | maize\|15v1\|CA831126_P1 | 1238 | 2418 | 2033 | 80.7 | globlastp |
| LBY525 | maize\|15v1\|BU098613_T1 | 1239 | — | 2033 | 80.21 | glotblastn |
| LBY504 | aegilops\|16v1\|AET16V1CRP024106_P1 | 410 | 2019 | 2019 | 100 | globlastp |
| LBY504 | leymus\|gb166\|EG394962_P1 | 411 | 2267 | 2019 | 93.1 | globlastp |
| LBY504 | rye\|12v1\|DRR001012.826841 | 412 | — | 2019 | 86.82 | glotblastn |
| LBY503 | barley\|15v2\|BE412711_P1 | 1963 | 3036 | 2071 | 86.5 | globlastp |
| LYD1009 | ginseng\|13v1\|SRR547977.429385_P1 | 1467 | 2600 | 2049 | 82.1 | globlastp |
| LYD1009 | solanum_phureja\|09v1\|SPHBG127823 | 1468 | 2601 | 2049 | 81.8 | globlastp |
| LYD1009 | tomato\|13v1\|BG127823 | 1469 | 2602 | 2049 | 81.8 | globlastp |
| LYD1009 | olea\|13v1\|SRR014464X29050D1_P1 | 1470 | 2603 | 2049 | 81.5 | globlastp |
| LYD1009 | eggplant\|10v1\|FS043426_P1 | 1471 | 2604 | 2049 | 81.2 | globlastp |
| LYD1009 | nicotiana_benthamiana\|12v1\|EH368051_P1 | 1472 | 2605 | 2049 | 81.2 | globlastp |
| LYD1009 | sesame\|12v1\|SESI12V1284288 | 1473 | 2606 | 2049 | 81 | globlastp |
| LYD1009 | nicotiana_benthamiana\|12v1\|BP747800_P1 | 1474 | 2607 | 2049 | 80.9 | globlastp |
| LYD1009 | prunus\|10v1\|BU039091 | 1475 | 2608 | 2049 | 80.6 | globlastp |
| LYD1009 | prunus_mume\|13v1\|BU039091 | 1476 | 2609 | 2049 | 80.3 | globlastp |
| LYD1009 | castorbean\|14v2\|EE255678_P1 | 1477 | 2610 | 2049 | 80.1 | globlastp |
| LYD1009 | apple\|11v1\|CN544867_P1 | 1478 | 2611 | 2049 | 80 | globlastp |
| LYD1009 | centaurea\|11v1\|EH725977_P1 | 1479 | 2612 | 2049 | 80 | globlastp |
| LYD1009 | pepper\|14v1\|CA518795_P1 | 1480 | 2613 | 2049 | 80 | globlastp |
| LBY130 | chickpea\|13v2\|SRR133517.161558_P1 | 1957 | 3031 | 2061 | 84.3 | globlastp |
| LBY130 | medicago\|13v1\|AL377270_P1 | 1958 | 3032 | 2061 | 83.8 | globlastp |
| LBY130 | clover\|14v1\|BB911748_P1 | 1959 | 3033 | 2061 | 82.6 | globlastp |
| LYD1002 | maize\|15v1\|AI600738_P1 | 1428 | 2566 | 2042 | 92.1 | globlastp |
| LYD1002 | foxtail_millet\|14v1\|XM_004956952_P1 | 1429 | 2567 | 2042 | 88.4 | globlastp |
| LYD1002 | switchgrass\|12v1\|DT948969 | 1430 | 2568 | 2042 | 88.2 | globlastp |
| LYD1002 | switchgrass\|12v1\|FL834916 | 1431 | 2569 | 2042 | 83.7 | globlastp |
| LYD1002 | sugarcane\|10v1\|CA088562 | 1432 | — | 2042 | 82.88 | glotblastn |
| LYD1002 | millet\|10v1\|EVO454PM004505_T1 | 1433 | — | 2042 | 81.45 | glotblastn |
| LYD1002 | echinochloa\|14v1\|SRR522894X100689D1_P1 | 1434 | 2570 | 2042 | 80.1 | globlastp |
| LBY465 | wheat\|12v3\|AL825147 | 203 | 2086 | 1993 | 96.1 | globlastp |
| LBY465 | rye\|12v1\|DRR001012.105983 | 204 | 2087 | 1993 | 95.9 | globlastp |
| LBY465 | wheat\|12v3\|CA498813 | 205 | 2088 | 1993 | 95.7 | globlastp |
| LBY465 | brachypodium\|14v1\|DV482063_P1 | 206 | 2089 | 1993 | 92.5 | globlastp |
| LBY465 | rice\|15v1\|AU094600 | 207 | 2090 | 1993 | 88.9 | globlastp |
| LBY465 | foxtail_millet\|14v1\|XM_004956530_P1 | 208 | 2091 | 1993 | 88.7 | globlastp |
| LBY465 | maize\|15v1\|EC865300_T1 | 209 | — | 1993 | 88.56 | glotblastn |
| LYD1019 | soybean\|15v1\|GLYMA10G39130 | 1890 | 2978 | 2059 | 96.3 | globlastp |
| LYD1019 | soybean\|15v1\|GLYMA20G28680 | 1891 | 2979 | 2059 | 94.5 | globlastp |
| LYD1019 | pigeonpea\|11v1\|SRR054580X183204_P1 | 1892 | 2980 | 2059 | 93.7 | globlastp |
| LYD1019 | chickpea\|13v2\|GR915871_P1 | 1893 | 2981 | 2059 | 92.5 | globlastp |
| LYD1019 | medicago\|13v1\|SRR094956.105993_P1 | 1894 | 2982 | 2059 | 90.9 | globlastp |
| LYD1019 | clover\|14v1\|ERR351507S19XK19C285381_P1 | 1895 | 2983 | 2059 | 90.3 | globlastp |
| LYD1019 | clover\|14v1\|ERR351507S19XK19C407957_P1 | 1896 | 2984 | 2059 | 89.9 | globlastp |
| LYD1019 | soybean\|15v1\|GLYMA01G44570T2 | 1897 | 2985 | 2059 | 89.1 | globlastp |
| LYD1019 | pigeonpea\|11v1\|GW348376_P1 | 1898 | 2986 | 2059 | 88.2 | globlastp |
| LYD1019 | lotus\|09v1\|CRPLJ001657_P1 | 1899 | 2987 | 2059 | 87.8 | globlastp |
| LYD1019 | chickpea\|13v2\|SRR133517.236382_P1 | 1900 | 2988 | 2059 | 87.4 | globlastp |
| LYD1019 | cacao\|13v1\|CU518738_P1 | 1901 | 2989 | 2059 | 87 | globlastp |
| LYD1019 | lotus\|09v1\|CRPLJ010922_P1 | 1902 | 2990 | 2059 | 85.8 | globlastp |
| LYD1019 | lupin\|13v4\|SRR520491.1129811_P1 | 1903 | 2991 | 2059 | 85.5 | globlastp |
| LYD1019 | gossypium_raimondii\|13v1\|ES804423_P1 | 1904 | 2992 | 2059 | 84.8 | globlastp |
| LYD1019 | soybean\|15v1\|GLYMA11G00990 | 1905 | 2993 | 2059 | 84.6 | globlastp |
| LYD1019 | cassava\|09v1\|CK645101_T1 | 1906 | — | 2059 | 84.47 | glotblastn |
| LYD1019 | orange\|11v1\|CX072314_P1 | 1907 | 2994 | 2059 | 84.4 | globlastp |
| LYD1019 | clementine\|11v1\|CX072314_P1 | 1908 | 2995 | 2059 | 84.2 | globlastp |
| LYD1019 | gossypium_raimondii\|13v1\|DT460941_P1 | 1909 | 2996 | 2059 | 84.2 | globlastp |
| LYD1019 | cotton\|11v1\|DT460941_P1 | 1910 | 2997 | 2059 | 84 | globlastp |
| LYD1019 | castorbean\|14v2\|XM_002517050_P1 | 1911 | 2998 | 2059 | 83.7 | globlastp |
| LYD1019 | poplar\|13v1\|XM_002312504_P1 | 1912 | 2999 | 2059 | 83.6 | globlastp |
| LYD1019 | bean\|13v1\|SRR090491X1544612_P1 | 1913 | 3000 | 2059 | 82.9 | globlastp |
| LYD1019 | prunus\|10v1\|CN861180 | 1914 | 3001 | 2059 | 82.9 | globlastp |
| LYD1019 | lupin\|13v4\|SRR520491.108142_P1 | 1915 | 3002 | 2059 | 82.8 | globlastp |
| LYD1019 | poplar\|13v1\|BI068324_P1 | 1916 | 3003 | 2059 | 82.7 | globlastp |
| LYD1019 | grape\|13v1\|GSVIVT01018012001_P1 | 1917 | 3004 | 2059 | 81.8 | globlastp |
| LYD1019 | cassava\|09v1\|JGICASSAVA564VALIDM1_T1 | 1918 | — | 2059 | 81.8 | glotblastn |
| LYD1019 | medicago\|13v1\|XM_003610723_P1 | 1919 | 3005 | 2059 | 81.5 | globlastp |
| LYD1019 | strawberry\|11v1\|SRR034840S0001614 | 1920 | 3006 | 2059 | 80.7 | globlastp |
| LBY481 | sorghum\|13v2\|BE363278 | 308 | 2180 | 2006 | 80.2 | globlastp |
| LBY517 | sugarcane\|10v1\|CA110860 | 1169 | 2356 | 2026 | 97.1 | globlastp |
| LBY517 | sorghum\|13v2\|BE355988 | 1170 | 2357 | 2026 | 95.8 | globlastp |
| LBY517 | maize\|15v1\|AW566254_P1 | 1171 | 2358 | 2026 | 95.5 | globlastp |
| LBY517 | switchgrass\|12v1\|FL749080 | 1172 | 2359 | 2026 | 93.6 | globlastp |
| LBY517 | echinochloa\|14v1\|ECHC14V1K19C379638_P1 | 1173 | 2360 | 2026 | 93.3 | globlastp |
| LBY517 | echinochloa\|14v1\|SRR522894X142637D1_P1 | 1174 | 2361 | 2026 | 93.3 | globlastp |
| LBY517 | foxtail_millet\|14v1\|XM_004967880_P1 | 1175 | 2362 | 2026 | 91 | globlastp |
| LBY517 | millet\|10v1\|EVO454PM295042_P1 | 1176 | 2363 | 2026 | 87.3 | globlastp |
| LBY517 | brachypodium\|14v1\|DV477710_P1 | 1177 | 2364 | 2026 | 86.4 | globlastp |
| LBY517 | aegilops\|16v1\|AET16V1CRP032781_P1 | 1178 | 2365 | 2026 | 85.1 | globlastp |
| LBY517 | barley\|15v2\|AV835473_P1 | 1179 | 2366 | 2026 | 85.1 | globlastp |
| LBY517 | wheat\|12v3\|BE498060 | 1180 | 2367 | 2026 | 84.8 | globlastp |
| LBY517 | rice\|15v1\|BM420458 | 1181 | 2368 | 2026 | 83.6 | globlastp |
| LBY517 | lolium\|13v1\|ERR246395S13467_P1 | 1182 | 2369 | 2026 | 83.2 | globlastp |
| LBY517 | oat\|14v1\|SRR020741X278118D1_P1 | 1183 | 2370 | 2026 | 82.9 | globlastp |
| LBY517 | oat\|14v1\|GO583503_P1 | 1184 | 2371 | 2026 | 82.7 | globlastp |
| LBY517 | rye\|12v1\|DRR001012.194768 | 1185 | 2372 | 2026 | 80.3 | globlastp |
| LBY514 | sorghum\|13v2\|AW284979 | 1162 | 2349 | 2024 | 84.2 | globlastp |
| LBY514 | maize\|15v1\|BM501195_P1 | 1163 | 2350 | 2024 | 81.3 | globlastp |
| LBY484 | barley\|15v2\|AJ461534_P1 | 309 | 2181 | 2007 | 85.4 | globlastp |
| LBY484 | rye\|12v1\|DRR001012.113960 | 310 | 2182 | 2007 | 84.6 | globlastp |
| LBY484 | foxtail_millet\|14v1\|JK595893_P1 | 311 | 2183 | 2007 | 83.8 | globlastp |
| LBY484 | switchgrass\|12v1\|FL694715 | 312 | 2184 | 2007 | 82.2 | globlastp |
| LBY484 | switchgrass\|12v1\|DN142821 | 313 | 2185 | 2007 | 81.8 | globlastp |
| LBY484 | brachypodium\|14v1\|GT788071_T1 | 314 | — | 2007 | 80.25 | glotblastn |
| LBY466 | pigeonpea\|11v1\|GR471030_P1 | 1960 | 3034 | 2064 | 81.5 | globlastp |
| LBY466 | cowpea\|12v1\|FC458535_T1 | 1961 | — | 2064 | 80.26 | glotblastn |
| LYD1008 | bean\|13v1\|EX303717_P1 | 1466 | 2599 | 2048 | 81.1 | globlastp |
| LBY507 | arabidopsis_lyrata\|13v1\|BT002883_P1 | 413 | 2268 | 2020 | 82.7 | globlastp |
| LYD1013 | trigonella\|11v1\|SRR066194X107842 | 1515 | 2645 | 2053 | 97.5 | globlastp |
| LYD1013 | soybean\|15v1\|GLYMA15G10030 | 1516 | 2646 | 2053 | 90.1 | globlastp |
| LYD1013 | chickpea\|13v2\|FL512458_P1 | 1517 | 2647 | 2053 | 90 | globlastp |
| LYD1013 | pigeonpea\|11v1\|SRR054580X103170_P1 | 1518 | 2648 | 2053 | 89.9 | globlastp |
| LYD1013 | bean\|13v1\|EC911756_P1 | 1519 | 2649 | 2053 | 89.5 | globlastp |
| LYD1013 | clover\|14v1\|BB932937_P1 | 1520 | 2650 | 2053 | 89.4 | globlastp |
| LYD1013 | lupin\|13v4\|SRR520491.1009949_P1 | 1521 | 2651 | 2053 | 88.3 | globlastp |
| LYD1013 | lupin\|13v4\|SRR520490.308366_P1 | 1522 | 2652 | 2053 | 88.2 | globlastp |
| LYD1013 | cacao\|13v1\|CF974660_P1 | 1523 | 2653 | 2053 | 86.7 | globlastp |
| LYD1013 | peanut\|13v1\|GO342967_T1 | 1524 | — | 2053 | 86.62 | glotblastn |
| LYD1013 | soybean\|15v1\|GLYMA05G27240 | 1525 | 2654 | 2053 | 86 | globlastp |
| LYD1013 | orange\|11v1\|CK936073_P1 | 1526 | 2655 | 2053 | 85.7 | globlastp |
| LYD1013 | clementine\|11v1\|CK936073_P1 | 1527 | 2656 | 2053 | 85.6 | globlastp |
| LYD1013 | cotton\|11v1\|CO082712_P1 | 1528 | 2657 | 2053 | 85.6 | globlastp |
| LYD1013 | oak\|10v1\|FP050777_P1 | 1529 | 2658 | 2053 | 85.4 | globlastp |
| LYD1013 | chestnut\|14v1\|SRR006295X11713D1_P1 | 1530 | 2659 | 2053 | 85.2 | globlastp |
| LYD1013 | peanut\|13v1\|GO257834_P1 | 1531 | 2660 | 2053 | 85.2 | globlastp |
| LYD1013 | soybean\|15v1\|GLYMA08G10180 | 1532 | 2661 | 2053 | 85.2 | globlastp |
| LYD1013 | euphorbia\|11v1\|DV130105_P1 | 1533 | 2662 | 2053 | 85 | globlastp |
| LYD1013 | beech\|11v1\|SRR006293.16965_T1 | 1534 | — | 2053 | 84.93 | glotblastn |
| LYD1013 | gossypium_raimondii\|13v1\|DT466208_P1 | 1535 | 2663 | 2053 | 84.9 | globlastp |
| LYD1013 | apple\|11v1\|CN490188_P1 | 1536 | 2664 | 2053 | 84.7 | globlastp |
| LYD1013 | clover\|14v1\|ERR351507S19XK19C298384_P1 | 1537 | 2665 | 2053 | 84.7 | globlastp |
| LYD1013 | poplar\|13v1\|BI129521_P1 | 1538 | 2666 | 2053 | 84.5 | globlastp |
| LYD1013 | cotton\|11v1\|BE055655_P1 | 1539 | 2667 | 2053 | 84.4 | globlastp |
| LYD1013 | gossypium_raimondii\|13v1\|BE055655_P1 | 1540 | 2668 | 2053 | 84.4 | globlastp |
| LYD1013 | gossypium_raimondii\|13v1\|DT456531_P1 | 1541 | 2669 | 2053 | 84.4 | globlastp |
| LYD1013 | ginseng\|13v1\|HS079032_P1 | 1542 | 2670 | 2053 | 84.2 | globlastp |
| LYD1013 | prunus\|10v1\|BU039026 | 1543 | 2671 | 2053 | 84.2 | globlastp |
| LYD1013 | tabernaemontana\|11v1\|SRR098689X100085 | 1544 | 2672 | 2053 | 84.2 | globlastp |
| LYD1013 | euonymus\|11v1\|SRR070038X100411_T1 | 1545 | — | 2053 | 83.92 | glotblastn |
| LYD1013 | cassava\|09v1\|CK645948_P1 | 1546 | 2673 | 2053 | 83.9 | globlastp |
| LYD1013 | eucalyptus\|11v2\|SRR001659X108177_P1 | 1547 | 2674 | 2053 | 83.6 | globlastp |
| LYD1013 | poplar\|13v1\|AI166428_P1 | 1548 | 2675 | 2053 | 83.6 | globlastp |
| LYD1013 | watermelon\|11v1\|VMEL00221736650652 | 1549 | 2676 | 2053 | 83.5 | globlastp |
| LYD1013 | lettuce\|12v1\|DW062479_P1 | 1550 | 2677 | 2053 | 82.9 | globlastp |
| LYD1013 | amsonia\|11v1\|SRR098688X110424_P1 | 1551 | 2678 | 2053 | 82.6 | globlastp |
| LYD1013 | sunflower\|12v1\|DY938159 | 1552 | 2679 | 2053 | 82.6 | globlastp |
| LYD1013 | quinoa\|13v2\|SRR315568X18920 | 1553 | 2680 | 2053 | 82.4 | globlastp |
| LYD1013 | ambrosia\|11v1\|SRR346935.103084_P1 | 1554 | 2681 | 2053 | 82.3 | globlastp |
| LYD1013 | b_rapa\|11v1\|CX194977_P1 | 1555 | 2682 | 2053 | 82.3 | globlastp |
| LYD1013 | solanum_phureja\|09v1\|SPHAW031513 | 1556 | 2683 | 2053 | 82.2 | globlastp |
| LYD1013 | blueberry\|12v1\|DR068190_T1 | 1557 | — | 2053 | 82.13 | glotblastn |
| LYD1013 | beet\|12v1\|BQ489289_P1 | 1558 | 2684 | 2053 | 82 | globlastp |
| LYD1013 | aristolochia\|10v1\|SRR039082S0001536_P1 | 1559 | 2685 | 2053 | 81.9 | globlastp |
| LYD1013 | flaveria\|11v1\|SRR149229.155930_T1 | 1560 | — | 2053 | 81.85 | glotblastn |
| LYD1013 | chrysanthemum\|14v1\|CCOR13V1K19C1039119_P1 | 1561 | 2686 | 2053 | 81.8 | globlastp |
| LYD1013 | b_rapa\|11v1\|CD838859_P1 | 1562 | 2687 | 2053 | 81.7 | globlastp |
| LYD1013 | canola\|11v1\|DY001784_P1 | 1563 | 2688 | 2053 | 81.6 | globlastp |
| LYD1013 | chrysanthemum\|14v1\|SRR525216X24711D1_P1 | 1564 | 2689 | 2053 | 81.6 | globlastp |
| LYD1013 | triphysaria\|13v1\|DR175609 | 1565 | 2690 | 2053 | 81.6 | globlastp |
| LYD1013 | amaranthus\|13v1\|SRR172675X568834D1_P1 | 1566 | 2691 | 2053 | 81.5 | globlastp |
| LYD1013 | parsley\|14v1\|BSS12K19C350265_P1 | 1567 | 2692 | 2053 | 81.4 | globlastp |
| LYD1013 | b_oleracea\|14v1\|DY020357_P1 | 1568 | 2693 | 2053 | 81.3 | globlastp |
| LYD1013 | carrot\|14v1\|JG754131_P1 | 1569 | 2694 | 2053 | 81.3 | globlastp |
| LYD1013 | oil_palm\|11v1\|GH637240_P1 | 1570 | 2695 | 2053 | 81.3 | globlastp |
| LYD1013 | ambrosia\|11v1\|SRR346935.133553_P1 | 1571 | 2696 | 2053 | 81.2 | globlastp |
| LYD1013 | b_oleracea\|14v1\|DY007521_P1 | 1572 | 2697 | 2053 | 81.2 | globlastp |
| LYD1013 | rosmarinus\|15v1\|SRR290363X152222D1 | 1573 | 2698 | 2053 | 81.2 | globlastp |
| LYD1013 | soybean\|15v1\|GLYMA13G29011 | 1574 | — | 2053 | 81.15 | glotblastn |
| LYD1013 | b_oleracea\|14v1\|DY001784_P1 | 1575 | 2699 | 2053 | 81.1 | globlastp |
| LYD1013 | flaveria\|11v1\|SRR149229.120924_P1 | 1576 | 2700 | 2053 | 81.1 | globlastp |
| LYD1013 | poppy\|11v1\|FE967004_P1 | 1577 | 2701 | 2053 | 81.1 | globlastp |
| LYD1013 | castorbean\|14v2\|XM_002519626_P1 | 1578 | 2702 | 2053 | 81 | globlastp |
| LYD1013 | coconut\|14v1\|COCOS14V1K19C1376293_P1 | 1579 | 2703 | 2053 | 81 | globlastp |
| LYD1013 | oil_palm\|11v1\|EY413388_P1 | 1580 | 2704 | 2053 | 81 | globlastp |
| LYD1013 | chrysanthemum\|14v1\|SRR290491X229716D1_P1 | 1581 | 2705 | 2053 | 80.9 | globlastp |
| LYD1013 | thellungiella_parvulum\|13v1\|SRR487818.185444 | 1582 | 2706 | 2053 | 80.9 | globlastp |
| LYD1013 | tomato\|13v1\|BG133028 | 1583 | 2707 | 2053 | 80.9 | globlastp |
| LYD1013 | chrysanthemum\|14v1\|SRR290491X134762D1_T1 | 1584 | — | 2053 | 80.79 | glotblastn |
| LYD1013 | cichorium\|14v1\|EH672560_P1 | 1585 | 2708 | 2053 | 80.7 | globlastp |
| LYD1013 | spinach\|15v1\|SO15V1K19C128411T1 | 1586 | 2709 | 2053 | 80.7 | globlastp |
| LYD1013 | thellungiella_halophilum\|13v1\|SRR487818.112244 | 1587 | 2710 | 2053 | 80.7 | globlastp |
| LYD1013 | amborella\|12v3\|CO996274_P1 | 1588 | 2711 | 2053 | 80.6 | globlastp |
| LYD1013 | arabidopsis_lyrata\|13v1\|Z17449_P1 | 1589 | 2712 | 2053 | 80.6 | globlastp |
| LYD1013 | solanum_phureja\|09v1\|SPHBG133028 | 1590 | 2713 | 2053 | 80.6 | globlastp |
| LYD1013 | strawberry\|11v1\|CO817113 | 1591 | 2714 | 2053 | 80.6 | globlastp |
| LYD1013 | plantago\|11v2\|SRR066373X141251_T1 | 1592 | — | 2053 | 80.59 | glotblastn |
| LYD1013 | amorphophallus\|11v2\|SRR089351X186863_P1 | 1593 | 2715 | 2053 | 80.5 | globlastp |
| LYD1013 | coconut\|14v1\|COCOS14V1K23C1251450_P1 | 1594 | 2716 | 2053 | 80.5 | globlastp |
| LYD1013 | flaveria\|11v1\|SRR149229.360896_P1 | 1595 | 2717 | 2053 | 80.5 | globlastp |
| LYD1013 | quinoa\|13v2\|SRR315568X285978 | 1596 | 2718 | 2053 | 80.5 | globlastp |
| LYD1013 | b_rapa\|11v1\|DY007521_P1 | 1597 | 2719 | 2053 | 80.4 | globlastp |
| LYD1013 | chrysanthemum\|14v1\|SRR290491X1023D1_T1 | 1598 | — | 2053 | 80.33 | glotblastn |
| LYD1013 | arabidopsis\|13v2\|AT5G46210_P1 | 1599 | 2720 | 2053 | 80.3 | globlastp |
| LYD1013 | silene\|11v1\|SRR096785X101467 | 1600 | 2721 | 2053 | 80.3 | globlastp |
| LYD1013 | chrysanthemum\|14v1\|CCOR13V1K19C1304282_T1 | 1601 | — | 2053 | 80.2 | glotblastn |
| LYD1013 | prunus_mume\|13v1\|CB821991 | 1602 | 2722 | 2053 | 80.1 | globlastp |
| LYD1013 | tomato\|13v1\|AW031513 | 1603 | 2723 | 2053 | 80 | globlastp |
| LBY502 | barley\|15v2\|BF622472_T1 | 378 | — | 2017 | 97.11 | glotblastn |
| LBY502 | rye\|12v1\|DRR001012.100524 | 379 | 2246 | 2017 | 96.8 | globlastp |
| LBY502 | rye\|12v1\|DRR001012.147806 | 380 | 2247 | 2017 | 96.8 | globlastp |
| LBY502 | aegilops\|16v1\|EMT24464_T1 | 381 | — | 2017 | 95.1 | glotblastn |
| LBY502 | oat\|14v1\|SRR020741X107067D1_T1 | 382 | — | 2017 | 91.03 | glotblastn |
| LBY502 | lolium\|13v1\|SRR029311X9972_P1 | 383 | 2248 | 2017 | 91 | globlastp |
| LBY502 | oat\|14v1\|ASTE13V1K19C123162_P1 | 384 | 2249 | 2017 | 91 | globlastp |
| LBY502 | brachypodium\|14v1\|DV471737_P1 | 385 | 2250 | 2017 | 88.1 | globlastp |
| LBY502 | foxtail_millet\|14v1\|JK561802_P1 | 386 | 2251 | 2017 | 87.7 | globlastp |
| LBY502 | aegilops\|16v1\|AET16V1PRD062772_T1 | 387 | — | 2017 | 86.73 | glotblastn |
| LBY502 | cenchrus\|13v1\|EB653773_P1 | 388 | 2252 | 2017 | 86.4 | globlastp |
| LBY502 | foxtail_millet\|14v1\|JK561801_T1 | 389 | — | 2017 | 86.36 | glotblastn |
| LBY502 | aegilops\|16v1\|AET16V1CRP012954_T1 | 390 | — | 2017 | 85.84 | glotblastn |
| LBY502 | millet\|10v1\|EVO454PM085605_P1 | 391 | 2253 | 2017 | 85.7 | globlastp |
| LBY502 | sorghum\|13v2\|BE919204 | 392 | — | 2017 | 84.42 | glotblastn |
| LBY502 | brachypodium\|14v1\|DV472160_P1 | 393 | 2254 | 2017 | 84.2 | globlastp |
| LBY502 | maize\|15v1\|CD437959_T1 | 394 | — | 2017 | 82.47 | glotblastn |
| LBY502 | sorghum\|13v2\|AW672254 | 395 | — | 2017 | 82.47 | glotblastn |
| LBY502 | maize\|15v1\|CB280823_P1 | 396 | 2255 | 2017 | 82.1 | globlastp |
| LBY502 | rice\|15v1\|GFXAL662984X15 | 397 | 2256 | 2017 | 80.4 | globlastp |
| LBY518 | maize\|15v1\|SRR014549X290068_T1 | 1186 | — | 2027 | 98.51 | glotblastn |
| LBY518 | maize\|15v1\|CD966991_P1 | 1187 | 2373 | 2027 | 98.5 | globlastp |
| LBY518 | sorghum\|13v2\|BI245804 | 1188 | 2374 | 2027 | 94.5 | globlastp |
| LBY518 | foxtail_millet\|14v1\|JK610034_P1 | 1189 | 2375 | 2027 | 92.3 | globlastp |
| LBY518 | switchgrass\|12v1\|FL771179 | 1190 | 2376 | 2027 | 92 | globlastp |
| LBY518 | switchgrass\|12v1\|HO320554 | 1191 | 2377 | 2027 | 91.2 | globlastp |
| LBY518 | brachypodium\|14v1\|XM_003574311_P1 | 1192 | 2378 | 2027 | 87.1 | globlastp |
| LBY518 | barley\|15v2\|EX581303_P1 | 1193 | 2379 | 2027 | 86.2 | globlastp |
| LBY518 | rice\|15v1\|BI812624 | 1194 | 2380 | 2027 | 85.5 | globlastp |
| LBY511 | switchgrass\|12v1\|DN143676 | 434 | 2287 | 2022 | 94.4 | globlastp |
| LBY511 | millet\|10v1\|EVO454PM044254_P1 | 435 | 2288 | 2022 | 88.3 | globlastp |
| LBY511 | sorghum\|13v2\|XM_002444635 | 436 | 2289 | 2022 | 86.4 | globlastp |
| LYD1006 | soybean\|15v1\|GLYMA07G07350T2 | 1461 | 2594 | 2046 | 92.6 | globlastp |
| LYD1006 | bean\|13v1\|FE897660_P1 | 1462 | 2595 | 2046 | 88 | globlastp |

[1826] Table 305: Provided are the homologous (e.g., orthologous) polypeptides and polynucleotides of the genes for increasing yield (e.g., seed yield, fiber yield and/or quality), oil content, growth rate, photosynthetic capacity, vigor, biomass, abiotic stress tolerance, nitrogen use efficiency, water use efficiency and fertilizer use efficiency of a plant which are listed in Table 304 (Example 26). Homology was calculated as % of identity over the aligned sequences. The query sequences were the polypeptide sequences depicted in Table 304 (Example 26). The subject sequences are protein sequences identified in the database based on greater than 80% global identity to the predicted translated sequences of the query nucleotide sequences or to the polypeptide sequences. “P.N.”=polynucleotide; “P.P.”=polypeptide; “Algor.”=algorithm (used for sequence alignment and determination of percent homology); “Hom.”—homology; “iden.”—identity; “glob.”—global.

[1827] The output of the functional genomics approach described herein is a set of genes highly predicted to improve yield and/or other agronomic important traits such as growth rate, photosynthetic capacity, vigor, oil content, fiber yield and/or quality, biomass, growth rate, abiotic stress tolerance, nitrogen use efficiency, water use efficiency and fertilizer use efficiency of a plant by increasing their expression. Although each gene is predicted to have its own impact, modifying the mode of expression of more than one gene is expected to provide an additive or synergistic effect on the plant yield and/or other agronomic important yields performance. Altering the expression of each gene described here alone or set of genes together increases the overall yield and/or other agronomic important traits, hence expects to increase agricultural productivity.

### Example 28

### Gene Cloning and Generation of Binary Vectors for Plant Expression

[1828] To validate their role in improving yield, selected genes were over-expressed in plants, as follows.

[1829] Cloning Strategy

[1830] Selected genes from those presented in Examples 1-27 hereinabove were cloned into binary vectors for the generation of transgenic plants. For cloning, the full-length open reading frames (ORFs) were identified. EST clusters and in some cases mRNA sequences were analyzed to identify the entire open reading frame by comparing the results of several translation algorithms to known proteins from other plant species.

[1831] In order to clone the full-length cDNAs, reverse transcription (RT) followed by polymerase chain reaction (PCR; RT-PCR) was performed on total RNA extracted from leaves, roots or other plant tissues, growing under normal, limiting or stress conditions. Total RNA extraction, production of cDNA and PCR amplification was performed using standard protocols described elsewhere (Sambrook J., E. F. Fritsch, and T. Maniatis. 1989. Molecular Cloning. A Laboratory Manual, 2nd Ed. Cold Spring Harbor Laboratory Press, New York) which are well known to those skilled in the art. PCR products were purified using PCR purification kit (Qiagen).

[1832] Usually, 2 sets of primers were prepared for the amplification of each gene, via nested PCR (if required). Both sets of primers were used for amplification on a cDNA. In case no product was obtained, a nested PCR reaction was performed. Nested PCR was performed by amplification of the gene using external primers and then using the produced PCR product as a template for a second PCR reaction, where the internal set of primers were used. Alternatively, one or two of the internal primers were used for gene amplification, both in the first and the second PCR reactions (meaning only 2-3 primers are designed for a gene). To facilitate further cloning of the cDNAs, an 8-12 base pairs (bp) extension was added to the 5′ of each internal primer. The primer extension includes an endonuclease restriction site. The restriction sites were selected using two parameters: (a) the restriction site does not exist in the cDNA sequence; and (b) the restriction sites in the forward and reverse primers were designed such that the digested cDNA was inserted in the sense direction into the binary vector utilized for transformation.

[1833] PCR products were digested with the restriction endonucleases (New England BioLabs Inc.) according to the sites designed in the primers. Each digested/ undigested PCR product was inserted into a high copy vector pUC19 (New England BioLabs Inc], or into plasmids originating from this vector. In some cases the undigested PCR product was inserted into pCR-Blunt II-TOPO (Invitrogen) or into pJET1.2 (CloneJET PCR Cloning Kit, Thermo Scientific) or directly into the binary vector. The digested/undigested products and the linearized plasmid vector were ligated using T4 DNA ligase enzyme (Roche, Switzerland or other manufacturers). In cases where pCR- Blunt II-TOPO is used no T4 ligase was needed.

[1834] Sequencing of the inserted genes was performed using the ABI 377 sequencer (Applied Biosystems). In some cases, after confirming the sequences of the cloned genes, the cloned cDNA was introduced into a modified pGI binary vector containing the At6669 promoter (SEQ ID NO: 25), such as the pQFNc or pQsFN vectors, and the NOS terminator (SEQ ID NO: 36) via digestion with appropriate restriction endonucleases.

[1835] Several DNA sequences of the selected genes were synthesized by GeneArt™ (Life Technologies, Grand Island, N.Y., USA) or GenScript (GenScript USA Inc). Synthetic DNA was designed in silico. Suitable restriction enzymes sites were added to the cloned sequences at the 5′ end and at the 3′ end to enable later cloning into the desired binary vector.

[1836] Binary vectors—The pPI plasmid vector was constructed by inserting a synthetic poly-(A) signal sequence, originating from pGL3 basic plasmid vector (Promega, GenBank Accession No. U47295; nucleotides 4658-4811) into the HindIII restriction site of the binary vector pBI101.3 (Clontech, GenBank Accession No. U12640). pGI is similar to pPI, but the original gene in the backbone is GUS-Intron and not GUS.

[1837] The modified pGI vector (e.g., pQFN, pQFNc, pQFNd (FIG. 2), pQYN_6669 (FIG. 1), pQNa_RP (FIG. 4), pQFYN (FIG. 7), pQXNc (FIG. 8), pQ6sVN (FIG. 11) or pQsFN (FIG. 12) is a modified version of the pGI vector in which the cassette is inverted between the left and right borders so the gene and its corresponding promoter are close to the right border and the NPTII gene is close to the left border.

[1838] In case of Arabidopsis transformation, the pQFN, pQFNc, pQFNd, pQYN_6669, pQNa_RP, pQFYN, pQXNc, or pQsFN were used.

[1839] At6669, the new Arabidopsis thaliana promoter sequence (SEQ ID NO: 25) was inserted in the modified pGI binary vector, upstream to the cloned genes, followed by DNA ligation and binary plasmid extraction from positive E. coli colonies, as described above. Colonies were analyzed by PCR using the primers covering the insert which were designed to span the introduced promoter and gene. Positive plasmids were identified, isolated and sequenced.

[1840] In case of Brachypodium transformation, after confirming the sequences of the cloned genes, the cloned cDNAs were introduced into pQ6sVN (FIG. 11) containing 35S promoter (SEQ ID NO: 37) and the NOS terminator (SEQ ID NO: 36) via digestion with appropriate restriction endonucleases. The genes were cloned downstream to the 35S promoter and upstream to the NOS terminator. In the pQ6sVN vector the Hygromycin resistance gene cassette and the Bar_GA resistance gene cassette replaced the NPTII resistance gene cassette. pQ6sVN contains the 35S promoter (SEQ ID NO: 37). Bar_GA resistance gene (SEQ ID NO: 39) is an optimized sequence of the BAR gene for expression in Brachypodium plants (ordered from GeneArt™).

[1841] Additionally or alternatively, Brachypodium transformation was performed using the pEBbVNi vector. pEBbVNi (FIG. 9A) is a modified version of pJJ2LB in which the Hygromycin resistance gene was replaced with the BAR gene which confers resistance to the BASTA herbicide [BAR gene coding sequence is provided in GenBank Accession No. JQ293091.1 (SEQ ID NO: 38); further description is provided in Akama K, et al. “Efficient Agrobacterium-mediated transformation of Arabidopsis thaliana using the bar gene as selectable marker”, Plant Cell Rep. 1995, 14(7):450-4; Christiansen P, et al. “A rapid and efficient transformation protocol for the grass Brachypodium distachyon”, Plant Cell Rep. 2005 March; 23(10-11):751-8. Epub 2004 Oct. 19; and Păcurar D I, et al. “A high-throughput Agrobacterium-mediated transformation system for the grass model species Brachypodium distachyon L”, Transgenic Res. 2008 17(5):965-75; each of which is fully incorporated herein by reference in its entirety]. The pEBbVNi construct contains the 35S promoter (SEQ ID NO: 37). pJJ2LB is a modified version of pCambia0305.2 (Cambia).

[1842] In case genomic DNA was cloned, the genes were amplified by direct PCR on genomic DNA extracted from leaf tissue using the DNAeasy kit (Qiagen Cat. No. 69104).

[1843] Table 306 below provides the cloned polynucleotides encoding the polytpeptides of some embodiments of the invention.

TABLE 306
Cloned genes

| Gene | High copy | | Primers used | Polynucleotide | Polypeptide |
|---|---|---|---|---|---|
| Name | plasmid | Organism | SEQ ID NOs: | SEQ ID NO: | SEQ ID NO: |
| LBY130 | LBY130_GA | | | 125 | 1992 |
| MGP93 | MGP93_GA | | | 192 | 2060 |
| LBY465 | LBY465_GA | | | 126 | 1993 |
| LBY466 | LBY466 | Phaseolus vulgaris | 3131, 3078, 3112, 3073 | 127 | 2064 |
| LBY467 | LBY467_GA | | | 128 | 1995 |
| LBY468 | LBY468 | COTTON Gossypium hirsutum | 3144, 3143, 3144, 3145 | 129 | 1996 |
| LBY469 | LBY469 | COTTON Gossypium hirsutum | 3120, 3088, 3130, 3082 | 130 | 1997 |
| LBY471 | LBY471 | FOXTAIL Setaria italica | 3115, 3134, 3125, 3133 | 131 | 2065 |
| LBY472 | LBY472_GA | | | 132 | 1999 |
| LBY473 | LBY473_GA | | | 133 | 2000 |
| LBY474 | LBY474 | FOXTAIL Setaria italica | 3099, 3069, 3099, 3076 | 134 | 2066 |
| LBY476 | LBY476_GA | | | 135 | 2002 |
| LBY477 | LBY477_GA | | | 136 | 2003 |
| LBY478 | LBY478_GA | | | 137 | 2004 |
| LBY479 | LBY479_GA | | | 138 | 2005 |
| LBY481 | LBY481_GA | | | 139 | 2006 |
| LBY484 | LBY484_GA | | | 140 | 2007 |
| LBY485 | LBY485 | RICE Oryza sativa L. | 3106, 3097, 3119, 3096 | 141 | 2067 |
| LBY489 | LBY489_GA | | | 142 | 2009 |
| LBY493 | LBY493 | SORGHUM Sorghum bicolor | 3116, 3147, 3116, 3147 | 143 | 2068 |
| LBY496 | LBY496_GA | | | 144 | 2012 |
| LBY497 | LBY497_GA | | | 145 | 2013 |
| LBY499 | LBY499 | TOMATO Lycopersicum esculentum | 3122, 3061, 3129, 3068 | 146 | 2014 |
| LBY500 | LBY500 | TOMATO Lycopersicum esculentum | 3107, 3077, 3127, 3066 | 147 | 2069 |
| LBY501 | LBY501_GA | | | 148 | 2016 |
| LBY502 | LBY502 | Wheat | 3113, 3065, 3124, 3071 | 149 | 2070 |
| LBY503 | LBY503 | Wheat | 3152, 3081, 3152, 3087 | 150 | 2071 |
| LBY504 | LBY504 | Wheat | 3102, 3148, 3101, 3146 | 151 | 2072 |
| LBY507 | LBY507_GA | | | 152 | 2020 |
| LBY508 | LBY508 | BARLEY Hordeum vulgare L. | 3128, 3092, 3117, 3150 | 153 | 2073 |
| LBY511 | LBY511_GA | | | 154 | 2022 |
| LBY512 | LBY512 | FOXTAIL Setaria italica | 3123, 3153, 3156, 3154 | 1972 | 3041 |
| LBY513 | LBY513_GA | | | 155 | 2023 |
| LBY514 | LBY514_GA | | | 156 | 2024 |
| LBY515 | LBY515 | gossypium raimondii | 3103, 3083, 3111, 3151 | 1973 | 3043 |
| LBY516 | LBY516_GA | | | 157 | 2025 |
| LBY517 | LBY517_GA | | | 158 | 2026 |
| LBY518 | LBY518_GA | | | 159 | 2027 |
| LBY519 | LBY519_GA | | | 160 | 2028 |
| LBY520 | LBY520 | physcomitrella | 3104, 3084, 3105, 3086 | 161 | 2029 |
| LBY522 | LBY522 | RICE Oryza sativa L. | 3132, 3067, 3108, 3079 | 162 | 2074 |
| LBY523 | LBY523_GA | | | 163 | 2031 |
| LBY524 | LBY524_GA | | | 164 | 2032 |
| LBY525 | LBY525 | RICE Oryza sativa L. | 3121, 3155, 3121, 3155 | 165 | 2033 |
| LBY527 | LBY527_GA | | | 166 | 2034 |
| LBY528 | LBY528_GA | | | 167 | 2035 |
| LBY529 | LBY529_GA | | | 168 | 2036 |
| LBY530 | LBY530_GA | | | 169 | 2037 |
| LBY531 | LBY531_GA | | | 170 | 2038 |
| LBY534 | LBY534 | SOYBEAN Glycine max | 3063, 3089, 3070, 3090 | 171 | 2039 |
| LYD1000 | LYD1000_GA | | | 172 | 2040 |
| LYD1001 | LYD1001_GA | | | 173 | 2041 |
| LYD1002 | LYD1002 | Sorghum bicolor | 3110, 3094, 3118, 3091 | 174 | 2042 |
| LYD1003 | LYD1003_GA | | | 175 | 2043 |
| LYD1004 | LYD1004_GA | | | 176 | 2044 |
| LYD1005 | LYD1005_GA | | | 177 | 2045 |
| LYD1006 | LYD1006_GA | | | 178 | 2046 |
| LYD1007 | LYD1007_GA | | | 179 | 2047 |
| LYD1008 | LYD1008_GA | | | 180 | 2048 |
| LYD1009 | LYD1009_GA | | | 181 | 2049 |
| LYD1010 | LYD1010 | Phaseolus vulgaris | 3139, 3098, 3140, 3100 | 182 | 2075 |
| LYD1011 | LYD1011 | Phaseolus vulgaris | 3137, 3095, 3141, 3085 | 183 | 2051 |
| LYD1012 | LYD1012_GA | | | 184 | 2052 |
| LYD1013 | LYD1013_GA | | | 185 | 2053 |
| LYD1014 | LYD1014_GA | | | 186 | 2054 |
| LYD1015 | LYD1015 | SOYBEAN Glycine max | 3135, 3093, 3136, 3149 | 187 | 2076 |
| LYD1016 | LYD1016 | SOYBEAN Glycine max | 3109, 3064, 3109, 3080 | 188 | 2056 |
| LYD1017 | LYD1017 | Phaseolus vulgaris | 3126, 3062, 3114, 3075 | 189 | 2057 |
| LYD1018 | LYD1018_GA | | | 190 | 2058 |
| LYD1019 | LYD1019 | Phaseolus vulgaris | 3142, 3074, 3138, 3072 | 191 | 2059 |

Table 306. Cloned genes. Provided are the gene names, organisms from which they were derived, and polynucleotide and polypeptide sequence identifiers of selected genes of some embodiments of the invention.
“GA” - GeneArt ™/GenScript (synthetically prepared gene sequence).

### Example 29

### Transforming Agrobacterium tumefaciens Cells with Binary Vectors Harboring Putative Genes

[1844] The above described binary vectors were used to transform Agrobacterium cells. Two additional binary constructs, having only the At6669 or the 35S promoter, or no additional promoter were used as negative controls.

[1845] The binary vectors were introduced to Agrobacterium tumefaciens GV3101 or LB4404 (for Arabidopsis) or AGL1 (for Brachypodium) competent cells (about 10⁹ cells/mL) by electroporation. The electroporation was performed using a MicroPulser electroporator (Biorad), 0.2 cm cuvettes (Biorad) and EC-1 electroporation program (Biorad). The treated cells were cultured in S.O.C. liquid medium with gentamycin (for Arabidopsis; 50 mg/L; for Agrobacterium strains GV3101) or streptomycin (for Arabidopsis; 300 mg/L; for Agrobacterium strain LB4404); or with Carbenicillin (for Brachypodium; 50 mg/L) at 28° C. for 3 hours, then plated over LB agar supplemented with gentamycin (for Arabidopsis; 50 mg/L; for Agrobacterium strains GV3101) or streptomycin (for Arabidopsis; 300 mg/L; for Agrobacterium strain LB4404); or with Carbenicillin (for Brachypodium; 50 mg/L) and kanamycin (for Arabidopsis and Brachypodium; 50 mg/L) at 28° C. for 48 hours. Abrobacterium colonies, which were developed on the selective media, were further analyzed by PCR using the primers designed to span the inserted sequence in the modified pGI or pEBbVNi vectors.

### Example 30

### Producing Transgenic Arabidopsis Plants Expressing Selected Genes According to Some Embodiments of the Invention

[1846] Materials and Experimental Methods

[1847] Plant transformation—The Arabidopsis thaliana var Columbia (T₀ plants) were transformed according to the Floral Dip procedure [Clough S J, Bent A F. (1998) Floral dip: a simplified method for Agrobacterium-mediated transformation of Arabidopsis thaliana. Plant J. 16(6): 735-43; and Desfeux C, Clough S J, Bent A F. (2000) Female reproductive tissues were the primary targets of Agrobacterium-mediated transformation by the Arabidopsis floral-dip method. Plant Physiol. 123(3): 895-904] with minor modifications. Briefly, Arabidopsis thaliana Columbia (Col0) T₀ plants were sown in 250 ml pots filled with wet peat-based growth mix. The pots were covered with aluminum foil and a plastic dome, kept at 4° C. for 3-4 days, then uncovered and incubated in a growth chamber at 18-24° C. under 16/8 hours light/dark cycles. The T₀ plants were ready for transformation six days before anthesis.

[1848] Single colonies of Agrobacterium carrying the binary vectors harboring the genes of some embodiments of the invention were cultured in YEBS medium (Yeast extract 1 gr/L, Beef extract 5 gr/L, MgSO4*7H₂O, Bacto peptone 5 gr/L) supplemented with kanamycin (50 mg/L) and gentamycin (50 mg/L). The cultures were incubated at 28° C. for 48 hours under vigorous shaking to desired optical density at 600 nm of 0.85 to 1.1. Before transformation into plants, 60 μl of Silwet L-77 was added into 300 ml of the Agrobacterium suspension.

[1849] Transformation of T₀ plants was performed by inverting each plant into an Agrobacterium suspension such that the above ground plant tissue was submerged for 1 minute. Each inoculated T₀ plant was immediately placed in a plastic tray, then covered with clear plastic dome to maintain humidity and was kept in the dark at room temperature for 18 hours to facilitate infection and transformation. Transformed (transgenic) plants were then uncovered and transferred to a greenhouse for recovery and maturation. The transgenic T₀ plants were grown in the greenhouse for 3-5 weeks until siliques were brown and dry, then seeds were harvested from plants and kept at room temperature until sowing.

[1850] For generating T₁ and T₂ transgenic plants harboring the genes of some embodiments of the invention, seeds collected from transgenic T₀ plants were surface-sterilized by exposing to chlorine fumes (6% sodium hypochlorite with 1.3% HCl) for 100 minutes. The surface-sterilized seeds were sown on culture plates containing half-strength Murashig-Skoog (Duchefa); 2% sucrose; 0.5% plant agar; 50 mg/L kanamycin; and 200 mg/L carbenicylin (Duchefa). The culture plates were incubated at 4° C. for 48 hours and then were transferred to a growth room at 25° C. for three weeks. Following incubation, the T₁ plants were removed from culture plates and planted in growth mix contained in 250 ml pots. The transgenic plants were allowed to grow in a greenhouse to maturity. Seeds harvested from T₁ plants were cultured and grown to maturity as T₂plants under the same conditions as used for culturing and growing the T₁ plants.

### Example 31

### Transformation of Brachypodium distachyon Plants with the Polynucleotides of the Invention

[1851] Similar to the Arabidopsis model plant, Brachypodium distachyon has several features that recommend it as a model plant for functional genomic studies, especially in the grasses. Traits that make it an ideal model include its small genome (˜160 Mbp for a diploid genome and 355 Mbp for a polyploidy genome), small physical stature, a short lifecycle, and few growth requirements. Brachypodium is related to the major cereal grain species but is understood to be more closely related to the Triticeae (wheat, barley) than to the other cereals. Brachypodium, with its polyploidy accessions, can serve as an ideal model for these grains (whose genomics size and complexity is a major barrier to biotechnological improvement).

[1852] Brachypodium distachyon embryogenic calli are transformed using the procedure described by Vogel and Hill (2008) [High-efficiency Agrobacterium-mediated transformation of Brachypodium distachyon inbred line Bd21-3. Plant Cell Rep 27:471-478], Vain et al (2008) [Agrobacterium-mediated transformation of the temperate grass Brachypodium distachyon (genotype Bd21) for T-DNA insertional mutagenesis. Plant Biotechnology J 6: 236-245], and Vogel J, et al. (2006) [Agrobacterium mediated transformation and inbred line development in the model grass Brachypodium distachyon. Plant Cell Tiss Org. Cult. 85:199-211], each of which is fully incorporated herein by reference, with some minor modifications, which are briefly summarized herein below.

[1853] Callus initiation—Immature spikes (about 2 months after seeding) are harvested at the very beginning of seeds filling. Spikes are then husked and surface sterilized with 3% NaClO containing 0.1% Tween 20, shaken on a gyratory shaker at low speed for 20 minutes. Following three rinses with sterile distilled water, embryos are excised under a dissecting microscope in a laminar flow hood using fine forceps.

[1854] Excised embryos (size ˜0.3 mm, bell shaped) are placed on callus induction medium (CIM) [LS salts (Linsmaier, E. M. & Skoog, F. 1965. Physiol. Plantarum 18, 100) and vitamins plus 3% sucrose, 6 mg/L CuSO₄, 2.5 mg/1 2,4-Dichlorophenoxyacetic Acid, pH 5.8 and 0.25% phytagel (Sigma)] scutellar side down, 50 or 100 embryos on a plate, and incubated at 28° C. in the dark.

[1855] One week later, the embryonic calli is cleaned from emerging shoots and somatic calli, and subcultured onto fresh CIM medium. During culture, yellowish embryogenic calli (EC) appear and are further selected (e.g., picked and transferred) for further incubation in the same conditions for additional 2 weeks. Twenty-five pieces of sub-cultured calli are then separately placed on 90×15 mm petri plates, and incubated as before for three additional weeks.

[1856] Transformation—As described in Vogel and Hill (2008, Supra), Agrobacterium is scraped off 2-day-old MGL plates (plates with the MGL medium which contains: Tryptone 5 gr/L, Yeast Extract 2.5 gr/L, NaCl 5 gr/L, D-Mannitol 5 g/l, MgSO₄*7H₂O 0.204 gr/L, K₂HPO₄ 0.25 gr/L, Glutamic Acid 1.2 gr/L, Plant Agar 7.5 gr/L) and resuspended in liquid MS medium supplemented with 200 μM acetosyringone to an optic density (OD) at 600 nm (OD600) of 0.6 to 1.0. Once the desired OD was attained, 1 ml of 10% Synperonic PE/F68 (Sigma) per 100 ml of inoculation medium is added.

[1857] To begin inoculation, 300 callus pieces are placed in approximately 12 plates (25 callus pieces in each plate) and covered with the Agrobacterium suspension (8-10 ml). The callus is incubated in the Agrobacterium suspension for 5 to 20 minutes. After incubation, the Agrobacterium suspension is aspirated off and the calli are then transferred into co-cultivation plates, prepared by placing a sterile 7-cm diameter filter paper in an empty 90×15 mm petri plate. The calli pieces are then gently distributed on the filter paper. One co-cultivation plate is used for two starting callus plates (50 initial calli pieces). The co-cultivation plates are then sealed with Parafilm M® or a plastic wrap [e.g., saran™ wrap (Dow Chemical Company)] and incubated at 24° C. in the dark for 3 days.

[1858] The callus pieces are then individually transferred into CIM medium as described above, which is further supplemented with 200 mg/L Ticarcillin (to kill the Agrobacterium) and Bialaphos (5 mg/L) or Hygromycin B (40 mg/L) (for selection of the transformed resistant embryogenic calli sections), and incubated at 28° C. in the dark for 14 days.

[1859] The calli pieces are then transferred to shoot induction media (SIM; LS salts and vitamins plus 3% Maltose monohydrate) supplemented with 400 mg/L Ticarcillin, Bialaphos (5 mg/L) or Hygromycin B (40 mg/L), Indol-3-acetic acid (IAA) (0.25 mg/L), and 6-Benzylaminopurine (BAP) (1 mg/L), and are cultivated in conditions as described below. After 10-15 days calli are sub-cultured on the same fresh media for additional 10-15 days (total of 20-30 days). At each sub-culture all the pieces from a single callus are kept together to maintain their independence and are incubated under the following conditions: light to a level of 601E m⁻² s⁻¹, a 16-hours light, 8-hours dark photoperiod and a constant 24° C. temperature. During the period of 20 to 30 days from the beginning of cultivation of calli on shoot induction media (SIM) plantlets start to emerge from the transformed calli.

[1860] When plantlets are large enough to handle without damage, they are transferred to plates containing the above mentioned shoot induction media (SIM) with Bialaphos or Hygromycin B. Each plantlet is considered as a different event. After two weeks of growth, the plantlets are transferred to 2-cm height Petri plates (De Groot, Catalog No. 60-664160) containing MSnoH media (MS salts 4.4 gr/L, sucrose 30 gr/L, supplemented with Hygromycine B (40 mg/L) and Ticarcillin (400 mg/L). Roots usually appear within 2 weeks. Rooted and non-rooted plants are transferred to a fresh MSnoH media supplemented with Hygromycin B and Ticarcillin as described above. In case roots do not appear in the non-rooted plants after two weeks on the MSnoH media (which is supplemented with Hygromycin B and Ticarcillin), then the non-rooted plants are further transferred to the rooting induction medium [RIM; MS salts and vitamins 4.4 gr/L, sucrose 30 gr/L with Ticarcillin 400 mg/L, Indol-3-acetic acid (IAA) (1 mg/L), and α-Naphthalene acetic acid (NAA) (2 mg/L)]. After additional two weeks of incubation at 24° C., the plantlets are transferred to 0.5 modified RIM medium [MS modified salts 4.4 gr/L, MS vitamins 103 mg/L, sucrose 30 gr/L with a-Tocopherol (2 mg/L), Indol-3-acetic acid (IAA) (1 mg/L), and a-Naphthalene acetic acid (NAA) (2 mg/L)] and are incubated at 28° C. for additional 15-20 days, till the roots appear.

[1861] If needed, in the tillering stage the plantlets can grow axillary tillers and eventually become bushy on the above mentioned media (SIM) without Bialaphos or Hygromycin B. Each bush from the same plant (event ID) is then divided to tissue culture boxes (“Humus”) containing “rooting medium” [MS basal salts, 3% sucrose, 3 gr/L phytagel, 2 mg/L α-Naphthalene Acetic Acid (NAA) and 1 mg/L IAA and Ticarcillin 400 mg/L, PH 5.8]. All plants in a “Humus box” are individual plants of the same transformation event.

[1862] When plantlets establish roots they are transplanted to the soil and grown in the greenhouse. Before transfer to greenhouse, 20 randomly selected events are tested every month for expression of the BAR_GA gene (SEQ ID NO:39, BAR gene) which is responsible for resistance to Bialaphos, using AgraStrip® LL strip test seedcheck (Romer labs). Briefly, the expression of the BAR gene is determined as follows: Leaves (about 0.5 cm long leave) are grounded using a pellet pestle in an Eppendorf tube containing 150 μl of water until the water turns green in color. A strip test is then added to the Eppendorf tube and the results are read within 30-60 seconds. Appearance of two pink bands means that the plant is transgenic. On the other hand, appearance of one pink band means that the plant is not transgenic or not expressing BAR gene.

[1863] To verify the transgenic status of plants containing the gene of interest, T1 plants are subjected to PCR as previously described by Vogel et al. 2006 [Agrobacterium mediated transformation and inbred line development in the model grass Brachypodium distachyon. Plant Cell Tiss Org. Cult. 85:199-211].

### Example 32

### Evaluation of Transgenic Arabidopsis for Seed Yield and Plant Growth Rate Under Normal Conditions in Greenhouse Assays (GH-SM Assays)

[1864] Each validation trait assay measures the efficacy of specific traits as described in the Table below. In addition to those traits, the genes of some embodiments of the invention improve yield under various conditions (normal conditions as well as abiotic stress conditions such as nitrogen deficiency and drought stress).

TABLE 307
Allocation of Arabidopsis parameters to specific traits

| # | Parameters | Traits |
|---|---|---|
| 1 | Flowering | Flowering* |
| 2 | Dry weight | Flowering, Plant biomass and Seed yield |
| 3 | Rosette area | Flowering, Plant biomass and Grain filling |
| | | period |
| 4 | Leaf blade area | Flowering, Plant biomass and Grain filling |
| | | period |
| 5 | Leaf petiole length | Flowering and Plant biomass |
| 6 | Seed filling period | Grain filling period |
| 7 | Seed yield | Seed Yield and Grain filling period |
| 8 | Harvest Index | Seed Yield and Harvest Index |

Table 307. *The flowering trait refers to early flowering. Some of the parameters are indirect but will affect the trait, for example, “Dry weight” is affected by “flowering” and can also affect “seed yield”. Usually, decrease in time to flowering reduces the “dry weight”, and on the other hand, a reduce in “dry weight” can effect “seed yield”.

[1865] Assay 1: Seed yield, plant biomass and plant growth rate in greenhouse conditions until seed maturation (seed maturation assay).

[1866] Under Normal conditions—This assay follows seed yield production, the biomass formation and the rosette area growth of plants grown in the greenhouse at non-limiting nitrogen growth conditions. Transgenic Arabidopsis seeds are sown in agar media supplemented with ½ Murashige-Skoog medium (MS) medium and a selection agent (Kanamycin). The T₂ transgenic seedlings are then transplanted to 1.7 trays filled with peat and perlite in a 1:2 ratio. The plants are grown under normal growth conditions which included irrigation of the trays with a solution containing 6 mM inorganic nitrogen in the form of KNO₃, supplemented with 1 mM KH₂PO₄, 1 mM MgSO₄, 1.5 mM CaCl₂ and microelements. Under normal conditions the plants grow in a controlled environment in a closed transgenic greenhouse, temperature about 18-22° C., humidity around 70%. Irrigation is done by flooding with a water solution containing 6 mM N (nitrogen) (as described hereinabove), and flooding is repeated whenever water loss reached 50%. All plants are grown in the greenhouse until mature seeds. Seeds are harvested, extracted and weighted. The remaining plant biomass (the above ground tissue) is also harvested, and weighted immediately or following drying in oven at 50° C. for 24 hours.

[1867] Under drought conditions and standard growth conditions—This assay follows seed yield production, the biomass formation and the rosette area growth of plants grown in the greenhouse under drought conditions and under standard growth conditions. Transgenic Arabidopsis seeds are sown in phytogel media supplemented with ½ MS medium and a selection agent (Kanamycin). The T₂ transgenic seedlings are then transplanted to 1.7 trays filled with peat and perlite in a 1:2 ratio and tuff at the bottom of the tray and a net below the trays (in order to facilitate water drainage). Half of the plants are irrigated with tap water (standard growth conditions) when tray weight reached 50% of its field capacity. The other half of the plants are irrigated with tap water when tray weight reached 20% of its field capacity in order to induce drought stress. All plants are grown in the greenhouse until seeds maturation. Seeds are harvested, extracted and weighted. The remaining plant biomass (the above ground tissue) is also harvested, and weighted immediately or following drying in oven at 50° C. for 24 hours.

[1868] Under nitrogen limiting (low N) and standard (nitrogen non-limiting) conditions—This assay follows seed yield production, the biomass formation and the rosette area growth of plants grown in the greenhouse at limiting and non-limiting nitrogen growth conditions. Transgenic Arabidopsis seeds are sown in agar media supplemented with ½ MS medium and a selection agent (Kanamycin). The T₂ transgenic seedlings are then transplanted to 1.7 trays filled with peat and perlite in a 1:1 ratio. The trays are irrigated with a solution containing nitrogen limiting conditions, which are achieved by irrigating the plants with a solution containing 2.8 mM inorganic nitrogen in the form of KNO₃, supplemented with 1 mM KH₂PO₄, 1 mM MgSO₄, 1.5 mM CaCl₂ and microelements, while normal nitrogen levels are achieved by applying a solution of 5.5 mM inorganic nitrogen also in the form of KNO₃, supplemented with 1 mM KH₂PO₄, 1 mM MgSO₄, 1.5 mM CaCl₂ and microelements. All plants are grown in the greenhouse until mature seeds. Seeds are harvested, extracted and weight. The remaining plant biomass (the above ground tissue) is also harvested, and weighted immediately or following drying in oven at 50° C. for 24 hours.

[1869] Each construct is validated at its T₂ generation. Transgenic plants transformed with a construct conformed by an empty vector carrying a promoter and the selectable marker are used as control [The promoters which are described in Example 28 above, e.g., the At6669 promoter (SEQ ID NO: 25) or the 35S promoter (SEQ ID NO: 37)].

[1870] The plants are analyzed for their overall size, growth rate, flowering, seed yield, 1,000-seed weight, dry matter and harvest index (seed yield/dry matter). Transgenic plants performance is compared to control plants grown in parallel under the same (e.g., identical) conditions. Mock-transgenic plants expressing the uidA reporter gene (GUS-Intron) or with no gene at all, under the same promoter are used as controls.

[1871] The experiment is planned in nested randomized plot distribution. For each gene of the invention three to five independent transformation events are analyzed from each construct.

[1872] Digital imaging—A laboratory image acquisition system, which consists of a digital reflex camera (Canon EOS 300D) attached with a 55 mm focal length lens (Canon EF-S series), mounted on a reproduction device (Kaiser RS), which includes 4 light units (4×150 Watts light bulb) is used for capturing images of plant samples.

[1873] The image capturing process is repeated every 2 days starting from day 1 after transplanting till day 15. Same camera, placed in a custom made iron mount, is used for capturing images of larger plants sawn in white tubs in an environmental controlled greenhouse. The tubs are square shape include 1.7 liter trays. During the capture process, the tubs are placed beneath the iron mount, while avoiding direct sun light and casting of shadows.

[1874] An image analysis system is used, which consists of a personal desktop computer (Intel P4 3.0 GHz processor) and a public domain program—ImageJ 1.39 [Java based image processing program which was developed at the U.S. National Institutes of Health and freely available on the internet at /rsbweb (dot) nih (dot) gov/]. Images are captured in resolution of 10 Mega Pixels (3888×2592 pixels) and stored in a low compression JPEG (Joint Photographic Experts Group standard) format. Next, analyzed data is saved to text files and processed using the JMP statistical analysis software (SAS institute).

[1875] Leaf analysis—Using the digital analysis leaves data is calculated, including leaf number, rosette area, rosette diameter, leaf blade area, petiole relative area and leaf petiole length. Vegetative growth rate: the relative growth rate (RGR) of leaf number [formula 8 (described above)], rosette area (Formula 9, above), plot coverage (Formula 11, above) and harvest index (Formula 15) is calculated with the indicated formulas.

[1876] Seeds average weight—At the end of the experiment all seeds are collected. The seeds are scattered on a glass tray and a picture is taken. Using the digital analysis, the number of seeds in each sample is calculated.

[1877] Dry weight and seed yield—On about day 80 from sowing, the plants are harvested and left to dry at 30° C. in a drying chamber. The biomass and seed weight of each plot are measured and divided by the number of plants in each plot. Dry weight=total weight of the vegetative portion above ground (excluding roots) after drying at 30° C. in a drying chamber; Seed yield per plant=total seed weight per plant (gr.). 1000 seed weight (the weight of 1000 seeds) (gr.).

[1878] The measured parameter “flowering” refers to the number of days in which 50% of the plants are flowering (50% or above).

[1879] The measured parameter “Inflorescence Emergence” refers to the number of days in which 50% of the plants are bolting (50% or above).

[1880] The measured parameter “plot coverage” refers to Rosette Area*plant number.

[1881] It should be noted that a negative increment (in percentages) when found in flowering or inflorescence emergence indicates drought avoidance of the plant.

[1882] Seed filling period—calculated as days to maturity (day in which 50% of seeds accumulated) minus the days to flowering.

[1883] Statistical analyses—To identify genes conferring significantly improved tolerance to abiotic stresses, the results obtained from the transgenic plants are compared to those obtained from control plants. To identify outperforming genes and constructs, results from the independent transformation events tested are analyzed separately. Data is analyzed using Student's t-test and results are considered significant if the p value is less than 0.1. The JMP statistics software package is used (Version 5.2.1, SAS Institute Inc., Cary, N.C., USA).

[1884] Tables 308-313 summarize the observed phenotypes of transgenic plants exogenously expressing the gene constructs using the seed maturation (GH-SM) assays under normal conditions. The evaluation of each gene was performed by testing the performance of different number of events. Event with p-value<0.1 was considered statistically significant.

TABLE 308
Genes showing improved plant performance under regulation of the
At6669 promoter at Normal growth conditions

| | | | | | | | | Inflorescence | | |
|---|---|---|---|---|---|---|---|---|---|---|
| | | Dry Weight [mg] | | | Flowering | | | Emergence | | |
| | | | P- | % | | P- | % | | P- | % |
| Gene Name | Event # | Ave. | Val. | Incr. | Ave. | Val. | Incr. | Ave. | Val. | Incr. |
| LYD1018 | 101270.3 | — | — | — | 18.1 | L | −9 | 13.4 | L | −11 |
| LYD1018 | 101272.1 | — | — | — | 19.1 | 0.19 | −3 | 14.1 | 0.06 | −7 |
| LYD1017 | 101207.1 | 927.2 | 0.01 | 13 | — | — | — | 14.0 | 0.16 | −7 |
| LYD1017 | 101209.1 | 869.1 | 0.19 | 6 | — | — | — | — | — | — |
| LYD1015 | 101277.1 | 903.4 | 0.08 | 10 | — | — | — | — | — | — |
| LYD1012 | 101261.1 | 946.6 | 0.20 | 15 | — | — | — | — | — | — |
| LYD1012 | 101264.1 | — | — | — | 18.7 | 0.09 | −6 | 13.8 | 0.05 | −9 |
| LYD1011 | 101097.2 | — | — | — | 19.1 | 0.04 | −3 | — | — | — |
| LYD1008 | 101252.2 | 943.1 | 0.03 | 15 | — | — | — | — | — | — |
| LYD1007 | 101246.1 | 888.8 | 0.08 | 8 | — | — | — | — | — | — |
| LYD1007 | 101249.3 | — | — | — | 19.2 | 0.13 | −3 | — | — | — |
| LYD1005 | 101238.2 | — | — | — | — | — | — | 13.9 | 0.09 | −8 |
| LYD1005 | 101238.3 | 991.6 | 0.04 | 21 | 17.9 | L | −9 | 13.1 | L | −13 |
| LYD1005 | 101239.2 | 879.4 | L | 7 | — | — | — | — | — | — |
| LYD1004 | 101230.1 | 1079.1 | L | 31 | 19.1 | 0.13 | −3 | 13.8 | 0.01 | −9 |
| LYD1004 | 101231.1 | — | — | — | 19.0 | 0.15 | −4 | 14.2 | 0.16 | −6 |
| LYD1004 | 101233.3 | 885.6 | 0.11 | 8 | — | — | — | — | — | — |
| LYD1004 | 101233.4 | 908.1 | 0.03 | 10 | — | — | — | 13.6 | 0.01 | −10 |
| LYD1003 | 101229.2 | — | — | — | — | — | — | 14.5 | 0.14 | −4 |
| LYD1000 | 101216.2 | 959.4 | L | 17 | — | — | — | — | — | — |
| LYD1000 | 101216.3 | 973.8 | 0.07 | 18 | — | — | — | 14.3 | 0.17 | −5 |
| CONT. | — | 822.0 | — | — | 19.8 | — | — | 15.1 | — | — |
| LYD1016 | 101350.2 | 882.3 | 0.13 | 7 | — | — | — | — | — | — |
| LYD1016 | 101351.2 | 1004.1 | L | 21 | — | — | — | — | — | — |
| LYD1016 | 101351.3 | — | — | — | 15.7 | L | −12 | 10.9 | 0.03 | −15 |
| LYD1013 | 101407.1 | — | — | — | 17.3 | 0.08 | −2 | — | — | — |
| LYD1002 | 101282.2 | 894.7 | 0.06 | 8 | — | — | — | — | — | — |
| LYD1002 | 101284.1 | 1134.1 | L | 37 | — | — | — | — | — | — |
| LYD1001 | 101221.1 | — | — | — | 16.0 | L | −9 | — | — | — |
| LYD1001 | 101224.2 | 911.2 | L | 10 | — | — | — | — | — | — |
| CONT. | — | 827.1 | — | — | 17.7 | — | — | 12.8 | — | — |
| LYD1016 | 101350.2 | — | — | — | 19.1 | 0.04 | −3 | 13.6 | L | −7 |
| LYD1016 | 101351.1 | — | — | — | 18.3 | L | −7 | 13.1 | L | −10 |
| LYD1016 | 101351.2 | 896.9 | 0.06 | 11 | — | — | — | — | — | — |
| LYD1016 | 101351.3 | — | — | — | 15.3 | L | −22 | 10.3 | L | −29 |
| LYD1016 | 101352.1 | — | — | — | 18.5 | 0.08 | −5 | 13.2 | L | −9 |
| LYD1013 | 101406.1 | — | — | — | 18.5 | 0.08 | −6 | 13.2 | 0.04 | −10 |
| LYD1013 | 101407.1 | — | — | — | 18.4 | 0.07 | −6 | 13.2 | L | −9 |
| LYD1013 | 101407.2 | — | — | — | 17.6 | L | −10 | 13.1 | L | −10 |
| LYD1010 | 101335.1 | — | — | — | 18.5 | 0.03 | −6 | 13.3 | L | −9 |
| LYD1010 | 101335.2 | — | — | — | — | — | — | 13.9 | 0.09 | −4 |
| LYD1010 | 101337.1 | — | — | — | 19.2 | 0.18 | −2 | 13.4 | L | −8 |
| LYD1010 | 101337.4 | — | — | — | 18.9 | 0.16 | −3 | 13.6 | L | −7 |
| LYD1010 | 101339.2 | — | — | — | 18.6 | 0.13 | −5 | 13.4 | 0.06 | −8 |
| LYD1006 | 101240.1 | — | — | — | 18.9 | 0.20 | −4 | — | — | — |
| LYD1006 | 101241.1 | — | — | — | 19.1 | 0.08 | −2 | — | — | — |
| LYD1006 | 101241.2 | — | — | — | 19.0 | 0.03 | −3 | 13.8 | 0.02 | −5 |
| LYD1002 | 101280.2 | — | — | — | 17.8 | 0.02 | −9 | 13.1 | 0.01 | −10 |
| LYD1002 | 101282.1 | 911.9 | 0.07 | 13 | 18.1 | 0.09 | −8 | 13.2 | L | −9 |
| LYD1002 | 101282.2 | — | — | — | 17.0 | L | −13 | 12.7 | L | −13 |
| LYD1002 | 101284.1 | 998.1 | L | 23 | 17.7 | L | −10 | 13.2 | L | −9 |
| LYD1001 | 101221.1 | — | — | — | 16.2 | L | −17 | 12.7 | L | −12 |
| LYD1001 | 101221.2 | — | — | — | 18.6 | 0.07 | −5 | 13.3 | L | −9 |
| LYD1001 | 101222.1 | 872.8 | 0.16 | 8 | — | — | — | — | — | — |
| LYD1001 | 101222.2 | — | — | — | 18.9 | L | −4 | 13.6 | 0.07 | −7 |
| LYD1001 | 101224.2 | 887.2 | 0.12 | 10 | 17.4 | 0.01 | −11 | 12.6 | 0.01 | −13 |
| CONT. | — | 809.8 | — | — | 19.6 | — | — | 14.5 | — | — |
| LYD1018 | 101270.3 | — | — | — | 23.8 | L | −10 | 20.9 | L | −3 |
| LYD1018 | 101271.1 | — | — | — | — | — | — | 21.2 | 0.02 | −2 |
| LYD1018 | 101271.2 | — | — | — | — | — | — | 21.4 | 0.06 | −1 |
| LYD1018 | 101272.1 | — | — | — | 25.4 | 0.07 | −4 | 21.2 | L | −2 |
| LYD1017 | 101206.1 | — | — | — | — | — | — | 21.3 | 0.09 | −1 |
| LYD1017 | 101207.1 | 955.0 | 0.03 | 17 | 24.3 | L | −8 | 20.9 | 0.05 | −3 |
| LYD1017 | 101207.2 | — | — | — | — | — | — | 21.3 | 0.06 | −1 |
| LYD1017 | 101209.1 | 879.1 | 0.03 | 7 | 24.6 | 0.03 | −7 | 21.3 | L | −1 |
| LYD1015 | 101275.1 | 847.8 | 0.16 | 3 | 25.4 | 0.11 | −4 | — | — | — |
| LYD1015 | 101277.1 | — | — | — | — | — | — | 21.4 | 0.12 | −1 |
| LYD1015 | 101277.3 | 904.4 | 0.07 | 10 | 25.6 | L | −3 | 21.4 | 0.14 | −1 |
| LYD1015 | 101279.2 | — | — | — | — | — | — | 21.3 | 0.11 | −1 |
| LYD1014 | 101266.3 | — | — | — | — | — | — | 21.4 | 0.12 | −1 |
| LYD1014 | 101269.1 | 872.8 | 0.11 | 7 | — | — | — | — | — | — |
| LYD1012 | 101264.1 | — | — | — | 23.8 | L | −10 | 20.4 | L | −5 |
| LYD1012 | 101264.3 | — | — | — | 24.6 | L | −7 | 21.3 | 0.18 | −1 |
| LYD1011 | 101095.2 | — | — | — | 24.4 | L | −8 | 21.3 | L | −1 |
| LYD1011 | 101097.2 | — | — | — | 24.0 | L | −9 | 21.1 | L | −2 |
| LYD1011 | 101098.1 | — | — | — | 24.4 | 0.02 | −7 | 21.2 | 0.13 | −2 |
| LYD1008 | 101250.3 | — | — | — | — | — | — | 21.1 | 0.10 | −2 |
| LYD1008 | 101252.2 | — | — | — | 25.4 | 0.05 | −4 | 21.2 | L | −2 |
| LYD1007 | 101246.1 | 904.7 | 0.15 | 10 | 24.9 | 0.04 | −6 | 20.9 | 0.03 | −3 |
| LYD1007 | 101246.2 | — | — | — | 24.8 | 0.14 | −6 | 20.8 | L | −4 |
| LYD1007 | 101249.3 | — | — | — | — | — | — | 21.1 | 0.13 | −2 |
| LYD1007 | 101249.4 | 863.1 | 0.19 | 5 | — | — | — | — | — | — |
| LYD1005 | 101237.1 | — | — | — | — | — | — | 21.3 | 0.17 | −1 |
| LYD1005 | 101238.2 | 878.4 | 0.04 | 7 | — | — | — | 21.3 | 0.04 | −1 |
| LYD1005 | 101238.3 | 953.8 | 0.15 | 16 | 24.5 | L | −7 | 20.8 | 0.01 | −4 |
| LYD1004 | 101230.1 | — | — | — | 23.6 | L | −11 | 20.9 | 0.04 | −3 |
| LYD1004 | 101231.1 | 864.4 | 0.14 | 6 | 25.4 | 0.16 | −4 | 20.9 | L | −3 |
| LYD1004 | 101233.4 | 914.7 | 0.18 | 12 | 24.1 | L | −9 | 20.9 | L | −3 |
| LYD1003 | 101228.1 | — | — | — | 24.8 | 0.10 | −6 | — | — | — |
| LYD1003 | 101229.1 | 889.4 | 0.09 | 9 | — | — | — | 21.3 | 0.15 | −1 |
| LYD1003 | 101229.2 | — | — | — | 24.1 | L | −9 | 20.8 | 0.05 | −4 |
| LYD1003 | 101229.3 | — | — | — | — | — | — | 21.4 | 0.11 | −1 |
| LYD1000 | 101215.1 | — | — | — | — | — | — | 21.3 | 0.08 | −1 |
| LYD1000 | 101216.3 | 992.2 | 0.01 | 21 | — | — | — | 21.1 | L | −2 |
| LYD1000 | 101217.3 | — | — | — | 25.1 | 0.10 | −5 | 21.4 | 0.11 | −1 |
| CONT. | — | 819.2 | — | — | 26.4 | — | — | 21.6 | — | — |

Table 308.
“CONT.”—Control;
“Ave.”—Average;
“% Incr.” = % increment;
“p-val.”—p-value,
L = p < 0.01.

TABLE 309
Genes showing improved plant performance under regulation of the
At6669 promoter at Normal growth conditions

| | | Leaf Blade Area | | | | | | | | |
|---|---|---|---|---|---|---|---|---|---|---|
| | | [cm²] | | | Leaf Number | | | Plot Coverage [cm²] | | |
| Gene | | | P- | % | | P- | % | | P- | % |
| Name | Event # | Ave. | Val. | Incr. | Ave. | Val. | Incr. | Ave. | Val. | Incr. |
| LYD1018 | 101270.3 | 1.33 | 0.13 | 16 | 11.8 | 0.11 | 3 | 90.9 | 0.08 | 20 |
| LYD1017 | 101206.1 | 1.26 | 0.15 | 10 | — | — | — | — | — | — |
| LYD1017 | 101207.1 | — | — | — | — | — | — | 81.9 | 0.14 | 8 |
| LYD1017 | 101207.2 | 1.28 | 0.08 | 12 | — | — | — | 86.6 | 0.11 | 15 |
| LYD1015 | 101277.3 | 1.20 | 0.12 | 5 | — | — | — | — | — | — |
| LYD1015 | 101278.1 | 1.20 | 0.13 | 5 | — | — | — | — | — | — |
| LYD1015 | 101279.2 | 1.23 | 0.19 | 7 | — | — | — | 80.4 | 0.16 | 6 |
| LYD1014 | 101266.3 | 1.22 | 0.02 | 7 | — | — | — | — | — | — |
| LYD1014 | 101268.1 | 1.20 | 0.07 | 5 | — | — | — | — | — | — |
| LYD1012 | 101261.1 | — | — | — | 12.4 | L | 8 | 85.0 | L | 13 |
| LYD1012 | 101262.1 | 1.20 | 0.15 | 5 | — | — | — | — | — | — |
| LYD1012 | 101264.1 | 1.22 | 0.07 | 7 | — | — | — | — | — | — |
| LYD1011 | 101097.2 | 1.28 | 0.16 | 12 | — | — | — | — | — | — |
| LYD1011 | 101098.1 | 1.22 | 0.09 | 6 | — | — | — | 84.2 | 0.11 | 11 |
| LYD1008 | 101250.1 | 1.19 | 0.11 | 3 | — | — | — | — | — | — |
| LYD1008 | 101252.1 | — | — | — | 12.0 | 0.12 | 5 | — | — | — |
| LYD1008 | 101252.2 | 1.28 | 0.05 | 11 | — | — | — | 84.8 | 0.07 | 12 |
| LYD1005 | 101238.2 | — | — | — | 12.0 | 0.09 | 5 | — | — | — |
| LYD1005 | 101238.3 | 1.30 | 0.05 | 14 | 12.1 | 0.15 | 6 | 91.0 | 0.05 | 21 |
| LYD1005 | 101239.2 | 1.29 | 0.04 | 12 | — | — | — | 83.2 | 0.11 | 10 |
| LYD1004 | 101230.1 | 1.55 | L | 35 | 12.3 | 0.05 | 8 | 102.6 | 0.01 | 36 |
| LYD1004 | 101231.1 | 1.25 | 0.01 | 9 | — | — | — | 81.5 | 0.04 | 8 |
| LYD1004 | 101233.3 | 1.20 | 0.03 | 5 | — | — | — | — | — | — |
| LYD1004 | 101233.4 | — | — | — | — | — | — | 79.6 | 0.17 | 5 |
| LYD1000 | 101216.2 | 1.31 | 0.15 | 14 | — | — | — | 84.7 | 0.09 | 12 |
| LYD1000 | 101216.3 | 1.38 | 0.03 | 21 | 12.1 | 0.02 | 6 | 93.4 | L | 24 |
| CONT. | — | 1.15 | — | — | 11.5 | — | — | 75.5 | — | — |
| LYD1016 | 101351.1 | 0.883 | 0.05 | 10 | — | — | — | 52.2 | 0.09 | 10 |
| LYD1016 | 101351.3 | — | — | — | 10.2 | 0.03 | 5 | — | — | — |
| LYD1013 | 101407.1 | — | — | — | 10.2 | L | 5 | — | — | — |
| LYD1010 | 101339.2 | 0.848 | 0.12 | 6 | — | — | — | 50.5 | 0.08 | 6 |
| LYD1002 | 101280.2 | 0.845 | 0.04 | 5 | — | — | — | — | — | — |
| LYD1001 | 101221.1 | — | — | — | 10.6 | 0.08 | 10 | — | — | — |
| LYD1001 | 101224.2 | — | — | — | 10.2 | L | 5 | — | — | — |
| CONT. | — | 0.802 | — | — | 9.67 | — | — | 47.6 | — | — |
| LYD1016 | 101350.2 | 0.756 | L | 7 | — | — | — | — | — | — |
| LYD1016 | 101351.1 | 0.825 | L | 17 | — | — | — | 47.1 | L | 20 |
| LYD1016 | 101351.2 | 0.772 | 0.08 | 9 | — | — | — | — | — | — |
| LYD1016 | 101351.3 | 0.812 | L | 15 | 9.84 | 0.11 | 5 | 47.5 | L | 21 |
| LYD1016 | 101352.1 | 0.836 | L | 19 | | 0.18 | 4 | 50.6 | L | 29 |
| LYD1013 | 101407.2 | 0.807 | L | 14 | — | — | — | 47.1 | L | 20 |
| LYD1010 | 101335.1 | — | — | — | 9.66 | 0.04 | 3 | — | — | — |
| LYD1010 | 101335.2 | 0.793 | 0.05 | 12 | — | — | — | 46.5 | 0.03 | 18 |
| LYD1010 | 101337.1 | 0.748 | 0.18 | 6 | — | — | — | 41.8 | 0.19 | 6 |
| LYD1010 | 101337.4 | — | — | — | — | — | — | 43.1 | 0.10 | 10 |
| LYD1010 | 101339.2 | 0.809 | 0.02 | 15 | — | — | — | 47.8 | 0.11 | 22 |
| LYD1006 | 101240.1 | 0.780 | 0.03 | 11 | 9.81 | 0.10 | 5 | 45.0 | L | 14 |
| LYD1006 | 101241.1 | 0.790 | 0.06 | 12 | — | — | — | 44.0 | 0.04 | 12 |
| LYD1006 | 101241.2 | 0.754 | 0.20 | 7 | — | — | — | — | — | — |
| LYD1006 | 101242.2 | 0.775 | 0.08 | 10 | 9.56 | 0.10 | 2 | — | — | — |
| LYD1002 | 101280.2 | 0.816 | 0.05 | 16 | — | — | — | 47.2 | 0.05 | 20 |
| LYD1002 | 101282.1 | 0.851 | 0.07 | 21 | — | — | — | 49.1 | 0.03 | 25 |
| LYD1002 | 101282.2 | 0.833 | L | 18 | — | — | — | 47.5 | 0.01 | 21 |
| LYD1002 | 101283.1 | 0.762 | 0.11 | 8 | — | — | — | 43.1 | 0.17 | 10 |
| LYD1002 | 101284.1 | 0.824 | 0.06 | 17 | 9.84 | 0.09 | 5 | 50.0 | 0.03 | 27 |
| LYD1001 | 101221.1 | 0.759 | L | 8 | 10.1 | L | 8 | 45.3 | L | 15 |
| LYD1001 | 101221.2 | 0.803 | L | 14 | 9.72 | L | 4 | 45.3 | L | 15 |
| LYD1001 | 101222.1 | 0.794 | L | 13 | — | — | — | 41.7 | 0.06 | 6 |
| LYD1001 | 101222.2 | 0.793 | L | 12 | — | — | — | 44.1 | 0.01 | 12 |
| LYD1001 | 101224.2 | 0.859 | L | 22 | 9.97 | 0.10 | 6 | 52.7 | 0.01 | 34 |
| CONT. | — | 0.705 | — | — | 9.36 | — | — | 39.3 | — | — |
| LYD1018 | 101270.3 | 1.47 | L | 25 | 12.5 | L | 10 | 101.1 | L | 35 |
| LYD1017 | 101206.1 | — | — | — | 12.1 | 0.12 | 6 | — | — | — |
| LYD1017 | 101207.1 | 1.44 | 0.02 | 22 | 11.8 | 0.07 | 3 | 90.7 | 0.06 | 21 |
| LYD1017 | 101207.2 | 1.29 | L | 10 | 12.2 | L | 7 | 84.5 | L | 13 |
| LYD1017 | 101209.1 | 1.40 | 0.04 | 19 | 12.2 | 0.19 | 7 | 91.1 | 0.04 | 22 |
| LYD1017 | 101209.2 | — | — | — | 12.0 | 0.05 | 6 | — | — | — |
| LYD1015 | 101275.1 | 1.36 | 0.01 | 15 | — | — | — | 86.3 | 0.04 | 15 |
| LYD1015 | 101277.3 | 1.36 | L | 15 | — | — | — | 87.2 | L | 16 |
| LYD1014 | 101266.3 | 1.28 | 0.16 | 8 | — | — | — | — | — | — |
| LYD1014 | 101267.2 | 1.32 | 0.02 | 12 | — | — | — | 81.3 | 0.18 | 8 |
| LYD1014 | 101269.2 | 1.28 | 0.02 | 8 | — | — | — | — | — | — |
| LYD1012 | 101264.1 | 1.44 | 0.01 | 22 | 12.1 | 0.13 | 7 | 96.2 | L | 28 |
| LYD1012 | 101264.3 | 1.44 | L | 22 | — | — | — | 94.2 | L | 26 |
| LYD1011 | 101095.2 | 1.38 | L | 17 | 11.9 | 0.17 | 5 | 85.8 | L | 14 |
| LYD1011 | 101097.2 | 1.41 | 0.14 | 20 | 12.1 | 0.01 | 6 | 93.1 | 0.08 | 24 |
| LYD1011 | 101098.1 | 1.34 | 0.04 | 14 | 12.1 | 0.04 | 7 | 88.6 | L | 18 |
| LYD1008 | 101250.1 | 1.27 | 0.13 | 7 | — | — | — | 82.7 | 0.11 | 10 |
| LYD1008 | 101250.3 | 1.32 | 0.17 | 12 | — | — | — | — | — | — |
| LYD1008 | 101252.1 | 1.31 | 0.07 | 11 | — | — | — | 83.9 | 0.16 | 12 |
| LYD1008 | 101252.2 | 1.27 | 0.15 | 8 | — | — | — | — | — | — |
| LYD1007 | 101246.1 | 1.43 | 0.02 | 21 | 12.8 | L | 13 | 97.2 | L | 30 |
| LYD1007 | 101246.2 | 1.35 | 0.02 | 14 | 11.9 | 0.07 | 4 | 88.6 | 0.02 | 18 |
| LYD1007 | 101249.3 | 1.28 | 0.08 | 9 | — | — | — | 83.3 | 0.08 | 11 |
| LYD1007 | 101249.4 | 1.38 | 0.03 | 17 | — | — | — | 87.7 | 0.07 | 17 |
| LYD1005 | 101238.2 | 1.32 | L | 12 | — | — | — | 85.1 | 0.02 | 13 |
| LYD1005 | 101238.3 | 1.40 | L | 19 | 12.3 | L | 8 | 93.9 | L | 25 |
| LYD1004 | 101230.1 | 1.55 | 0.01 | 32 | 11.8 | 0.10 | 3 | 102.1 | 0.02 | 36 |
| LYD1004 | 101233.4 | 1.54 | L | 31 | 12.5 | 0.02 | 10 | 98.3 | L | 31 |
| LYD1003 | 101229.1 | 1.35 | 0.06 | 14 | — | — | — | 84.7 | 0.15 | 13 |
| LYD1003 | 101229.2 | 1.41 | L | 19 | 12.1 | L | 7 | 95.3 | L | 27 |
| LYD1000 | 101215.1 | 1.38 | 0.08 | 17 | — | — | — | 84.1 | 0.18 | 12 |
| LYD1000 | 101216.3 | 1.39 | L | 18 | 11.8 | 0.14 | 4 | 88.5 | L | 18 |
| LYD1000 | 101217.3 | 1.37 | 0.13 | 16 | 12.0 | L | 6 | 89.7 | 0.10 | 20 |
| CONT. | — | 1.18 | — | — | 11.4 | — | — | 75.0 | — | — |

Table 309.
“CONT.”—Control;
“Ave.”—Average;
“% Incr.” = % increment;
“p-val.”—p-value,
L - p < 0.01.

TABLE 310
Genes showing improved plant performance under regulation of the At6669 promoter
at Normal growth conditions

| | | RGR Of | | | RGR Of | | | RGR Of Rosette | | |
|---|---|---|---|---|---|---|---|---|---|---|
| | | Leaf Number | | | Plot Coverage | | | Diameter | | |
| Gene | | | P- | % | | P- | % | | P- | % |
| Name | Event # | Ave. | Val. | Incr. | Ave. | Val. | Incr. | Ave. | Val. | Incr. |
| LYD1018 | 101270.3 | — | — | — | 10.8 | 0.03 | 19 | 0.484 | 0.07 | 10 |
| LYD1017 | 101207.2 | — | — | — | 10.4 | 0.09 | 15 | 0.487 | 0.05 | 11 |
| LYD1015 | 101277.3 | — | — | — | — | — | — | 0.474 | 0.14 | 8 |
| LYD1015 | 101279.2 | — | — | — | — | — | — | 0.470 | 0.19 | 7 |
| LYD1012 | 101261.1 | — | — | — | 10.2 | 0.13 | 13 | 0.473 | 0.15 | 8 |
| LYD1011 | 101097.2 | — | — | — | — | — | — | 0.477 | 0.14 | 9 |
| LYD1011 | 101098.1 | — | — | — | 10.1 | 0.18 | 12 | — | — | — |
| LYD1008 | 101252.1 | — | — | — | — | — | — | 0.471 | 0.19 | 7 |
| LYD1008 | 101252.2 | — | — | — | 10.1 | 0.18 | 12 | 0.481 | 0.08 | 10 |
| LYD1005 | 101238.3 | — | — | — | 10.7 | 0.04 | 19 | 0.479 | 0.11 | 9 |
| LYD1005 | 101239.2 | — | — | — | 10.1 | 0.19 | 11 | — | — | — |
| LYD1004 | 101230.1 | — | — | — | 12.4 | L | 37 | 0.525 | L | 20 |
| LYD1004 | 101231.1 | — | — | — | — | — | — | 0.471 | 0.18 | 7 |
| LYD1000 | 101216.2 | — | — | — | 10.2 | 0.15 | 12 | 0.492 | 0.03 | 12 |
| LYD1000 | 101216.3 | — | — | — | 11.2 | L | 24 | 0.511 | L | 17 |
| CONT. | — | — | — | — | 9.05 | — | — | 0.438 | — | — |
| LYD1001 | 101221.1 | 0.751 | 0.03 | 25 | — | — | — | — | — | — |
| LYD1001 | 101224.2 | 0.706 | 0.13 | 18 | — | — | — | — | — | — |
| CONT. | — | 0.600 | — | — | — | — | — | — | — | — |
| LYD1016 | 101351.1 | — | — | — | 5.89 | 0.02 | 20 | 0.379 | 0.08 | 11 |
| LYD1016 | 101351.3 | — | — | — | 5.85 | 0.03 | 20 | — | — | — |
| LYD1016 | 101352.1 | — | — | — | 6.35 | L | 30 | 0.387 | 0.04 | 13 |
| LYD1013 | 101407.2 | — | — | — | 5.90 | 0.02 | 21 | — | — | — |
| LYD1010 | 101335.2 | — | — | — | 5.82 | 0.04 | 19 | 0.380 | 0.08 | 11 |
| LYD1010 | 101339.2 | — | — | — | 5.89 | 0.03 | 20 | — | — | — |
| LYD1006 | 101240.1 | — | — | — | 5.51 | 0.16 | 13 | — | — | — |
| LYD1006 | 101241.1 | — | — | — | 5.52 | 0.15 | 13 | 0.377 | 0.10 | 10 |
| LYD1002 | 101280.2 | — | — | — | 5.91 | 0.02 | 21 | 0.384 | 0.05 | 12 |
| LYD1002 | 101282.1 | — | — | — | 6.10 | L | 25 | — | — | — |
| LYD1002 | 101282.2 | — | — | — | 5.94 | 0.02 | 22 | 0.372 | 0.16 | 9 |
| LYD1002 | 101284.1 | — | — | — | 6.19 | L | 27 | 0.376 | 0.12 | 10 |
| LYD1001 | 101221.1 | 0.722 | 0.04 | 21 | 5.68 | 0.07 | 16 | 0.379 | 0.08 | 11 |
| LYD1001 | 101221.2 | — | — | — | 5.64 | 0.09 | 15 | 0.371 | 0.17 | 9 |
| LYD1001 | 101222.2 | — | — | — | 5.47 | 0.18 | 12 | — | — | — |
| LYD1001 | 101224.2 | — | — | — | 6.59 | L | 35 | 0.398 | 0.01 | 16 |
| CONT. | — | 0.596 | — | — | 4.89 | — | — | 0.341 | — | — |
| LYD1018 | 101270.3 | — | — | — | 11.3 | L | 34 | 0.482 | 0.04 | 16 |
| LYD1017 | 101206.1 | 0.794 | 0.14 | 10 | — | — | — | — | — | — |
| LYD1017 | 101207.1 | — | — | — | 10.0 | 0.07 | 19 | 0.477 | 0.05 | 15 |
| LYD1017 | 101209.1 | — | — | — | 10.2 | 0.04 | 22 | 0.458 | 0.19 | 10 |
| LYD1017 | 101209.2 | 0.786 | 0.19 | 9 | — | — | — | — | — | — |
| LYD1015 | 101275.1 | — | — | — | 9.64 | 0.16 | 14 | 0.465 | 0.12 | 12 |
| LYD1015 | 101277.3 | — | — | — | 9.81 | 0.11 | 17 | — | — | — |
| LYD1012 | 101264.1 | — | — | — | 10.7 | L | 27 | 0.474 | 0.07 | 14 |
| LYD1012 | 101264.3 | — | — | — | 10.6 | 0.01 | 25 | 0.457 | 0.20 | 10 |
| LYD1011 | 101095.2 | — | — | — | 9.64 | 0.16 | 14 | — | — | — |
| LYD1011 | 101097.2 | — | — | — | 10.4 | 0.03 | 23 | 0.474 | 0.09 | 14 |
| LYD1011 | 101098.1 | — | — | — | 9.89 | 0.09 | 17 | 0.462 | 0.15 | 11 |
| LYD1007 | 101246.1 | 0.818 | 0.06 | 13 | 10.9 | L | 29 | 0.473 | 0.08 | 14 |
| LYD1007 | 101246.2 | — | — | — | 9.95 | 0.08 | 18 | 0.468 | 0.10 | 13 |
| LYD1007 | 101249.4 | — | — | — | 9.87 | 0.10 | 17 | — | — | — |
| LYD1005 | 101238.3 | 0.793 | 0.14 | 10 | 10.5 | 0.02 | 25 | 0.466 | 0.11 | 12 |
| LYD1004 | 101230.1 | — | — | — | 11.4 | L | 35 | 0.485 | 0.04 | 17 |
| LYD1004 | 101233.4 | 0.797 | 0.13 | 10 | 11.0 | L | 31 | 0.479 | 0.05 | 15 |
| LYD1003 | 101229.1 | — | — | — | — | — | — | 0.472 | 0.08 | 14 |
| LYD1003 | 101229.2 | — | — | — | 10.6 | 0.01 | 26 | 0.467 | 0.10 | 12 |
| LYD1000 | 101215.1 | — | — | — | — | — | — | 0.469 | 0.10 | 13 |
| LYD1000 | 101216.3 | — | — | — | 9.88 | 0.09 | 17 | — | — | — |
| LYD1000 | 101217.3 | — | — | — | 10.1 | 0.06 | 20 | — | — | — |
| CONT. | — | 0.724 | — | — | 8.42 | — | — | 0.416 | — | — |

Table 310:
“CONT.”—Control;
“Ave.”—Average;
“% Incr.” = % increment;
“p-val.”—p-value,
L - p < 0.01.

TABLE 311
Genes showing improved plant performance under regulation of the At6669 promoter
at Normal growth conditions

| | | | | | Rosette Area | | | Rosette Diameter | | |
|---|---|---|---|---|---|---|---|---|---|---|
| | | Harvest Index | | | [cm²] | | | [cm] | | |
| Gene | | | P- | % | | P- | % | | P- | % |
| Name | Event # | Ave. | Val. | Incr. | Ave. | Val. | Incr. | Ave. | Val. | Incr. |
| LYD1018 | 101270.3 | — | — | — | 11.4 | 0.08 | 20 | 5.92 | 0.01 | 10 |
| LYD1018 | 101272.1 | — | — | — | — | — | — | 5.58 | 0.06 | 4 |
| LYD1017 | 101207.1 | — | — | — | 10.2 | 0.14 | 8 | 5.62 | 0.16 | 5 |
| LYD1017 | 101207.2 | — | — | — | 10.8 | 0.11 | 15 | 5.80 | 0.10 | 8 |
| LYD1015 | 101277.3 | — | — | — | — | — | — | 5.67 | L | 6 |
| LYD1015 | 101279.2 | — | — | — | 10.1 | 0.16 | 6 | 5.60 | L | 4 |
| LYD1012 | 101261.1 | — | — | — | 10.6 | L | 13 | 5.69 | L | 6 |
| LYD1011 | 101097.2 | — | — | — | — | — | — | 5.81 | 0.19 | 8 |
| LYD1011 | 101098.1 | — | — | — | 10.5 | 0.11 | 11 | 5.62 | 0.06 | 5 |
| LYD1008 | 101252.1 | — | — | — | — | — | — | 5.75 | 0.10 | 7 |
| LYD1008 | 101252.2 | — | — | — | 10.6 | 0.07 | 12 | 5.79 | 0.02 | 8 |
| LYD1007 | 101247.2 | 0.352 | 0.15 | 6 | — | — | — | — | — | — |
| LYD1005 | 101238.2 | — | — | — | — | — | — | 5.64 | 0.01 | 5 |
| LYD1005 | 101238.3 | — | — | — | 11.4 | 0.05 | 21 | 5.92 | 0.04 | 10 |
| LYD1005 | 101239.2 | — | — | — | 10.4 | 0.11 | 10 | 5.56 | 0.11 | 4 |
| LYD1004 | 101230.1 | — | — | — | 12.8 | 0.01 | 36 | 6.29 | L | 17 |
| LYD1004 | 101231.1 | — | — | — | 10.2 | 0.04 | 8 | 5.74 | 0.02 | 7 |
| LYD1004 | 101233.4 | — | — | — | 9.95 | 0.17 | 5 | 5.59 | 0.13 | 4 |
| LYD1003 | 101227.1 | 0.357 | 0.17 | 7 | — | — | — | 5.57 | 0.07 | 4 |
| LYD1003 | 101229.3 | 0.362 | 0.03 | 8 | — | — | — | — | — | — |
| LYD1000 | 101216.2 | — | — | — | 10.6 | 0.09 | 12 | 5.70 | 0.15 | 6 |
| LYD1000 | 101216.3 | — | — | — | 11.7 | L | 24 | 6.06 | L | 13 |
| CONT. | — | 0.334 | — | — | 9.44 | — | — | 5.36 | — | — |
| LYD1016 | 101351.1 | 0.400 | 0.07 | 11 | 6.53 | 0.09 | 10 | — | — | — |
| LYD1016 | 101351.3 | 0.446 | L | 23 | — | — | — | — | — | — |
| LYD1016 | 101352.1 | 0.403 | 0.03 | 11 | — | — | — | — | — | — |
| LYD1013 | 101405.1 | 0.390 | 0.20 | 8 | — | — | — | — | — | — |
| LYD1013 | 101406.2 | 0.405 | 0.07 | 12 | — | — | — | — | — | — |
| LYD1013 | 101407.2 | 0.412 | 0.08 | 14 | — | — | — | — | — | — |
| LYD1010 | 101337.1 | 0.392 | 0.17 | 8 | — | — | — | — | — | — |
| LYD1010 | 101339.2 | — | — | — | 6.31 | 0.08 | 6 | 4.53 | 0.10 | 3 |
| LYD1001 | 101222.2 | 0.412 | 0.02 | 14 | — | — | — | — | — | — |
| CONT. | — | 0.362 | — | — | 5.94 | — | — | 4.39 | — | — |
| LYD1016 | 101351.1 | — | — | — | 5.89 | L | 19 | 4.39 | 0.02 | 10 |
| LYD1016 | 101351.3 | 0.348 | 0.07 | 9 | 5.93 | L | 20 | 4.27 | 0.01 | 7 |
| LYD1016 | 101352.1 | — | — | — | 6.33 | L | 28 | 4.52 | L | 13 |
| LYD1013 | 101405.1 | 0.357 | L | 12 | — | — | — | — | — | — |
| LYD1013 | 101407.2 | — | — | — | 5.88 | L | 19 | 4.32 | L | 8 |
| LYD1010 | 101335.2 | — | — | — | 5.81 | 0.03 | 18 | 4.38 | 0.02 | 9 |
| LYD1010 | 101337.4 | — | — | — | 5.39 | 0.11 | 9 | — | — | — |
| LYD1010 | 101339.2 | — | — | — | 5.98 | 0.11 | 21 | 4.27 | 0.16 | 7 |
| LYD1006 | 101240.1 | — | — | — | 5.62 | L | 14 | 4.38 | 0.02 | 9 |
| LYD1006 | 101241.1 | — | — | — | 5.50 | 0.04 | 12 | 4.33 | 0.02 | 8 |
| LYD1002 | 101280.2 | — | — | — | 5.90 | 0.05 | 20 | 4.39 | 0.01 | 10 |
| LYD1002 | 101282.1 | — | — | — | 6.14 | 0.03 | 24 | 4.39 | 0.07 | 10 |
| LYD1002 | 101282.2 | 0.364 | 0.11 | 14 | 5.94 | 0.02 | 20 | 4.38 | 0.02 | 9 |
| LYD1002 | 101283.1 | — | — | — | 5.39 | 0.18 | 9 | — | — | — |
| LYD1002 | 101284.1 | — | — | — | 6.24 | 0.03 | 27 | 4.46 | 0.04 | 11 |
| LYD1001 | 101221.1 | — | — | — | 5.67 | L | 15 | 4.33 | L | 8 |
| LYD1001 | 101221.2 | 0.349 | 0.18 | 9 | 5.67 | L | 15 | 4.35 | L | 9 |
| LYD1001 | 101222.1 | — | — | — | 5.21 | 0.08 | 6 | 4.15 | L | 4 |
| LYD1001 | 101222.2 | — | — | — | 5.51 | 0.01 | 12 | 4.27 | L | 7 |
| LYD1001 | 101224.2 | — | — | — | 6.59 | 0.01 | 33 | 4.62 | 0.01 | 16 |
| CONT. | — | 0.319 | — | — | 4.94 | — | — | 4.00 | — | — |
| LYD1018 | 101270.3 | — | — | — | 12.6 | L | 35 | 6.12 | L | 17 |
| LYD1017 | 101206.1 | — | — | — | — | — | — | 5.40 | 0.17 | 3 |
| LYD1017 | 101207.1 | — | — | — | 11.3 | 0.06 | 21 | 5.84 | 0.05 | 12 |
| LYD1017 | 101207.2 | — | — | — | 10.6 | L | 13 | 5.58 | L | 7 |
| LYD1017 | 101209.1 | — | — | — | 11.4 | 0.04 | 22 | 5.68 | 0.09 | 9 |
| LYD1015 | 101275.1 | — | — | — | 10.8 | 0.04 | 15 | 5.75 | L | 10 |
| LYD1015 | 101277.1 | — | — | — | — | — | — | 5.50 | 0.10 | 5 |
| LYD1015 | 101277.3 | — | — | — | 10.9 | L | 16 | 5.69 | L | 9 |
| LYD1014 | 101266.3 | 0.357 | 0.03 | 19 | — | — | — | — | — | — |
| LYD1014 | 101267.2 | — | — | — | 10.2 | 0.18 | 8 | 5.58 | 0.12 | 7 |
| LYD1012 | 101264.1 | — | — | — | 12.0 | L | 28 | 6.01 | L | 15 |
| LYD1012 | 101264.3 | — | — | — | 11.8 | L | 26 | 5.83 | L | 12 |
| LYD1011 | 101095.2 | — | — | — | 10.7 | L | 14 | 5.62 | L | 7 |
| LYD1011 | 101097.2 | — | — | — | 11.6 | 0.08 | 24 | 5.94 | 0.15 | 14 |
| LYD1011 | 101098.1 | — | — | — | 11.1 | L | 18 | 5.80 | 0.02 | 11 |
| LYD1008 | 101250.1 | — | — | — | 10.3 | 0.11 | 10 | — | — | — |
| LYD1008 | 101252.1 | — | — | — | 10.5 | 0.16 | 12 | 5.66 | 0.06 | 8 |
| LYD1008 | 101252.2 | — | — | — | — | — | — | 5.48 | 0.20 | 5 |
| LYD1007 | 101246.1 | — | — | — | 12.2 | L | 30 | 5.97 | 0.04 | 14 |
| LYD1007 | 101246.2 | — | — | — | 11.1 | 0.02 | 18 | 5.76 | 0.05 | 10 |
| LYD1007 | 101249.3 | — | — | — | 10.4 | 0.08 | 11 | — | — | — |
| LYD1007 | 101249.4 | — | — | — | 11.0 | 0.07 | 17 | 5.70 | 0.09 | 9 |
| LYD1005 | 101238.2 | — | — | — | 10.6 | 0.02 | 13 | 5.57 | 0.09 | 7 |
| LYD1005 | 101238.3 | — | — | — | 11.7 | L | 25 | 5.93 | L | 14 |
| LYD1004 | 101230.1 | — | — | — | 12.8 | 0.02 | 36 | 6.09 | 0.04 | 17 |
| LYD1004 | 101233.4 | — | — | — | 12.3 | L | 31 | 6.01 | L | 15 |
| LYD1003 | 101229.1 | — | — | — | 10.6 | 0.15 | 13 | 5.76 | 0.06 | 10 |
| LYD1003 | 101229.2 | — | — | — | 11.9 | L | 27 | 5.93 | L | 14 |
| LYD1000 | 101215.1 | — | — | — | 10.5 | 0.18 | 12 | 5.62 | 0.14 | 8 |
| LYD1000 | 101216.3 | — | — | — | 11.1 | L | 18 | 5.69 | L | 9 |
| LYD1000 | 101217.3 | — | — | — | 11.2 | 0.10 | 20 | — | — | — |
| CONT. | — | 0.300 | — | — | 9.37 | — | — | 5.22 | — | — |

Table 311.
“CONT.”—Control;
“Ave.”—Average;
“% Incr.” = % increment;
“p-val.”—p-value,
L - p < 0.01.

TABLE 312
Genes showing improved plant performance under regulation of the
At6669 promoter at Normal growth conditions

| | | Seed Yield [mg] | | | 1000 Seed Weight [mg] | | |
|---|---|---|---|---|---|---|---|
| Gene | | | | % | | | % |
| Name | Event # | Ave. | P-Val. | Incr. | Ave. | P-Val. | Incr. |
| LYD1018 | 101272.1 | — | — | — | 20.7 | L | 15 |
| LYD1017 | 101207.1 | — | — | — | 22.5 | L | 25 |
| LYD1017 | 101209.1 | — | — | — | 20.5 | 0.09 | 14 |
| LYD1015 | 101275.1 | — | — | — | 18.6 | 0.11 | 3 |
| LYD1015 | 101277.3 | — | — | — | 19.4 | 0.05 | 8 |
| LYD1012 | 101261.1 | — | — | — | 19.7 | 0.10 | 9 |
| LYD1008 | 101250.1 | — | — | — | 18.7 | 0.15 | 4 |
| LYD1008 | 101250.3 | 296.7 | 0.05 | 8 | 20.0 | 0.04 | 11 |
| LYD1008 | 101252.2 | — | — | — | 21.4 | 0.04 | 19 |
| LYD1008 | 101254.1 | — | — | — | 18.5 | 0.07 | 3 |
| LYD1007 | 101246.1 | — | — | — | 21.4 | 0.01 | 19 |
| LYD1007 | 101249.3 | — | — | — | 19.1 | 0.15 | 6 |
| LYD1005 | 101238.2 | — | — | — | 18.8 | 0.16 | 5 |
| LYD1005 | 101238.3 | — | — | — | 22.4 | 0.03 | 25 |
| LYD1004 | 101230.1 | — | — | — | 22.6 | L | 26 |
| LYD1004 | 101231.1 | — | — | — | 19.5 | 0.02 | 8 |
| LYD1004 | 101233.3 | 319.1 | 0.17 | 16 | — | — | — |
| LYD1004 | 101233.4 | — | — | — | 19.2 | L | 7 |
| LYD1003 | 101227.1 | — | — | — | 18.8 | 0.17 | 5 |
| LYD1003 | 101229.3 | — | — | — | 19.7 | 0.16 | 9 |
| LYD1000 | 101216.2 | — | — | — | 22.0 | 0.01 | 22 |
| LYD1000 | 101216.3 | — | — | — | 21.9 | 0.02 | 22 |
| CONT. | — | 274.2 | — | — | 18.0 | — | — |
| LYD1016 | 101351.2 | — | — | — | 22.1 | 0.02 | 18 |
| LYD1013 | 101406.1 | 328.3 | 0.09 | 11 | — | — | — |
| LYD1013 | 101406.2 | 328.0 | 0.10 | 10 | — | — | — |
| LYD1013 | 101407.2 | 326.6 | 0.12 | 10 | — | — | — |
| LYD1002 | 101280.2 | 336.7 | 0.04 | 13 | — | — | — |
| LYD1002 | 101282.2 | 334.3 | L | 13 | — | — | — |
| LYD1002 | 101284.1 | — | — | — | 22.7 | 0.07 | 21 |
| LYD1001 | 101224.2 | — | — | — | 21.4 | L | 14 |
| CONT. | — | 296.9 | — | — | 18.7 | — | — |
| LYD1016 | 101351.2 | — | — | — | 19.8 | L | 16 |
| LYD1006 | 101241.2 | — | — | — | 17.9 | 0.13 | 5 |
| LYD1002 | 101282.1 | 314.8 | L | 23 | — | — | — |
| LYD1002 | 101282.2 | 301.7 | 0.06 | 17 | 18.1 | 0.07 | 6 |
| LYD1002 | 101284.1 | — | — | — | 21.9 | L | 28 |
| LYD1001 | 101222.1 | 285.8 | 0.13 | 11 | — | — | — |
| LYD1001 | 101224.2 | — | — | — | 20.6 | 0.01 | 20 |
| CONT. | — | 256.9 | — | — | 17.1 | — | — |
| LYD1018 | 101270.3 | — | — | — | 19.6 | 0.19 | 6 |
| LYD1018 | 101272.1 | — | — | — | 21.0 | L | 14 |
| LYD1017 | 101207.1 | — | — | — | 23.3 | L | 26 |
| LYD1017 | 101209.1 | — | — | — | 21.4 | 0.07 | 15 |
| LYD1015 | 101277.3 | — | — | — | 19.5 | L | 5 |
| LYD1014 | 101266.3 | 307.6 | L | 26 | — | — | — |
| LYD1014 | 101269.1 | — | — | — | 21.0 | 0.04 | 13 |
| LYD1011 | 101095.2 | — | — | — | 19.0 | 0.08 | 3 |
| LYD1008 | 101250.1 | — | — | — | 19.5 | 0.10 | 6 |
| LYD1008 | 101250.3 | — | — | — | 19.9 | 0.02 | 8 |
| LYD1008 | 101252.2 | — | — | — | 21.5 | 0.03 | 16 |
| LYD1007 | 101246.1 | — | — | — | 22.1 | 0.02 | 20 |
| LYD1007 | 101246.2 | — | — | — | 19.4 | 0.13 | 5 |
| LYD1007 | 101247.2 | — | — | — | 19.1 | 0.04 | 3 |
| LYD1007 | 101249.3 | — | — | — | 19.7 | L | 6 |
| LYD1007 | 101249.4 | — | — | — | 19.6 | 0.13 | 6 |
| LYD1005 | 101237.1 | — | — | — | 19.6 | L | 6 |
| LYD1005 | 101238.3 | — | — | — | 22.1 | 0.01 | 19 |
| LYD1004 | 101230.1 | — | — | — | 22.9 | L | 24 |
| LYD1004 | 101231.1 | — | — | — | 21.0 | 0.02 | 14 |
| LYD1004 | 101233.4 | — | — | — | 20.1 | 0.01 | 8 |
| LYD1003 | 101229.2 | — | — | — | 20.2 | L | 9 |
| LYD1003 | 101229.3 | — | — | — | 20.4 | 0.02 | 10 |
| LYD1000 | 101216.2 | — | — | — | 20.5 | 0.11 | 11 |
| LYD1000 | 101216.3 | — | — | — | 22.6 | L | 22 |
| CONT. | — | 244.1 | — | — | 18.5 | — | — |

Table 312:
“CONT.”—Control;
“Ave.”—Average;
“% Incr.” = % increment;
“p-val.”—p-value,
L - p < 0.01.

TABLE 313
Genes showing improved plant performance under regulation of the
At6669 promoter at Normal growth conditions

| | | Grain Filling Period | | |
|---|---|---|---|---|
| Gene Name | Event # | Ave. | P-Val. | % Incr. |
| LYD1018 | 101271.2 | 30.2 | 0.01 | 3 |
| LYD1017 | 101209.1 | 30.9 | L | 5 |
| LYD1015 | 101277.1 | 30.3 | 0.01 | 3 |
| LYD1014 | 101268.1 | 29.9 | 0.19 | 2 |
| LYD1014 | 101269.1 | 30.0 | 0.05 | 2 |
| LYD1012 | 101264.1 | 30.1 | 0.18 | 3 |
| LYD1011 | 101095.2 | 30.2 | L | 3 |
| LYD1009 | 101255.3 | 30.2 | 0.04 | 3 |
| LYD1008 | 101250.1 | 30.1 | 0.05 | 3 |
| LYD1008 | 101250.3 | 30.4 | 0.04 | 3 |
| LYD1008 | 101252.2 | 30.3 | L | 3 |
| LYD1007 | 101246.1 | 30.1 | L | 3 |
| LYD1007 | 101247.2 | 30.1 | 0.04 | 3 |
| LYD1007 | 101249.3 | 30.1 | 0.18 | 3 |
| LYD1005 | 101238.3 | 30.6 | 0.08 | 4 |
| LYD1004 | 101230.1 | 29.8 | 0.11 | 2 |
| LYD1004 | 101231.1 | 30.5 | 0.02 | 4 |
| LYD1003 | 101227.1 | — | — | — |
| LYD1003 | 101229.3 | — | — | — |
| LYD1000 | 101216.2 | 30.8 | L | 5 |
| LYD1000 | 101216.3 | 29.9 | 0.04 | 2 |
| CONT. | — | 29.3 | — | — |
| LYD1016 | 101351.1 | — | — | — |
| LYD1016 | 101351.2 | 31.1 | L | 3 |
| LYD1016 | 101351.3 | — | — | — |
| LYD1016 | 101352.1 | — | — | — |
| LYD1013 | 101405.1 | — | — | — |
| LYD1013 | 101406.2 | 30.7 | 0.07 | 2 |
| LYD1013 | 101407.2 | — | — | — |
| LYD1010 | 101337.1 | — | — | — |
| LYD1002 | 101284.1 | 31.3 | 0.03 | 4 |
| LYD1001 | 101222.2 | — | — | — |
| CONT. | — | 30.1 | — | — |
| LYD1016 | 101351.2 | 30.8 | 0.11 | 2 |
| LYD1016 | 101351.3 | 31.7 | L | 5 |
| LYD1013 | 101405.1 | 30.6 | 0.17 | 2 |
| LYD1013 | 101406.2 | 30.7 | 0.08 | 2 |
| LYD1013 | 101407.2 | 30.9 | 0.15 | 3 |
| LYD1010 | 101335.1 | 31.5 | 0.06 | 5 |
| LYD1006 | 101241.2 | 30.9 | 0.15 | 3 |
| LYD1002 | 101282.2 | — | — | — |
| LYD1002 | 101284.1 | 33.1 | L | 10 |
| LYD1001 | 101221.2 | — | — | — |
| LYD1001 | 101224.2 | 31.6 | 0.01 | 5 |
| CONT. | — | 30.0 | — | — |
| LYD1018 | 101272.1 | 28.3 | 0.10 | 4 |
| LYD1017 | 101207.1 | 28.6 | L | 5 |
| LYD1017 | 101209.1 | 28.7 | L | 5 |
| LYD1015 | 101275.1 | 27.8 | 0.19 | 2 |
| LYD1015 | 101277.3 | 28.0 | 0.01 | 2 |
| LYD1014 | 101266.3 | 27.8 | 0.17 | 2 |
| LYD1012 | 101264.1 | 28.8 | L | 5 |
| LYD1012 | 101264.3 | 28.2 | 0.01 | 3 |
| LYD1011 | 101095.2 | 28.2 | 0.05 | 3 |
| LYD1011 | 101097.2 | 28.7 | 0.02 | 5 |
| LYD1011 | 101098.1 | 28.0 | 0.02 | 2 |
| LYD1009 | 101259.1 | 28.0 | 0.15 | 3 |
| LYD1008 | 101250.3 | 28.0 | 0.08 | 3 |
| LYD1008 | 101252.2 | 28.4 | 0.09 | 4 |
| LYD1007 | 101246.1 | 28.3 | 0.05 | 3 |
| LYD1005 | 101238.3 | 28.7 | 0.03 | 5 |
| LYD1004 | 101230.1 | 29.1 | 0.06 | 7 |
| LYD1004 | 101231.1 | 28.1 | 0.05 | 3 |
| LYD1004 | 101233.4 | 28.7 | 0.05 | 5 |
| LYD1003 | 101228.1 | 28.0 | L | 3 |
| LYD1003 | 101229.2 | 28.4 | 0.12 | 4 |
| LYD1000 | 101216.3 | 27.9 | 0.08 | 2 |
| LYD1000 | 101217.3 | 28.0 | 0.03 | 3 |
| CONT. | — | 27.3 | — | — |

Table 313: ″CONT.″ - Control;
″Ave.″ - Average;
″% Incr.″ = % increment;
″p-val.″ - p-value,
L- p < 0.01.

### Example 33

### Evaluation of Transgenic Arabidopsis for Seed Yield and Plant Growth Rate Under Normal, Drought and Nitrogen Deficient Conditions in Greenhouse Assays Until Bolting (GH-SB Assays)

[1885] Assay 2: Plant performance improvement measured until bolting stage: plant biomass and plant growth rate in greenhouse conditions (GH-SB Assays)

[1886] Under normal (standard conditions)—This assay follows the plant biomass formation and the rosette area growth of plants grown in the greenhouse under normal growth conditions. Transgenic Arabidopsis seeds are sown in agar media supplemented with ½ Murashige-Skoog medium (MS) medium and a selection agent (Kanamycin). The T₂ transgenic seedlings are then transplanted to 1.7 trays filled with peat and perlite in a 1:2 ratio. Plants are grown under normal conditions which included irrigation of the trays with a solution containing of 6 mM inorganic nitrogen in the form of KNO₃ supplemented with 1 mM KH₂PO₄, 1 mM MgSO₄, 1.5 mM CaCl₂ and microelements. Under normal conditions the plants grow in a controlled environment in a closed transgenic greenhouse; temperature is 18-22° C., humidity around 70%; Irrigation is done by flooding with a water solution containing 6 mM N (nitrogen) (as described hereinabove), and flooding is repeated whenever water loss reached 50%. All plants are grown in the greenhouse until bolting stage. Plant biomass (the above ground tissue) is weighted directly after harvesting the rosette (plant fresh weight [FW]). Following plants are dried in an oven at 50° C. for 48 hours and weighted (plant dry weight [DW]).

[1887] Under drought and standard growth conditions—This assay follows the plant biomass formation and the rosette area growth of plants grown in the greenhouse under drought conditions and standard growth conditions. Transgenic Arabidopsis seeds are sown in phytogel media supplemented with ½ MS medium and a selection agent (Kanamycin). The T₂ transgenic seedlings are then transplanted to 1.7 trays filled with peat and perlite in a 1:2 ratio and tuff at the bottom of the tray and a net below the trays (in order to facilitate water drainage). Half of the plants are irrigated with tap water (standard growth conditions) when tray weight reached 50% of its field capacity. The other half of the plants are irrigated with tap water when tray weight reached 20% of its field capacity in order to induce drought stress (drought conditions). All plants are grown in the greenhouse until bolting stage. At harvest, plant biomass (the above ground tissue) is weighted directly after harvesting the rosette (plant fresh weight [FW]). Thereafter, plants are dried in an oven at 50° C. for 48 hours and weighted (plant dry weight [DW]).

[1888] Under limited and optimal nitrogen concentration—This assay follows the plant biomass formation and the rosette area growth of plants grown in the greenhouse at limiting and non-limiting nitrogen growth conditions. Transgenic Arabidopsis seeds are sown in agar media supplemented with ½ MS medium and a selection agent (Kanamycin). The T₂ transgenic seedlings are then transplanted to 1.7 trays filled with peat and perlite in a 1:1 ratio. The trays are irrigated with a solution containing nitrogen limiting conditions, which are achieved by irrigating the plants with a solution containing 2.8 mM inorganic nitrogen in the form of KNO₃, supplemented with 1 mM KH₂PO₄, 1 mM MgSO₄, 1.5 mM CaCl₂ and microelements, while normal nitrogen levels are achieved by applying a solution of 5.5 mM inorganic nitrogen also in the form of KNO₃ supplemented with 1 mM KH₂PO₄, 1 mM MgSO₄, 1.5 mM CaCl₂ and microelements. All plants are grown in the greenhouse until bolting stage. Plant biomass (the above ground tissue) is weighted directly after harvesting the rosette (plant fresh weight [FW]). Following, plants are dried in an oven at 50° C. for 48 hours and weighted (plant dry weight [DW]).

[1889] Each construct is validated at its T₂ generation. Transgenic plants transformed with a construct conformed by an empty vector carrying a promoter and the selectable marker are used as control [The promoters which are described in Example 28 above, e.g., the At6669 promoter (SEQ ID NO: 25) or the 35S promoter (SEQ ID NO: 37)]. Additionally or alternatively, Mock-transgenic plants expressing the uidA reporter gene (GUS-Intron) or with no gene at all, under the same promoter are used as control.

[1890] The plants are analyzed for their overall size, growth rate, fresh weight and dry matter. Transgenic plants performance is compared to control plants grown in parallel under the same conditions. The experiment is planned in nested randomized plot distribution. For each gene of the invention three to five independent transformation events are analyzed from each construct.

[1891] Digital imaging—A laboratory image acquisition system, which consists of a digital reflex camera (Canon EOS 300D) attached with a 55 mm focal length lens (Canon EF-S series), mounted on a reproduction device (Kaiser RS), which includes 4 light units (4×150 Watts light bulb) is used for capturing images of plant samples.

[1892] The image capturing process is repeated every 2 days starting from day 1 after transplanting till day 15. Same camera, placed in a custom made iron mount, is used for capturing images of larger plants sawn in white tubs in an environmental controlled greenhouse. The tubs are square shape include 1.7 liter trays. During the capture process, the tubes are placed beneath the iron mount, while avoiding direct sun light and casting of shadows.

[1893] An image analysis system is used, which consists of a personal desktop computer (Intel P4 3.0 GHz processor) and a public domain program—ImageJ 1.39 [Java based image processing program which is developed at the U.S. National Institutes of Health and freely available on the internet at rsbweb (dot) nih (dot) gov/]. Images are captured in resolution of 10 Mega Pixels (3888×2592 pixels) and stored in a low compression JPEG (Joint Photographic Experts Group standard) format. Next, analyzed data is saved to text files and processed using the JMP statistical analysis software (SAS institute).

[1894] Leaf analysis—Using the digital analysis leaves data is calculated, including leaf number, rosette area, rosette diameter, leaf blade area, petiole relative area and leaf petiole length.

[1895] Vegetative growth rate: the relative growth rate (RGR) of leaf blade area (Formula 12), leaf number (Formula 8), rosette area (Formula 9), rosette diameter (Formula 10), plot coverage (Formula 11) and Petiole Relative Area (Formula 25) as described above.

[1896] Plant Fresh and Dry weight—On about day 80 from sowing, the plants are harvested and directly weighted for the determination of the plant fresh weight (FW) and left to dry at 50° C. in a drying chamber for about 48 hours before weighting to determine plant dry weight (DW).

[1897] Statistical analyses—To identify genes conferring significantly improved tolerance to abiotic stresses, the results obtained from the transgenic plants are compared to those obtained from control plants. To identify outperforming genes and constructs, results from the independent transformation events tested are analyzed separately. Data is analyzed using Student's t-test and results are considered significant if the p value is less than 0.1. The JMP statistics software package is used (Version 5.2.1, SAS Institute Inc., Cary, N.C., USA).

[1898] Tables 314-316 summarize the observed phenotypes of transgenic plants expressing the genes constructs using the GH-SB Assays.

[1899] The genes listed in Tables 314-316 improved plant performance when grown at standard (normal, non-stress) conditions. These genes produced larger plants with a larger photosynthetic area (e.g., leaf number), biomass (fresh weight, dry weight, rosette diameter, rosette area and plot coverage), and relative growth rate (e.g., of leaf number, plot coverage and rosette diameter). The genes were cloned under the regulation of a constitutive At6669 promoter (SEQ ID NO: 25). The evaluation of each gene was performed by testing the performance of different number of events. Events with p-value<0.1 were considered statistically significant.

TABLE 314
Genes showing improved plant performance under regulation of the At6669 promoter
at Normal growth conditions

| | | Dry Weight | | | Fresh Weight | | | | | |
|---|---|---|---|---|---|---|---|---|---|---|
| | | [mg] | | | [mg] | | | Leaf Number | | |
| Gene | | | P- | % | | P- | % | | P- | % |
| Name | Event # | Ave. | Val. | Incr. | Ave. | Val. | Incr. | Ave. | Val. | Incr. |
| LBY531 | 101496.2 | — | — | — | 5045.6 | 0.13 | 5 | — | — | — |
| LBY531 | 101497.1 | 375.0 | 0.05 | 6 | 5063.1 | 0.02 | 6 | 12.7 | L | 4 |
| LBY530 | 101611.1 | — | — | — | — | — | — | 12.6 | 0.03 | 3 |
| LBY528 | 101485.1 | — | — | — | 5009.4 | 0.03 | 5 | — | — | — |
| LBY528 | 101486.3 | 383.8 | 0.01 | 8 | — | — | — | — | — | — |
| LBY527 | 101381.2 | — | — | — | 5040.6 | 0.02 | 5 | — | — | — |
| LBY527 | 101384.1 | 396.9 | L | 12 | 4988.8 | 0.18 | 4 | — | — | — |
| LBY522 | 101542.2 | 376.2 | L | 6 | 5137.5 | L | 7 | — | — | — |
| LBY522 | 101542.3 | — | — | — | 5240.0 | 0.06 | 9 | — | — | — |
| LBY522 | 101544.1 | 390.6 | 0.09 | 10 | — | — | — | — | — | — |
| LBY518 | 101374.3 | — | — | — | — | — | — | 12.6 | 0.03 | 3 |
| LBY513 | 101591.1 | — | — | — | — | — | — | 12.6 | 0.08 | 4 |
| LBY513 | 101592.3 | 380.6 | 0.15 | 7 | 5109.4 | 0.19 | 7 | — | — | — |
| LBY478 | 101550.1 | 399.4 | 0.06 | 12 | — | — | — | — | — | — |
| LBY478 | 101550.3 | — | — | — | — | — | — | 12.8 | 0.04 | 5 |
| LBY476 | 101546.2 | — | — | — | 5173.8 | L | 8 | — | — | — |
| LBY476 | 101548.2 | — | — | — | — | — | — | 12.5 | 0.17 | 3 |
| LBY472 | 101422.8 | 383.1 | 0.06 | 8 | 5193.1 | 0.03 | 9 | — | — | — |
| LBY467 | 101415.2 | — | — | — | 4962.5 | 0.11 | 4 | — | — | — |
| LBY467 | 101419.2 | — | — | — | 5296.2 | L | 11 | — | — | — |
| CONT. | — | 355.1 | — | — | 4785.4 | — | — | 12.2 | — | — |
| LBY504 | 101526.3 | — | — | — | 1006.3 | 0.19 | 9 | — | — | — |
| LBY503 | 101298.2 | 75.6 | 0.13 | 11 | 1012.5 | 0.15 | 9 | — | — | — |
| LBY503 | 101299.3 | 84.4 | 0.07 | 23 | 1137.5 | 0.09 | 23 | — | — | — |
| LBY503 | 101299.4 | — | — | — | 1006.3 | 0.19 | 9 | — | — | — |
| LBY502 | 101348.3 | — | — | — | 1093.8 | 0.06 | 18 | 10.5 | 0.05 | 5 |
| LBY502 | 101349.2 | 86.9 | L | 27 | — | — | — | — | — | — |
| LBY501 | 101457.1 | 75.0 | 0.16 | 10 | — | — | — | — | — | — |
| LBY501 | 101458.2 | — | — | — | — | — | — | 10.5 | 0.01 | 5 |
| LBY501 | 101459.1 | — | — | — | 1093.8 | 0.11 | 18 | 10.9 | 0.11 | 9 |
| LBY497 | 101450.1 | — | — | — | 1187.5 | 0.10 | 28 | 10.8 | 0.06 | 8 |
| LBY497 | 101450.2 | 75.0 | 0.17 | 10 | 1031.2 | 0.09 | 11 | — | — | — |
| LBY497 | 101452.1 | 78.8 | 0.14 | 15 | 1037.5 | 0.08 | 12 | — | — | — |
| LBY497 | 101453.2 | 77.5 | 0.18 | 13 | — | — | — | — | — | — |
| LBY497 | 101454.3 | — | — | — | 1018.8 | 0.17 | 10 | — | — | — |
| LBY496 | 101448.2 | — | — | — | 1018.8 | 0.13 | 10 | — | — | — |
| LBY493 | 101520.2 | — | — | — | 1131.2 | 0.12 | 22 | — | — | — |
| LBY489 | 101443.2 | — | — | — | 1068.8 | 0.04 | 16 | — | — | — |
| LBY489 | 101444.1 | — | — | — | 1112.5 | 0.07 | 20 | — | — | — |
| LBY489 | 101444.2 | 82.5 | 0.07 | 21 | 1137.5 | 0.14 | 23 | — | — | — |
| LBY485 | 101505.2 | 81.2 | 0.02 | 19 | 1062.5 | 0.04 | 15 | — | — | — |
| LBY484 | 101439.3 | 79.4 | 0.09 | 16 | 1068.8 | 0.06 | 16 | — | — | — |
| LBY481 | 101503.3 | 77.5 | 0.10 | 13 | 1156.2 | 0.14 | 25 | — | — | — |
| LBY481 | 101504.2 | 92.5 | L | 35 | 1100.0 | 0.04 | 19 | — | — | — |
| LBY479 | 101432.2 | 77.5 | 0.07 | 13 | 1106.2 | 0.01 | 20 | 10.6 | 0.11 | 6 |
| LBY477 | 101426.1 | 86.9 | 0.05 | 27 | 1125.0 | 0.15 | 22 | — | — | — |
| LBY474 | 101401.1 | — | — | — | — | — | — | 10.7 | L | 7 |
| LBY474 | 101402.2 | — | — | — | 1062.5 | 0.14 | 15 | — | — | — |
| LBY473 | 101362.3 | — | — | — | 1043.8 | 0.15 | 13 | — | — | — |
| LBY473 | 101364.1 | 75.0 | 0.17 | 10 | — | — | — | — | — | — |
| CONT. | — | 68.4 | — | — | 925.0 | — | — | 9.98 | — | — |
| LYD1019 | 101535.1 | — | — | — | — | — | — | 9.50 | L | 5 |
| LYD1019 | 101535.2 | 107.5 | 0.14 | 8 | — | — | — | — | — | — |
| LYD1019 | 101536.1 | — | — | — | — | — | — | 9.50 | 0.04 | 5 |
| CONT. | — | 99.4 | — | — | — | — | — | 9.07 | — | — |
| LBY534 | 101322.2 | 61.9 | 0.19 | 19 | — | — | — | — | — | — |
| LBY523 | 101378.1 | — | — | — | 875.0 | 0.13 | 20 | — | — | — |
| LBY519 | 101475.1 | 65.6 | 0.17 | 26 | — | — | — | 10.8 | L | 8 |
| LBY516 | 101466.2 | 62.5 | 0.07 | 20 | — | — | — | — | — | — |
| LBY515 | 101303.1 | 61.2 | 0.10 | 18 | — | — | — | — | — | — |
| LBY514 | 101385.1 | 60.6 | 0.16 | 17 | — | — | — | — | — | — |
| LBY514 | 101385.2 | 60.0 | 0.11 | 15 | — | — | — | — | — | — |
| LBY512 | 101533.2 | 63.1 | 0.16 | 21 | — | — | — | — | — | — |
| LBY511 | 101365.1 | 59.4 | 0.15 | 14 | — | — | — | — | — | — |
| LBY507 | 101460.2 | 72.5 | 0.06 | 40 | 1018.8 | 0.01 | 39 | 10.5 | 0.07 | 4 |
| LBY507 | 101462.2 | 60.0 | 0.11 | 15 | — | — | — | — | — | — |
| LBY507 | 101463.1 | — | — | — | 1037.5 | 0.07 | 42 | — | — | — |
| LBY469 | 101340.1 | 60.0 | 0.11 | 15 | — | — | — | 10.5 | 0.11 | 4 |
| LBY469 | 101343.2 | 66.2 | 0.01 | 27 | 862.5 | 0.16 | 18 | — | — | — |
| LBY468 | 101305.1 | 59.4 | 0.13 | 14 | — | — | — | — | — | — |
| LBY466 | 101288.2 | 68.8 | L | 32 | 1050.0 | 0.03 | 43 | — | — | — |
| CONT. | — | 52.0 | — | — | 732.1 | — | — | 10.1 | — | — |
| LYD1019 | 101535.2 | 125.3 | 0.02 | 8 | 1596.9 | L | 10 | — | — | — |
| LYD1019 | 101536.3 | 125.0 | 0.06 | 8 | — | — | — | — | — | — |
| CONT. | — | 115.5 | — | — | 1450.0 | — | — | — | — | — |
| LBY504 | 101525.1 | 62.5 | 0.07 | 11 | — | — | — | — | — | — |
| LBY504 | 101529.3 | — | — | — | — | — | — | 10.3 | 0.08 | 3 |
| LBY502 | 101346.3 | 60.0 | 0.19 | 7 | — | — | — | — | — | — |
| LBY502 | 101348.3 | — | — | — | 1000.0 | 0.03 | 22 | 10.8 | 0.12 | 8 |
| LBY499 | 101291.1 | 65.0 | 0.02 | 16 | — | — | — | — | — | — |
| LBY496 | 101445.3 | 68.1 | 0.15 | 21 | — | — | — | — | — | — |
| LBY493 | 101520.1 | — | — | — | 950.0 | 0.04 | 16 | — | — | — |
| LBY493 | 101520.2 | 62.5 | 0.16 | 11 | — | — | — | — | — | — |
| LBY485 | 101506.2 | 62.5 | 0.16 | 11 | — | — | — | — | — | — |
| LBY485 | 101509.2 | — | — | — | — | — | — | 10.4 | 0.03 | 5 |
| LBY485 | 101509.3 | 60.6 | 0.15 | 8 | — | — | — | 10.6 | L | 6 |
| LBY484 | 101435.2 | 63.8 | 0.03 | 14 | — | — | — | — | — | — |
| LBY479 | 101432.1 | — | — | — | 906.2 | 0.09 | 11 | — | — | — |
| LBY479 | 101432.2 | — | — | — | 893.8 | 0.16 | 9 | 10.3 | 0.08 | 3 |
| LBY477 | 101426.1 | — | — | — | — | — | — | 10.2 | 0.12 | 3 |
| LBY474 | 101404.3 | — | — | — | 950.0 | 0.04 | 16 | — | — | — |
| LBY471 | 101511.1 | 62.5 | 0.07 | 11 | — | — | — | — | — | — |
| LBY471 | 101513.3 | 62.5 | 0.07 | 11 | 887.5 | 0.18 | 8 | — | — | — |
| LBY465 | 101413.1 | 62.5 | 0.05 | 11 | — | — | — | — | — | — |
| CONT. | — | 56.1 | — | — | 819.6 | — | — | 9.96 | — | — |
| LBY534 | 101324.3 | — | — | — | 1050.0 | 0.09 | 12 | — | — | — |
| LBY523 | 101376.2 | — | — | — | — | — | — | 10.5 | 0.02 | 8 |
| LBY520 | 101316.2 | — | — | — | — | — | — | 10.2 | L | 5 |
| LBY519 | 101475.1 | — | — | — | — | — | — | 10.2 | L | 6 |
| LBY515 | 101302.2 | 80.0 | 0.15 | 14 | — | — | — | — | — | — |
| LBY515 | 101303.1 | — | — | — | — | — | — | 10.1 | 0.08 | 5 |
| LBY514 | 101385.1 | — | — | — | — | — | — | 9.94 | 0.07 | 3 |
| LBY514 | 101389.2 | — | — | — | — | — | — | 9.94 | 0.07 | 3 |
| LBY512 | 101530.1 | 83.8 | 0.06 | 19 | 1112.5 | 0.02 | 18 | — | — | — |
| LBY511 | 101368.3 | — | — | — | — | — | — | 9.94 | 0.07 | 3 |
| LBY511 | 101369.2 | 83.1 | 0.08 | 18 | — | — | — | — | — | — |
| LBY507 | 101460.1 | — | — | — | — | — | — | 10.1 | 0.08 | 5 |
| LBY507 | 101460.2 | — | — | — | — | — | — | 10.4 | 0.18 | 7 |
| LBY507 | 101462.2 | 98.8 | L | 40 | 1187.5 | L | 26 | — | — | — |
| LBY500 | 101314.2 | — | — | — | — | — | — | 10.2 | 0.17 | 5 |
| LBY500 | 101314.3 | 83.1 | 0.07 | 18 | — | — | — | — | — | — |
| LBY469 | 101340.2 | — | — | — | — | — | — | 10.3 | 0.12 | 7 |
| LBY468 | 101306.2 | — | — | — | — | — | — | 10.1 | 0.08 | 5 |
| LBY468 | 101309.3 | — | — | — | — | — | — | 10.1 | 0.02 | 4 |
| CONT. | — | 70.4 | — | — | 941.1 | — | — | 9.68 | — | — |
| LBY531 | 101496.1 | — | — | — | 2238.1 | 0.07 | 15 | — | — | — |
| LBY528 | 101488.1 | — | — | — | 2162.5 | 0.08 | 11 | — | — | — |
| LBY513 | 101591.1 | — | — | — | — | — | — | 11.9 | 0.01 | 7 |
| LBY513 | 101592.2 | 150.6 | 0.12 | 7 | — | — | — | 11.7 | L | 5 |
| LBY513 | 101592.3 | 158.1 | 0.13 | 12 | 2226.2 | L | 14 | 11.5 | 0.11 | 3 |
| LBY478 | 101552.2 | — | — | — | — | — | — | 11.5 | 0.11 | 3 |
| LBY476 | 101547.4 | 153.8 | 0.03 | 9 | 2116.2 | 0.08 | 9 | — | — | — |
| LBY476 | 101548.2 | — | — | — | — | — | — | 11.8 | 0.07 | 6 |
| LBY467 | 101415.1 | — | — | — | — | — | — | 12.5 | 0.04 | 12 |
| LBY467 | 101415.2 | — | — | — | — | — | — | 11.9 | 0.01 | 7 |
| LBY467 | 101418.1 | 152.5 | 0.02 | 8 | — | — | — | 11.8 | 0.17 | 6 |
| LBY467 | 101419.2 | — | — | — | — | — | — | 11.8 | L | 6 |
| CONT. | — | 141.4 | — | — | 1950.0 | — | — | 11.1 | — | — |
| MGP93 | 101395.2 | 77.5 | 0.10 | 10 | — | — | — | — | — | — |
| LBY130 | 101390.1 | 79.4 | 0.14 | 13 | — | — | — | — | — | — |
| LBY130 | 101390.2 | 82.5 | 0.12 | 17 | 1134.4 | 0.13 | 16 | — | — | — |
| LBY130 | 101393.2 | 76.2 | 0.14 | 8 | — | — | — | — | — | — |
| CONT. | — | 70.4 | — | — | 980.4 | — | — | — | — | — |
| MGP93 | 101396.1 | — | — | — | — | — | — | 10.5 | 0.11 | 5 |
| MGP93 | 101396.2 | 95.9 | 0.13 | 9 | 1281.2 | 0.05 | 16 | 10.9 | 0.04 | 8 |
| MGP93 | 101397.3 | — | — | — | 1218.8 | 0.10 | 10 | — | — | — |
| LBY130 | 101390.2 | 108.8 | 0.02 | 24 | 1431.2 | L | 29 | — | — | — |
| CONT. | — | 87.9 | — | — | 1108.9 | — | — | 10.1 | — | — |

Table 314.
“CONT.”—Control;
“Ave.”—Average;
“% Incr.” = % increment;
“p-val.”—p-value,
L - p < 0.01.

TABLE 315
Genes showing improved plant performance under regulation of the At6669 promoter at Normal
growth conditions

| | | Plot Coverage | | | Rosette Area | | | Rosette Diameter | | |
|---|---|---|---|---|---|---|---|---|---|---|
| | | [cm²] | | | [cm²] | | | [cm] | | |
| | | | P- | % | | P- | % | | P- | % |
| Gene Name | Event # | Ave. | Val. | Incr. | Ave. | Val. | Incr. | Ave. | Val. | Incr. |
| LBY531 | 101496.1 | — | — | — | — | — | — | 5.89 | 0.17 | 8 |
| LBY531 | 101496.2 | 90.3 | 0.01 | 11 | 11.3 | 0.01 | 11 | 5.72 | 0.04 | 5 |
| LBY528 | 101485.1 | 94.2 | L | 15 | 11.8 | L | 15 | 5.77 | 0.01 | 6 |
| LBY528 | 101485.3 | 102.8 | L | 26 | 12.8 | L | 26 | 6.01 | L | 10 |
| LBY527 | 101381.2 | 94.1 | L | 15 | 11.8 | L | 15 | 5.84 | L | 7 |
| LBY527 | 101384.3 | 89.2 | 0.03 | 9 | 11.1 | 0.03 | 9 | 5.62 | 0.20 | 3 |
| LBY522 | 101542.2 | 95.1 | 0.02 | 16 | 11.9 | 0.02 | 16 | 5.91 | 0.06 | 8 |
| LBY522 | 101542.3 | 102.5 | L | 26 | 12.8 | L | 26 | 6.09 | 0.16 | 12 |
| LBY513 | 101592.3 | 94.5 | L | 16 | 11.8 | L | 16 | 5.97 | 0.14 | 9 |
| LBY476 | 101546.2 | 96.8 | L | 19 | 12.1 | L | 19 | 6.04 | L | 11 |
| LBY472 | 101422.8 | 90.7 | 0.01 | 11 | 11.3 | 0.01 | 11 | 5.73 | 0.05 | 5 |
| LBY467 | 101419.2 | — | — | — | — | — | — | 5.93 | 0.16 | 9 |
| CONT. | — | 81.6 | — | — | 10.2 | — | — | 5.46 | — | — |
| LBY504 | 101526.3 | 62.6 | 0.08 | 7 | 7.82 | 0.08 | 7 | 4.85 | 0.16 | 4 |
| LBY503 | 101295.1 | — | — | — | — | — | — | 5.11 | 0.15 | 9 |
| LBY503 | 101295.2 | — | — | — | — | — | — | 5.23 | L | 12 |
| LBY503 | 101298.2 | 71.8 | 0.13 | 23 | 8.98 | 0.13 | 23 | 5.28 | 0.13 | 13 |
| LBY503 | 101299.3 | 69.9 | L | 19 | 8.73 | L | 19 | 5.12 | 0.14 | 9 |
| LBY503 | 101299.4 | 65.3 | 0.05 | 12 | 8.16 | 0.05 | 12 | 4.96 | 0.07 | 6 |
| LBY502 | 101346.3 | 69.5 | L | 19 | 8.69 | L | 19 | 5.14 | L | 10 |
| LBY502 | 101348.3 | 74.2 | 0.19 | 27 | 9.28 | 0.19 | 27 | 5.30 | L | 13 |
| LBY501 | 101458.2 | 71.3 | L | 22 | 8.91 | L | 22 | 5.19 | 0.02 | 11 |
| LBY501 | 101459.1 | 71.5 | L | 22 | 8.94 | L | 22 | 5.26 | L | 12 |
| LBY499 | 101290.2 | 65.7 | L | 12 | 8.21 | L | 12 | 5.09 | 0.02 | 8 |
| LBY499 | 101291.3 | 70.1 | 0.17 | 20 | 8.77 | 0.17 | 20 | 5.20 | L | 11 |
| LBY497 | 101450.1 | 79.8 | L | 36 | 9.98 | L | 36 | 5.41 | L | 15 |
| LBY497 | 101450.2 | — | — | — | — | — | — | 4.84 | 0.17 | 3 |
| LBY497 | 101452.1 | — | — | — | — | — | — | 4.87 | 0.17 | 4 |
| LBY497 | 101453.2 | 66.2 | 0.09 | 13 | 8.27 | 0.09 | 13 | 4.89 | 0.05 | 4 |
| LBY497 | 101454.3 | — | — | — | — | — | — | 5.12 | 0.09 | 9 |
| LBY496 | 101445.1 | 63.6 | 0.11 | 9 | 7.96 | 0.11 | 9 | 5.01 | L | 7 |
| LBY496 | 101445.2 | — | — | — | — | — | — | 5.11 | 0.09 | 9 |
| LBY496 | 101445.3 | — | — | — | — | — | — | 5.04 | L | 7 |
| LBY496 | 101448.2 | 67.5 | L | 15 | 8.44 | L | 15 | 5.04 | 0.01 | 7 |
| LBY493 | 101520.2 | 72.1 | 0.09 | 23 | 9.01 | 0.09 | 23 | 5.29 | L | 13 |
| LBY493 | 101522.1 | 69.8 | 0.07 | 19 | 8.72 | 0.07 | 19 | 5.19 | 0.07 | 11 |
| LBY489 | 101441.1 | 63.1 | 0.04 | 8 | 7.88 | 0.04 | 8 | 4.92 | 0.08 | 5 |
| LBY489 | 101444.1 | 66.1 | L | 13 | 8.26 | L | 13 | 4.99 | L | 6 |
| LBY489 | 101444.2 | 76.2 | 0.13 | 30 | 9.53 | 0.13 | 30 | 5.38 | 0.16 | 15 |
| LBY485 | 101505.2 | — | — | — | — | — | — | 4.93 | 0.02 | 5 |
| LBY484 | 101435.1 | 63.5 | 0.03 | 9 | 7.94 | 0.03 | 9 | 4.97 | 0.01 | 6 |
| LBY484 | 101437.3 | 74.4 | L | 27 | 9.29 | L | 27 | 5.37 | L | 15 |
| LBY484 | 101439.3 | 67.3 | 0.02 | 15 | 8.42 | 0.02 | 15 | 5.18 | L | 11 |
| LBY481 | 101501.2 | 61.1 | 0.19 | 4 | 7.64 | 0.19 | 4 | — | — | — |
| LBY481 | 101503.3 | — | — | — | — | — | — | 5.00 | 0.08 | 7 |
| LBY481 | 101504.2 | — | — | — | — | — | — | 4.90 | 0.04 | 5 |
| LBY479 | 101432.1 | 72.4 | 0.14 | 24 | 9.05 | 0.14 | 24 | 5.23 | 0.08 | 12 |
| LBY479 | 101432.2 | 68.4 | L | 17 | 8.55 | L | 17 | 5.11 | L | 9 |
| LBY477 | 101426.1 | 69.2 | 0.03 | 18 | 8.65 | 0.03 | 18 | 5.19 | 0.18 | 11 |
| LBY477 | 101428.3 | 69.3 | 0.09 | 18 | 8.67 | 0.09 | 18 | 5.10 | 0.16 | 9 |
| LBY474 | 101402.2 | 61.6 | 0.13 | 5 | 7.70 | 0.13 | 5 | 4.88 | 0.05 | 4 |
| LBY474 | 101404.3 | — | — | — | — | — | — | 4.83 | 0.15 | 3 |
| LBY473 | 101364.2 | 64.3 | 0.02 | 10 | 8.03 | 0.02 | 10 | 4.88 | 0.08 | 4 |
| LBY465 | 101410.1 | 72.6 | L | 24 | 9.08 | L | 24 | 5.30 | L | 13 |
| LBY465 | 101410.3 | 61.4 | 0.16 | 5 | 7.67 | 0.16 | 5 | 4.84 | 0.14 | 3 |
| LBY465 | 101411.1 | 64.8 | 0.09 | 11 | 8.10 | 0.09 | 11 | 4.89 | 0.11 | 4 |
| CONT. | — | 58.5 | — | — | 7.31 | — | — | 4.69 | — | — |
| LYD1019 | 101536.1 | — | — | — | 6.84 | 0.20 | 7 | 4.48 | 0.15 | 4 |
| LYD1019 | 101538.2 | 63.0 | 0.07 | 23 | 7.87 | 0.07 | 23 | 4.76 | 0.08 | 10 |
| CONT. | — | 51.4 | — | — | 6.42 | — | — | 4.32 | — | — |
| LBY523 | 101378.1 | 59.0 | 0.07 | 18 | 7.37 | 0.07 | 18 | 4.86 | 0.07 | 9 |
| LBY520 | 101315.1 | — | — | — | — | — | — | 4.72 | 0.18 | 5 |
| LBY520 | 101316.2 | — | — | — | — | — | — | 4.74 | 0.13 | 6 |
| LBY520 | 101319.3 | 55.5 | 0.17 | 11 | 6.93 | 0.17 | 11 | 4.90 | 0.03 | 10 |
| LBY515 | 101301.3 | — | — | — | — | — | — | 4.82 | 0.07 | 8 |
| LBY515 | 101303.1 | — | — | — | — | — | — | 4.98 | 0.09 | 11 |
| LBY514 | 101385.1 | 71.6 | 0.11 | 43 | 8.95 | 0.11 | 43 | 5.44 | 0.07 | 22 |
| LBY514 | 101387.2 | 62.0 | 0.16 | 24 | 7.75 | 0.16 | 24 | 4.91 | 0.18 | 10 |
| LBY507 | 101460.2 | 62.8 | 0.01 | 26 | 7.84 | 0.01 | 26 | 5.02 | 0.02 | 12 |
| LBY507 | 101463.1 | 78.0 | 0.03 | 56 | 9.76 | 0.03 | 56 | 5.66 | L | 26 |
| LBY500 | 101313.2 | 61.5 | 0.02 | 23 | 7.69 | 0.02 | 23 | 5.06 | L | 13 |
| LBY469 | 101340.1 | — | — | — | — | — | — | 5.11 | 0.10 | 14 |
| LBY468 | 101305.1 | 61.3 | 0.15 | 23 | 7.67 | 0.15 | 23 | 5.09 | 0.07 | 14 |
| LBY466 | 101288.2 | 69.2 | L | 39 | 8.65 | L | 39 | 5.39 | L | 20 |
| LBY466 | 101289.1 | — | — | — | — | — | — | 4.74 | 0.16 | 6 |
| CONT. | — | 50.0 | — | — | 6.25 | — | — | 4.47 | — | — |
| LYD1019 | 101535.2 | 63.2 | 0.10 | 9 | 7.91 | 0.10 | 9 | 4.88 | 0.17 | 4 |
| LYD1019 | 101538.2 | 65.8 | 0.07 | 13 | 8.23 | 0.07 | 13 | 4.94 | 0.11 | 6 |
| CONT. | — | 58.1 | — | — | 7.26 | — | — | 4.67 | — | — |
| LBY504 | 101529.3 | 61.4 | 0.15 | 16 | 7.68 | 0.15 | 16 | 5.15 | 0.09 | 11 |
| LBY503 | 101295.2 | 61.0 | 0.16 | 15 | 7.63 | 0.16 | 15 | 5.08 | 0.07 | 10 |
| LBY502 | 101346.3 | 63.0 | 0.02 | 19 | 7.87 | 0.02 | 19 | 5.15 | 0.06 | 11 |
| LBY502 | 101348.3 | 73.1 | 0.04 | 38 | 9.14 | 0.04 | 38 | 5.43 | L | 17 |
| LBY502 | 101349.2 | 63.2 | L | 19 | 7.90 | L | 19 | 5.21 | L | 13 |
| LBY501 | 101455.2 | 60.6 | 0.02 | 15 | 7.58 | 0.02 | 15 | 4.97 | 0.03 | 7 |
| LBY501 | 101459.1 | — | — | — | — | — | — | 5.05 | 0.06 | 9 |
| LBY499 | 101290.1 | — | — | — | — | — | — | 5.01 | 0.18 | 8 |
| LBY497 | 101450.1 | 60.4 | 0.11 | 14 | 7.55 | 0.11 | 14 | 4.95 | 0.05 | 7 |
| LBY496 | 101445.2 | 57.7 | 0.20 | 9 | 7.22 | 0.20 | 9 | 5.33 | 0.15 | 15 |
| LBY496 | 101448.2 | — | — | — | — | — | — | 4.84 | 0.12 | 5 |
| LBY493 | 101520.1 | 62.8 | 0.13 | 19 | 7.85 | 0.13 | 19 | 4.90 | 0.18 | 6 |
| LBY489 | 101443.2 | 57.7 | 0.09 | 9 | 7.21 | 0.09 | 9 | 4.97 | 0.20 | 7 |
| LBY489 | 101444.2 | 60.5 | 0.13 | 14 | 7.56 | 0.13 | 14 | 4.98 | 0.19 | 8 |
| LBY485 | 101509.3 | 61.0 | 0.01 | 15 | 7.62 | 0.01 | 15 | 5.06 | L | 9 |
| LBY484 | 101439.3 | 62.2 | L | 18 | 7.78 | L | 18 | 5.22 | 0.04 | 13 |
| LBY479 | 101432.1 | — | — | — | — | — | — | 5.20 | 0.12 | 12 |
| LBY479 | 101432.2 | — | — | — | — | — | — | 4.88 | 0.10 | 5 |
| LBY477 | 101428.3 | 63.6 | 0.12 | 20 | 7.95 | 0.12 | 20 | 5.05 | 0.03 | 9 |
| LBY477 | 101429.2 | 58.8 | 0.07 | 11 | 7.35 | 0.07 | 11 | — | — | — |
| LBY474 | 101404.3 | 63.5 | 0.02 | 20 | 7.94 | 0.02 | 20 | 5.09 | L | 10 |
| LBY473 | 101360.2 | 59.2 | 0.18 | 12 | 7.40 | 0.18 | 12 | — | — | — |
| LBY473 | 101364.1 | 56.5 | 0.19 | 7 | 7.06 | 0.19 | 7 | — | — | — |
| LBY471 | 101510.2 | 65.8 | L | 24 | 8.22 | L | 24 | 5.19 | L | 12 |
| LBY471 | 101513.3 | 59.4 | 0.03 | 12 | 7.43 | 0.03 | 12 | 5.07 | 0.07 | 9 |
| LBY465 | 101410.1 | 62.2 | 0.08 | 17 | 7.77 | 0.08 | 17 | 5.15 | 0.02 | 11 |
| LBY465 | 101411.1 | 63.5 | 0.10 | 20 | 7.94 | 0.10 | 20 | 5.09 | 0.07 | 10 |
| LBY465 | 101413.1 | — | — | — | — | — | — | 5.07 | 0.17 | 10 |
| CONT. | — | 52.9 | — | — | 6.62 | — | — | 4.63 | — | — |
| LBY534 | 101321.1 | 64.0 | 0.18 | 13 | 8.00 | 0.18 | 13 | — | — | — |
| LBY529 | 101491.2 | — | — | — | — | — | — | 4.96 | 0.05 | 4 |
| LBY529 | 101493.2 | — | — | — | — | — | — | 4.97 | 0.03 | 4 |
| LBY524 | 101484.3 | 63.3 | 0.02 | 12 | 7.92 | 0.02 | 12 | 5.05 | 0.16 | 5 |
| LBY523 | 101376.2 | 67.3 | 0.11 | 19 | 8.42 | 0.11 | 19 | — | — | — |
| LBY523 | 101377.2 | 64.7 | L | 14 | 8.09 | L | 14 | 5.11 | L | 7 |
| LBY520 | 101315.1 | 61.8 | 0.12 | 9 | 7.73 | 0.12 | 9 | 5.01 | 0.02 | 5 |
| LBY520 | 101316.2 | 63.6 | 0.01 | 12 | 7.95 | 0.01 | 12 | 5.06 | 0.08 | 6 |
| LBY519 | 101475.1 | — | — | — | — | — | — | 5.28 | 0.18 | 10 |
| LBY519 | 101479.1 | 65.1 | L | 15 | 8.13 | L | 15 | 5.06 | L | 6 |
| LBY517 | 101471.2 | 59.6 | 0.19 | 5 | 7.45 | 0.19 | 5 | 4.93 | 0.06 | 3 |
| LBY512 | 101534.3 | 60.5 | 0.10 | 7 | 7.56 | 0.10 | 7 | — | — | — |
| LBY511 | 101369.3 | — | — | — | — | — | — | 5.11 | L | 7 |
| LBY508 | 101515.2 | 62.8 | 0.07 | 11 | 7.85 | 0.07 | 11 | — | — | — |
| LBY508 | 101516.2 | 65.2 | 0.09 | 15 | 8.15 | 0.09 | 15 | 5.26 | L | 10 |
| LBY508 | 101517.1 | 71.9 | L | 27 | 8.98 | L | 27 | 5.36 | L | 12 |
| LBY507 | 101463.2 | 61.9 | 0.09 | 9 | 7.73 | 0.09 | 9 | — | — | — |
| LBY500 | 101314.2 | 63.7 | L | 12 | 7.96 | L | 12 | 4.97 | 0.09 | 4 |
| LBY469 | 101340.2 | 65.0 | 0.05 | 15 | 8.13 | 0.05 | 15 | 5.12 | 0.18 | 7 |
| LBY469 | 101343.2 | 60.8 | 0.07 | 7 | 7.61 | 0.07 | 7 | 5.02 | 0.11 | 5 |
| LBY469 | 101344.2 | 66.4 | L | 17 | 8.30 | L | 17 | 5.31 | L | 11 |
| LBY468 | 101305.2 | 62.2 | 0.05 | 10 | 7.77 | 0.05 | 10 | 5.09 | L | 6 |
| LBY468 | 101309.2 | 62.7 | 0.17 | 11 | 7.84 | 0.17 | 11 | 5.04 | 0.16 | 5 |
| LBY466 | 101285.1 | 63.8 | 0.01 | 13 | 7.98 | 0.01 | 13 | 5.16 | 0.09 | 8 |
| LBY466 | 101289.1 | — | — | — | — | — | — | 4.96 | 0.17 | 4 |
| CONT. | — | 56.7 | — | — | 7.09 | — | — | 4.79 | — | — |
| LBY531 | 101495.4 | — | — | — | — | — | — | 5.85 | 0.06 | 2 |
| LBY531 | 101496.1 | 97.9 | L | 13 | 12.2 | L | 13 | 6.08 | L | 6 |
| LBY530 | 101614.2 | — | — | — | — | — | — | 5.84 | 0.14 | 2 |
| LBY530 | 101614.3 | — | — | — | — | — | — | 5.95 | L | 4 |
| LBY522 | 101541.2 | 89.9 | 0.14 | 4 | 11.2 | 0.14 | 4 | — | — | — |
| LBY518 | 101371.1 | — | — | — | — | — | — | 5.91 | 0.09 | 3 |
| LBY513 | 101592.3 | 93.2 | 0.13 | 8 | 11.7 | 0.13 | 8 | 6.07 | L | 6 |
| CONT. | — | 86.3 | — | — | 10.8 | — | — | 5.71 | — | — |
| MGP93 | 101395.2 | — | — | — | — | — | — | 5.09 | 0.20 | 4 |
| LBY130 | 101390.1 | — | — | — | — | — | — | 5.20 | 0.15 | 7 |
| LBY130 | 101390.2 | — | — | — | — | — | — | 5.33 | 0.07 | 9 |
| CONT. | — | — | — | — | — | — | — | 4.88 | — | — |
| MGP93 | 101396.1 | 73.2 | 0.06 | 11 | 9.15 | 0.06 | 11 | 5.43 | 0.03 | 8 |
| MGP93 | 101396.2 | 80.9 | 0.02 | 23 | 10.1 | 0.02 | 23 | 5.56 | 0.06 | 10 |
| MGP93 | 101397.3 | 74.0 | 0.04 | 12 | 9.25 | 0.04 | 12 | 5.35 | 0.07 | 6 |
| LBY130 | 101390.2 | 89.8 | L | 36 | 11.2 | L | 36 | 5.88 | L | 17 |
| CONT. | — | 65.8 | — | — | 8.23 | — | — | 5.04 | — | — |

Table 315:
“CONT.”—Control
“Ave.”—Average
“% Incr.” = % increment;
“p-val.”—p-value,
L - p < 0.01.

TABLE 316
Genes showing improved plant performance under regulation
of the At6669 promoter at Normal growth conditions

| | | RGR Of | | | RGR Of | | |
|---|---|---|---|---|---|---|---|
| | | Plot Coverage | | | Rosette Diameter | | |
| Gene | | | P- | % | | | % |
| Name | Event # | Ave. | Val. | Incr. | Ave. | P-Val. | Incr. |
| LBY531 | 101496.1 | 11.9 | 0.11 | 22 | — | — | — |
| LBY531 | 101497.1 | 11.6 | 0.16 | 19 | — | — | — |
| LBY528 | 101485.3 | 12.4 | 0.04 | 27 | 0.505 | 0.18 | 12 |
| LBY522 | 101542.2 | 11.5 | 0.17 | 18 | — | — | — |
| LBY522 | 101542.3 | 12.2 | 0.06 | 25 | — | — | — |
| LBY513 | 101592.3 | 11.4 | 0.19 | 17 | 0.516 | 0.13 | 15 |
| LBY476 | 101546.2 | 11.6 | 0.15 | 19 | 0.514 | 0.13 | 14 |
| LBY476 | 101547.4 | 11.9 | 0.13 | 22 | 0.513 | 0.17 | 14 |
| LBY467 | 101419.2 | — | — | — | 0.507 | 0.18 | 13 |
| CONT. | — | 9.74 | — | — | 0.450 | — | — |
| LBY503 | 101295.2 | 8.92 | 0.11 | 20 | 0.460 | 0.11 | 12 |
| LBY503 | 101298.2 | 9.01 | 0.09 | 21 | 0.460 | 0.13 | 11 |
| LBY503 | 101299.3 | 8.83 | 0.12 | 19 | 0.455 | 0.16 | 10 |
| LBY502 | 101346.3 | 8.87 | 0.11 | 20 | 0.462 | 0.10 | 12 |
| LBY502 | 101348.3 | 9.34 | 0.05 | 26 | 0.454 | 0.17 | 10 |
| LBY502 | 101349.2 | 8.90 | 0.12 | 20 | — | — | — |
| LBY501 | 101458.2 | 9.10 | 0.07 | 23 | 0.477 | 0.04 | 16 |
| LBY501 | 101459.1 | 9.01 | 0.08 | 21 | 0.465 | 0.08 | 13 |
| LBY499 | 101291.3 | 8.68 | 0.17 | 17 | — | — | — |
| LBY497 | 101450.1 | 10.0 | L | 35 | 0.469 | 0.06 | 14 |
| LBY497 | 101454.3 | 8.75 | 0.15 | 18 | — | — | — |
| LBY493 | 101520.2 | 9.04 | 0.08 | 22 | 0.454 | 0.17 | 10 |
| LBY493 | 101522.1 | 8.80 | 0.14 | 19 | — | — | — |
| LBY489 | 101444.1 | — | — | — | 0.453 | 0.18 | 10 |
| LBY489 | 101444.2 | 9.59 | 0.03 | 29 | 0.465 | 0.11 | 13 |
| LBY484 | 101437.3 | 9.36 | 0.04 | 26 | 0.473 | 0.06 | 15 |
| LBY481 | 101503.3 | — | — | — | 0.452 | 0.19 | 10 |
| LBY479 | 101432.1 | 9.19 | 0.06 | 24 | 0.465 | 0.08 | 13 |
| LBY479 | 101432.2 | 8.69 | 0.16 | 17 | 0.459 | 0.12 | 11 |
| LBY479 | 101434.2 | — | — | — | 0.454 | 0.19 | 10 |
| LBY477 | 101426.1 | 8.82 | 0.12 | 19 | 0.454 | 0.18 | 10 |
| LBY477 | 101428.3 | 8.74 | 0.15 | 18 | — | — | — |
| LBY465 | 101410.1 | 9.06 | 0.08 | 22 | 0.454 | 0.16 | 10 |
| CONT. | — | 7.42 | — | — | 0.413 | — | — |
| LYD1019 | 101538.2 | 8.06 | 0.07 | 22 | — | — | — |
| CONT. | — | 6.61 | — | — | — | — | — |
| LBY524 | 101481.1 | 7.87 | 0.16 | 22 | — | — | — |
| LBY524 | 101481.3 | 8.14 | 0.10 | 27 | — | — | — |
| LBY523 | 101376.2 | 9.20 | 0.03 | 43 | — | — | — |
| LBY520 | 101319.1 | 8.26 | 0.10 | 28 | — | — | — |
| LBY519 | 101475.1 | 9.01 | 0.03 | 40 | 0.505 | 0.07 | 24 |
| LBY517 | 101474.2 | 7.87 | 0.18 | 22 | — | — | — |
| LBY515 | 101303.1 | 7.83 | 0.17 | 22 | — | — | — |
| LBY514 | 101385.1 | 9.21 | L | 43 | 0.482 | 0.11 | 18 |
| LBY514 | 101387.2 | 8.07 | 0.13 | 25 | — | — | — |
| LBY507 | 101460.1 | 7.98 | 0.17 | 24 | — | — | — |
| LBY507 | 101460.2 | 8.16 | 0.08 | 27 | — | — | — |
| LBY507 | 101463.1 | 10.1 | L | 58 | 0.515 | 0.02 | 26 |
| LBY500 | 101313.2 | 7.92 | 0.13 | 23 | — | — | — |
| LBY469 | 101340.1 | 8.06 | 0.11 | 25 | — | — | — |
| LBY469 | 101344.2 | 8.14 | 0.12 | 26 | — | — | — |
| LBY468 | 101305.1 | 7.84 | 0.16 | 22 | — | — | — |
| LBY466 | 101288.2 | 9.05 | 0.01 | 41 | 0.502 | 0.04 | 23 |
| CONT. | — | 6.43 | — | — | 0.408 | — | — |
| LBY504 | 101526.3 | 9.00 | 0.02 | 33 | — | — | — |
| LBY504 | 101529.3 | 7.90 | 0.16 | 17 | 0.477 | 0.05 | 17 |
| LBY503 | 101295.2 | 7.85 | 0.17 | 16 | 0.467 | 0.08 | 14 |
| LBY502 | 101346.3 | 8.12 | 0.10 | 20 | 0.460 | 0.12 | 13 |
| LBY502 | 101348.3 | 9.35 | L | 38 | 0.464 | 0.09 | 13 |
| LBY502 | 101349.2 | 8.08 | 0.10 | 19 | 0.470 | 0.06 | 15 |
| LBY501 | 101455.2 | 7.84 | 0.17 | 16 | — | — | — |
| LBY501 | 101458.1 | 7.88 | 0.18 | 16 | — | — | — |
| LBY499 | 101291.3 | 7.83 | 0.19 | 16 | — | — | — |
| LBY499 | 101293.3 | 8.54 | 0.10 | 26 | — | — | — |
| LBY496 | 101445.2 | — | — | — | 0.459 | 0.17 | 12 |
| LBY493 | 101520.1 | 7.96 | 0.14 | 18 | — | — | — |
| LBY485 | 101506.2 | 8.09 | 0.15 | 19 | — | — | — |
| LBY485 | 101509.2 | 7.99 | 0.14 | 18 | — | — | — |
| LBY485 | 101509.3 | 7.81 | 0.19 | 15 | 0.452 | 0.19 | 11 |
| LBY484 | 101437.3 | 8.61 | 0.04 | 27 | — | — | — |
| LBY484 | 101439.3 | 7.84 | 0.16 | 16 | 0.464 | 0.10 | 13 |
| LBY479 | 101432.1 | 8.54 | 0.04 | 26 | 0.458 | 0.15 | 12 |
| LBY477 | 101426.1 | 8.37 | 0.07 | 24 | 0.465 | 0.15 | 14 |
| LBY477 | 101428.3 | 7.98 | 0.12 | 18 | — | — | — |
| LBY474 | 101404.3 | 8.17 | 0.08 | 21 | 0.461 | 0.11 | 13 |
| LBY471 | 101510.2 | 8.39 | 0.04 | 24 | 0.458 | 0.14 | 12 |
| LBY471 | 101513.3 | — | — | — | 0.467 | 0.08 | 14 |
| LBY465 | 101410.1 | 7.95 | 0.14 | 17 | 0.462 | 0.11 | 13 |
| LBY465 | 101410.2 | 8.04 | 0.18 | 19 | — | — | — |
| LBY465 | 101411.1 | 8.07 | 0.11 | 19 | — | — | — |
| CONT. | — | 6.78 | — | — | 0.409 | — | — |
| LBY529 | 101491.3 | 8.80 | 0.09 | 23 | 0.486 | 0.09 | 14 |
| LBY523 | 101376.2 | 8.51 | 0.15 | 19 | — | — | — |
| LBY508 | 101517.1 | 8.99 | 0.05 | 26 | — | — | — |
| CONT. | — | 7.15 | — | — | 0.428 | — | — |
| MGP93 | 101396.2 | 9.86 | 0.03 | 23 | — | — | — |
| LBY130 | 101390.2 | 11.0 | L | 37 | 0.517 | 0.02 | 17 |
| CONT. | — | 8.04 | — | — | 0.441 | — | — |

Table 316.
“CONT.”—Control;
“Ave.”—Average;
“% Incr.” = % increment;
“p-val.”—p-value,
L - p < 0.01.

### Example 34

### Evaluation of Transgenic Arabidopsis for Seed Yield and Plant Growth Rate Under Normal, Drought and Nitrogen Deficient Conditions in Greenhouse Assays Until Flowering (GH—Flowering Assays)

[1900] Each validation trait assay measures the efficacy of specific traits as describe in Table 317 below. In addition to those traits, the genes of some embodiments of the invention improve yield under various conditions (e.g., normal growth conditions, as well as abiotic stress conditions such as nitrogen deficiency and drought stress).

TABLE 317
Allocation of Arabidopsis parameters to specific traits

| # | Parameters | Traits |
|---|---|---|
| 1 | Flowering | Flowering* |
| 2 | Dry weight | Flowering, Plant biomass and Seed yield |
| 3 | Rosette area | Flowering, Plant biomass and Grain filling |
| | | period |
| 4 | Leaf blade area | Flowering, Plant biomass and Grain filling |
| | | period |
| 5 | Leaf petiole length | Flowering and Plant biomass |
| 6 | Seed filling period | Grain filling period |
| 7 | Seed yield | Seed Yield and Grain filling period |
| 8 | Harvest Index | Seed Yield and Harvest Index |

Table 317. *The flowering trait refers to early flowering. Some of the parameters are indirect but will affect the trait, for example, “Dry weight” is affected by “flowering” and can also affect “seed yield”. Usually, a decrease in time to flowering reduces the “dry weight”, and on the other hand, a reduction in “dry weight” can reduce “seed yield”.

[1901] Assay 3: Plant Performance Improvement Measured Until Flowering Stage: Plant Biomass and Plant Growth Rate in Greenhouse Conditions (GH—Flowering Assays)

[1902] Under normal (standard conditions)—This assay follows the plant biomass formation and the rosette area growth of plants grown in the greenhouse under normal growth conditions. Transgenic Arabidopsis seeds are sown in agar media supplemented with ½ Murashige-Skoog medium (MS) medium and a selection agent (Kanamycin). The T₂ transgenic seedlings are then transplanted to 1.7 trays filled with peat and perlite in a 1:2 ratio. Plants are grown under normal conditions which included irrigation of the trays with a solution containing of 6 mM inorganic nitrogen in the form of KNO₃ supplemented with 1 mM KH₂PO₄, 1 mM MgSO₄, 1.5 mM CaCl₂ and microelements. Under normal conditions the plants grow in a controlled environment in a closed transgenic greenhouse; temperature is 18-22° C., humidity around 70%; Irrigation is done by flooding with a water solution containing 6 mM N (nitrogen) (as described hereinabove), and flooding is repeated whenever water loss reached 50%. All plants are grown in the greenhouse until flowering stage. Plant biomass (the above ground tissue) is weighted directly after harvesting the rosette (plant fresh weight [FW]). Following plants are dried in an oven at 50° C. for 48 hours and weighted (plant dry weight [DW]).

[1903] Under drought and standard growth conditions—This assay follows the plant biomass formation and the rosette area growth of plants grown in the greenhouse under drought conditions and standard growth conditions. Transgenic Arabidopsis seeds are sown in phytogel media supplemented with ½ MS medium and a selection agent (Kanamycin). The T₂ transgenic seedlings are then transplanted to 1.7 trays filled with peat and perlite in a 1:2 ratio and tuff at the bottom of the tray and a net below the trays (in order to facilitate water drainage). Half of the plants are irrigated with tap water (standard growth conditions) when tray weight reached 50% of its field capacity. The other half of the plants are irrigated with tap water when tray weight reached 20% of its field capacity in order to induce drought stress (drought conditions). All plants are grown in the greenhouse until flowering stage. At harvest, plant biomass (the above ground tissue) is weighted directly after harvesting the rosette (plant fresh weight [FW]). Thereafter, plants are dried in an oven at 50° C. for 48 hours and weighted (plant dry weight [DW]).

[1904] Under limited and optimal nitrogen concentration—This assay follows the plant biomass formation and the rosette area growth of plants grown in the greenhouse at limiting and non-limiting nitrogen growth conditions. Transgenic Arabidopsis seeds are sown in agar media supplemented with ½ MS medium and a selection agent (Kanamycin). The T₂ transgenic seedlings are then transplanted to 1.7 trays filled with peat and perlite in a 1:1 ratio. The trays are irrigated with a solution containing nitrogen limiting conditions, which are achieved by irrigating the plants with a solution containing 2.8 mM inorganic nitrogen in the form of KNO₃, supplemented with 1 mM KH₂PO₄, 1 mM MgSO₄, 1.5 mM CaCl₂ and microelements, while normal nitrogen levels are achieved by applying a solution of 5.5 mM inorganic nitrogen also in the form of KNO₃ supplemented with 1 mM KH₂PO₄, 1 mM MgSO₄, 1.5 mM CaCl₂ and microelements. All plants are grown in the greenhouse until flowering stage. Plant biomass (the above ground tissue) is weighted directly after harvesting the rosette (plant fresh weight [FW]). Following, plants are dried in an oven at 50° C. for 48 hours and weighted (plant dry weight [DW]).

[1905] Each construct is validated at its T₂ generation. Transgenic plants transformed with a construct conformed by an empty vector carrying a promoter and the selectable marker are used as control [The promoters which are described in Example 28 above, e.g., the At6669 promoter (SEQ ID NO: 25) or the 35S promoter (SEQ ID NO: 37)]. Additionally or alternatively, Mock-transgenic plants expressing the uidA reporter gene (GUS-Intron) or with no gene at all, under the same promoter are used as control.

[1906] The plants are analyzed for their overall size, growth rate, fresh weight and dry matter. Transgenic plants performance is compared to control plants grown in parallel under the same conditions. The experiment is planned in nested randomized plot distribution. For each gene of the invention three to five independent transformation events are analyzed from each construct.

[1907] Digital imaging—A laboratory image acquisition system, which consists of a digital reflex camera (Canon EOS 300D) attached with a 55 mm focal length lens (Canon EF-S series), mounted on a reproduction device (Kaiser RS), which includes 4 light units (4×150 Watts light bulb) is used for capturing images of plant samples.

[1908] The image capturing process is repeated every 2 days starting from day 1 after transplanting till day 15. Same camera, placed in a custom made iron mount, is used for capturing images of larger plants sawn in white tubs in an environmental controlled greenhouse. The tubs are square shaped and are 1.7 liter volume. During the capture process, the tubs are placed beneath the iron mount, while avoiding direct sun light and casting of shadows.

[1909] An image analysis system is used, which consists of a personal desktop computer (Intel P4 3.0 GHz processor) and a public domain program—ImageJ 1.39 [Java based image processing program which was developed at the U.S. National Institutes of Health and freely available on the internet at rsbweb (dot) nih (dot) gov/]. Images are captured in resolution of 10 Mega Pixels (3888×2592 pixels) and stored in a low compression JPEG (Joint Photographic Experts Group standard) format. Next, analyzed data is saved to text files and processed using the JMP statistical analysis software (SAS institute).

[1910] Leaf analysis—Using the digital analysis leaves data is calculated, including leaf number, rosette area, rosette diameter, leaf blade area, petiole relative area and leaf petiole length.

[1911] Vegetative growth rate: the relative growth rate (RGR) of leaf blade area (Formula 12), RGR leaf number (Formula 8), RGR rosette area (Formula 9), RGR rosette diameter (Formula 10), RGR plot coverage (Formula 11) and Petiole Relative Area (Formula 25) as described above.

[1912] Plant Fresh and Dry weight—On about day 80 from sowing, the plants are harvested and directly weighted for the determination of the plant fresh weight (FW) and left to dry at 50° C. in a drying chamber for about 48 hours before weighting to determine plant dry weight (DW).

[1913] Statistical analyses—To identify genes conferring significantly improved tolerance to abiotic stresses, the results obtained from the transgenic plants are compared to those obtained from control plants. To identify outperforming genes and constructs, results from the independent transformation events tested are analyzed separately. Data is analyzed using Student's t-test and results are considered significant if the p value is less than 0.1 in two tail analysis. The JMP statistics software package is used (Version 5.2.1, SAS Institute Inc., Cary, N.C., USA).

### Example 35

### Identification of Domains Comprised in Identified Polypeptides Encoded by the Identified Genes

[1914] A polypeptide domain refers to a set of conserved amino acids located at specific positions along an alignment of sequences of evolutionarily related proteins. While amino acids at other positions can vary between homologues, amino acids that are highly conserved, and particularly amino acids that are highly conserved at specific positions indicate amino acids that are likely essential in the structure, stability and/or function of a protein. Identified by their high degree of conservation in aligned sequences of a family of protein homologues, they can be used as identifiers to determine if any polypeptide in question belongs to a previously identified polypeptide family.

[1915] The Integrated Resource of Protein Families, Domains and Sites (InterPro) database is an integrated interface for the commonly used signature databases for text- and sequence-based searches. The InterPro database combines these databases, which use different methodologies and varying degrees of biological information about well-characterized proteins to derive protein signatures. Collaborating databases include SWISS-PROT, PROSITE, TrEMBL, PRINTS, ProDom and Pfam, Smart and TIGRFAMs. Pfam is a large collection of multiple sequence alignments and hidden Markov models covering many common protein domains and families. Pfam is hosted at the Sanger Institute server in the United Kingdom.

[1916] Interpro is hosted at the European Bioinformatics Institute in the United Kingdom. InterProScan is the software package that allows sequences (protein and nucleic) to be scanned against InterPro's signatures. Signatures are predictive models, provided by several different databases that make up the InterPro consortium.

[1917] InterProScan 5.11-51.0 was used to analyze the polypeptides of some embodiments of the invention (core polypeptides as well as homologues (e.g., orthologs and/or paralogues thereof) for common domains (Mitchell A et al., 2015. Nucleic Acids Research 43 (Database issue): D213-221; doi: 10.1093/nar/gku1243). Briefly, InterProScan is based on scanning methods native to the InterPro member databases. It is distributed with pre-configured method cut-offs recommended by the member database experts and which are believed to report relevant matches. All cut-offs are defined in configuration files of the InterProS can programs. Matches obtained with the fixed cut-off are subject to the following filtering:

[1918] Pfam filtering: Each Pfam family is represented by two hidden Markov models (HMMs)—ls and fs (full-length and fragment). An HMM model has bit score cut-offs (for each domain match and the total model match) and these are defined in the Gathering threshold (GA) lines of the Pfam database. Initial results are obtained with quite a high common cut-off and then the matches of the signature with a lower score than the family specific cut-offs are dropped.

[1919] If both the fs and ls model for a particular Pfam hits the same region of a sequence, the AM field in the Pfam database is used to determine which model should be chosen—globalfirst (LS); localfirst (FS) or byscore (whichever has the highest e-value).

[1920] Another type of filtering has been implemented since release 4.1. It is based on Clan filtering and nested domains. Further information on Clan filtering can be found in the Pfam website [worldwideweb(dot)sanger(dot)ac(dot)uk/Pfam] for more information on Clan filtering.

[1921] TIGRFAMs filtering: Each TIGRFAM HMM model has its own cut-off scores for each domain match and the total model match. These bit score cut-offs are defined in the “trusted cut-offs” (TC) lines of the database. Initial results are obtained with quite a high common cut-off and then the matches (of the signature or some of its domains) with a lower score compared to the family specific cut-offs are dropped.

[1922] PRINTS filtering: All matches with p-value more than a pre-set minimum value for the signature are dropped.

[1923] SMART filtering: The publicly distributed version of InterProScan has a common e-value cut-off corresponding to the reference database size. A more sophisticated scoring model is used on the SMART web server and in the production of pre-calculated InterPro match data.

[1924] Exact scoring thresholds for domain assignments are proprietary data. The InterProMatches data production procedure uses these additional smart thresholds data. It is to be noted that the given cut-offs are e-values (i.e. the number of expected random hits) and therefore are valid only in the context of reference database size and smart.desc data files to filter out results obtained with higher cut-off.

[1925] It implements the following logic: If the whole sequence E-value of a found match is worse than the ‘cut_low’, the match is dropped. If the domain E-value of a found match is worse than the ‘repeat’ cut-off (where defined) the match is dropped. If a signature is a repeat, the number of significant matches of that signature to a sequence must be greater than the value of ‘repeats’ in order for all matches to be accepted as true (T).

[1926] If the signature is part of a family (‘family_cut’ is defined), if the domain E-value is worse than the domain cut off (‘cutoff’), the match is dropped. If the signature has “siblings” (because it has a family_cut defined), and they overlap, the preferred sibling is chosen as the true match according to information in the overlaps file.

[1927] PROSITE patterns CONFIRMation: ScanRegExp is able to verify PROSITE matches using corresponding statistically-significant CONFIRM patterns. The default status of the PROSITE matches is unknown (?) and the true positive (T) status is assigned if the corresponding CONFIRM patterns match as well. The CONFIRM patterns were generated based on the true positive SWISS-PROT PROSITE matches using eMOTIF software with a stringency of 10e⁻⁹ P-value.

[1928] PANTHER filtering: Panther has pre- and post-processing steps. The pre-processing step is intended to speed up the HMM-based searching of the sequence and involves blasting the HMM sequences with the query protein sequence in order to find the most similar models above a given e-value. The resulting HMM hits are then used in the HMM-based search.

[1929] Panther consists of families and sub-families. When a sequence is found to match a family in the blast run, the sub-families are also scored using HMMER tool (that is, unless there is only 1 sub-family, in which case, the family alone is scored against).

[1930] Any matches that score below the e-value cut-off are discarded. Any remaining matches are searched to find the HMM with the best score and e-value and the best hit is then reported (including any sub-family hit).

[1931] GENE3D filtering: Gene3D also employs post-processing of results by using a program called DomainFinder. This program takes the output from searching the Gene3D HMMs against the query sequence and extracts all hits that are more than 10 residues long and have an e-value better than 0.001. If hits overlap at all, the match with the better e-value is chosen.

[1932] The polypeptides of some embodiments of the invention, which when expressed in a plant (e.g., over-expressed) can increase at least one trait such as yield, growth rate, biomass, vigor, oil content, seed yield, fiber yield, fiber quality, fiber length, photosynthetic capacity, nitrogen use efficiency, early flowering, grain filling period, harvest index, plant height, and/or abiotic stress tolerance, can be characterized by specific amino acid domains. According to certain embodiments of the invention, particular domains are conserved within a family of polypeptides as described in Table 318 hereinbelow. Without wishing to be bound by specific theory or mechanism of action, the conserved domain may indicate common function of the polypeptides comprising same. The domains are presented by an arbitrary identifier (*ID). Table 319 provides the details of each domain according to the InterPro Entry.

[1933] Table 318 summarizes the domains in each of the “core” polypeptides (e.g., SEQ ID NOs: 1992-2060 and 3041-3042) identified by the present inventors as being capable the desired traits (e.g., as listed above) when over-expressed in a plant, wherein each of the listed domains is conserved in the representative homologous polypeptides identified by the present inventors (as detailed in Table 305 above) exhibiting at least 80% global identity to the “core” polypeptides. As explained above, each domain received an arbitrary ID number (e.g., from 1-136), wherein description of these arbitrary domain IDs according to the InterPro database is provided in Table 318 below. In addition, the start and end positions of each of the domains is indicated with respect to the amino acid sequence of the “core” polypeptide. Table 318 also provides the E-values for each of the conserved domains as indicated by the domain tool used for analyzing these sequences, as part of interproscan programs, e.g. SMART, prosite scans patterns and profiles. For example, in the case of the Prosite search, the Prosite profiles report normalized scores instead of E-values, which are defined as the base 10 logarithm of the size (in residues) of the database in which one false positive match is expected to occur by chance. The normalized score is independent of the size of the databases searched. The so-called bit scores reported by other database-search programs have a distinct meaning but are also independent of the size of the database searched.

[1934] For example, for SEQ ID NO:1992, the domain ID “1” appears twice; the first one appears at amino acid positions 91 through 478 (marked as “91_478”) and the second appears at amino acid positions 99 through 472 (marked as “99_472”). In addition, while the first annotation appears with normalized score of 115.765, the second annotation appears with an e-value of 1.4E-180. It is further noted that for some domains the e-value is not specified and instead there is a mark of “−;”. In these cases (−;) the presence of the domain was verified by ScanRegExp, which is able to verify PROSITE matches using corresponding statistically-significant CONFIRM patterns. The CONFIRM patterns were generated based on the true positive SWISS-PROT PROSITE matches using eMOTIF software with a stringency of 10e-9 P-value. Further details can be found in hypertext transfer protocol://computing (dot)bio (dot)cam (dot)ac (dot)uk/local/doc/iprscan(dot) html.

TABLE 318
Domain Families

| P.P. | Common Domains | Amino acid Positions of | |
|---|---|---|---|
| (SEQ | by InterPro Entry | Start-End of the Domain | |
| ID NO) | (*ID) | Match | E-value of the Domain Match** |
| 1992 | 1; 1 | 91_478; 99_472 | 115.765; 1.4E−180 |
| 1993 | 5; 3; 3; 4; 5; 5; 2; 5; 2; 5; 5 | 23_485; 25_484; 29_478; | 2.6E−108; 3.27E−56; 44.96; 1.3E−115; |
| | | 30_485; 37_47; 140_159; 145_170; | 2.9E−30; 2.9E−30; —; 2.9E−30; —; |
| | | 297_307; 341_358; 391_412; | 2.9E−30; 2.9E−30 |
| | | 414_426 | |
| 1994 | 6; 7 | 28_217; 36_215 | 8.37E−54; 9.9E−44 |
| 1995 | 11; 9; 9; 9; 11; 10; 8; 10; | 20_90; 27_88; 29_92; 33_86; | 1.34E−17; 17.313; 5.1E−17; 3.9E−16; |
| | 12 | 34_93; 59_68; 63_86; 68_84; | 4.2E−19; 5.2E−7; —; 5.2E−7; 3.5E−13 |
| | | 88_129 | |
| 1996 | 13; 15; 14; 14; 14 | 86_147; 237_283; 238_281; | 2.8E−7; 4.3E−16; 3.9E−12; 3.6E−9; |
| | | 239_280; 239_281 | 12.312 |
| 1997 | 16 | 21_294 | 9.70E−20 |
| 1998 | 17; 19; 19; 20; 20; 18; | 41_123; 199_465; 264_436; | 2.5E−6; 4.64E−69; 6.8E−13; 8.8E−44; |
| | 21; 21; 21 | 264_433; 266_431; 462_552; | 6.9E−44; 3.27E−19; 17.971; |
| | | 480_558; 480_555; 483_548 | 3.9E−7; 5.3E−14 |
| 1999 | 22; 22; 22 | 181_230; 193_239; 194_238 | 8.873; 1.9E−4; 1.09E−6 |
| 2000 | 23; 24 | 71_187; 200_423 | 4.2E−41; 6.8E−86 |
| 2001 | | | |
| 2002 | | | |
| 2003 | 25 | 38_78 | l.00E−22 |
| 2004 | | | |
| 2005 | 26 | 19_307 | 4.00E−121 |
| 2006 | 27 | 58_191 | 2.50E−31 |
| 2007 | 29; 29; 28; 29; 29; 31; 29; | 25_177; 29_153; 36_150; 159_340; | 1.65E−38; 4.3E−26; 5.3E−41; 1.3E−36; |
| | 29; 30 | 160_336; 163_302; 352_539; | 1.9E−33; 6.2E−32; 1.41E−37; |
| | | 375_537; 393_521 | 8.6E−24; 1.4E−29 |
| 2008 | 32 | 439_483 | 1.70E−17 |
| 2009 | 35; 35; 36; 34 | 47_252; 50_191; 51_231; 54_194 | 5.8E−47; 6.0E−24; 7.3E−38; 2.7E−14 |
| 2010 | 37; 37; 37; 37; 39; 38; 39; | 107_138; 110_139; 111_145; | 2.9E−7; 1.8E−5; 1.1E−7; 7.565; 4.8E−32; |
| | 39; 39 | 111_124; 144_330; 152_330; | 1.37E−37; 25.731; 1.3E−26; 5.2E−19 |
| | | 159_337; 170_333; 173_307 | |
| 2011 | | | |
| 2012 | 42; 41; 40 | 135_292; 137_179; 244_291 | 5.7E−62; 5.1E−27; 1.8E−29 |
| 2013 | 49; 46; 44; 47; 43 | 13_310; 16_269; 22_45; 306_330; | 9.98E−93; 2.2E−105; —; 12.503; 2.4E−22 |
| | | 308_368 | |
| 2014 | 50 | 92_390 | 2.20E−74 |
| 2015 | 51; 51 | 27_183; 194_361 | 9.4E−69; 3.0E−17 |
| 2016 | 53; 56; 56; 57; 49; 46; 55 | 22_62; 23_232; 24_232; 295_420; | 3.7E−8; 2.96E−41; 1.2E−51; 2.4E−5; |
| | | 384_670; 406_678; 411_670 | 1.85E−52; 27.298; 6.6E−37 |
| 2017 | 58; 58; 59; 59; 59; 58; | 11_301; 12_106; 13_30; 13_177; | 9.0E−70; 3.2E−56; 1.1E−21; 2.3E−32; |
| | 59; 59; 59 | 87_98; 134_301; 166_174; | 1.1E−21; 3.2E−56; 3.5E−11; 1.1E−21; |
| | | 230_249; 249_266 | 1.1E−21 |
| 2018 | 63; 64; 64; 60; 61; 61; 61; | 45_131; 46_121; 48_119; 71_100; | 6.15E−24; 26.014; 6.3E−17; —; 6.3E−15; |
| | 65; 62 | 167_214; 171_214; 178_211; | 7.85E−10; 4.4E−12; 2.7E−67; 3.1E−65 |
| | | 247_472; 252_472 | |
| 2019 | 66; 66; 66; 66 | 140_204; 142_194; 144_189; | 2.1E−14; 9.53; 1.7E−9; — |
| | | 147_162 | |
| 2020 | 67; 67; 67 | 39_102; 44_97; 47_103 | 9.29E−15; 1.5E−10; 11.926 |
| 2021 | 70; 68; 70 | 24_319; 35_454; 416_458 | 1.39E−69; 1.2E−90; 1.39E−69 |
| 2022 | 22; 22; 22; 22; 22 | 137_205; 139_203; 139_189; | 4.06E−17; 1.1E−16; 15.542; 1.1E−6; |
| | | 143_190; 145_195 | 3.9E−10 |
| 2023 | 71 | 7_56 | 4.30E−17 |
| 2024 | 53; 56; 56; 46; 49; 55; 44 | 29_73; 53_218; 57_218; 344_615; | 3.5E−4; 1.4E−36; 1.8E−42; 31.693; |
| | | 348_612; 348_611; 350_372 | 2.6E−58; 1.6E−38; — |
| 2025 | 74; 73; 73; 74; 74; 73 | 614_698; 617_651; 723_833; | 4.08E−13; 1.8E−8; 1.8E−8; 4.08E−13; |
| | | 748_819; 881_1012; 901_967 | 4.08E−13; 1.8E−8 |
| 2026 | 77; 77; 75 | 35_349; 36_363; 80_344 | 1.4E−56; 1.8E−62; 4.3E−38 |
| 2027 | 78 | 498_592 | 4.20E−08 |
| 2028 | 80; 79 | 11_220; 129_213 | 7.4E−54; 24.101 |
| 2029 | 81; 83; 82 | 70_404; 101_477; 108_437 | 1.5E−80; 1.03E−93; 2.5E−87 |
| 2030 | 86; 87; 15; 88; 85; 84; 88 | 16_143; 195_256; 198_255; 203_255; | 7.7E−65; 2.67E−17; 3.0E−17; |
| | | 205_253; 206_252; 206_255 | 9.659; 8.7E−10; —; 5.8E−11 |
| 2031 | 67; 67; 67 | 131_189; 132_189; 137_182 | 3.4E−14; 11.301; 2.1E−13 |
| 2032 | 49; 46; 46; 44; 48; 90; | 1_276; 4_256; 4_257; 10_33; | 1.62E−82; 2.8E−66; 2.5E−87; —; —; |
| | 89; 90; 89; 90; 90; 89 | 117_129; 201_238; 569_855; | 3.94E−16; 9.0E−15; 3.94E−16; 9.0E−15; |
| | | 579_901; 887_1058; 928_972; | 3.94E−16; 3.94E−16; 9.0E−15 |
| | | 1004_1060; 1223_1266 | |
| 2033 | 91 | 7_634 | 4.10E−237 |
| 2034 | 92; 92; 93; 94; 94; 93 | 23_63; 25_57; 88_251; 124_186; | 1.31E−9; 2.5E−7; 1.44E−10; 4.0E−6; |
| | | 272_382; 295_385 | 4.0E−6; 1.44E−10 |
| 2035 | | | |
| 2036 | 95; 95; 95 | 340_768; 340_757; 346_742 | 53.552; 3.2E−121; 2.8E−109 |
| 2037 | | | |
| 2038 | 96; 98; 98; 97; 97 | 24_116; 26_117; 29_96; | 7.46E−16; 3.0E−5; 9.331; 90.874; |
| | | 210_482; 210_458 | 1.0E−85 |
| 2039 | 100; 100; 100; 100; 100; | 2_175; 4_175; 5_189; 6_115; | 2.7E−12; 1.71E−36; 10.816; 7.7E−28; |
| | 99; 99; 99; 99; 99; 99 | 7_176; 222_241; 224_237; | 8.9E−7; |
| | | 292_307; 292_311; 324_343; | 8.935; 0.54; 0.032; 30.0; 270.0; 3.4 |
| | | 326_336 | |
| 2040 | 101 | 29_102 | 7.80E−17 |
| 2041 | 35; 35; 102 | 85_306; 95_338; 100_320 | 3.3E−8; 3.72E−20; 2.3E−6 |
| 2042 | 103 | 502_608 | 1.80E−21 |
| 2043 | 104 | 49_367 | 4.90E−136 |
| 2044 | 105 | 14_680 | 8.70E−195 |
| 2045 | | | |
| 2046 | 106; 108; 107 | 278_364; 323_525; 365_430 | 5.1E−9; 9.0E−35; 9.48E−14 |
| 2047 | 110; 110; 109 | 295_549; 297_546; 302_508 | 6.8E−67; 3.84E−48; 5.0E−11 |
| 2048 | 113; 116; 117; 111; 117; | 190_311; 190_263; 193_597; | 4.05E−104; 2.3E−24; 138.394; 4.8E−159; |
| | 117; 114; 117; 115; 115; | 196_597; 221_597; 253_274; | 1.4E−144; 1.2E−86; 3.9E−95; 1.2E−86; |
| | 117; 112; 117; 113; 114; | 264_310; 280_300; 314_429; | 1.2E−54; 2.75E−46; 1.2E−86; —; |
| | 117; 117; 112; 112 | 314_430; 371_389; 373_387; | 1.2E−86; 4.05E−104; 3.9E−95; |
| | | 411_436; 428_586; 430_599; | 1.2E−86; 1.2E−86; —; — |
| | | 462_488; 516_537; 528_535; | |
| | | 582_595 | |
| 2049 | 16 | 16_301 | 3.70E−49 |
| 2050 | 35; 119; 119; 119; 119; | 183_524; 185_523; 188_530; | 2.39E−105; 9.9E−104; 2.2E−117; |
| | 119; 119; 118; 119; 119 | 190_524; 196_523; 271_292; | 99.525; 1.4E−93; 3.4E−30; |
| | | 381_398; 423_434; 424_442 | 3.4E−30; —; 3.4E−30 |
| | | 474_495 | |
| 2051 | 23; 24 | 128_230; 244_466 | 4.0E−36; 6.5E−88 |
| 2052 | 5; 3; 3; 4; 5; 2; 5; 2; 3; 5; 5; | 41_479; 48_472; 49_232; 49_480; | 7.4E−90; 42.876; 7.85E−53; 4.1E−95; |
| | 5 | 56_66; 102_119; 139_158; | 1.2E−18; —; 1.2E−18; —; 7.85E−53; |
| | | 144_169; 260_480; 291_301; | 1.2E−18; 1.2E−18; 1.2E−18 |
| | | 385_406; 408_420 | |
| 2053 | 125; 123; 121; 121; 121; | 89_432; 96_693; 433_703; 436_665; | 1.73E−109 1.2E−206; 4.05E−101; |
| | 120; 120; 120; 122; 122 | 466_615; 625_692; 693_792; | 59.349; 2.0E−75; 1.3E−18; 6.3E−35; |
| | | 704_792; 721_786; 724_783 | 2.24E−26; 3.9E−34; 6.8E−23 |
| 2054 | 126; 127; 130; 128; 129 | 22_388; 32_381; 43_273; 230_243; | 1.75E−83; 1.6E−56; 6.9E−60; —; 1.7E−22 |
| | | 274_388 | |
| 2055 | 100; 100; 100; 100 | 325_498; 326_486; 326_495; 327_501 | 9.7E−10; 8.3E−16; 7.99E−25; 14.233 |
| 2056 | | | |
| 2057 | 110; 110 | 94_373; 97_347 | 2.49E−44; 8.1E−23 |
| 2058 | 77; 75; 77; 76; 76 | 12_329; 14_319; 15_321; 45_69; | 3.3E−100; 8.3E−79; 1.04E−88; —; — |
| | | 264_277 | |
| 2059 | 133; 133; 133; 132; 133; | 72_162; 72_165; 97_537; 280_552; | 2.5E−114; 6.19E−14; 1.8E−38; 7.6E−47; |
| | 133 | 309_560; 312_549 | 2.5E−114; 5.89E−58 |
| 2060 | 58; 58; 134; 58 | 72_412; 72_306; 73_411; 74_392 | 1.61E−83; 8.5E−70; 3.0E−116; 3.6E−50 |
| 2061 | 1; 1 | 91_478; 99_472 | 115.765; 1.4E−180 |
| 2064 | 6; 7 | 29_217; 36_215 | 9.42E−54; 9.9E−44 |
| 2070 | 58; 58; 59; 59; 59; 58; | 11_301; 12_106; 13_30; 13_177; | 1.3E−69; 4.8E−56; 1.1E−21; 1.8E−32; |
| | 59; 59; 59 | 87_98; 134_301; 166_174; | 1.1E−21; 4.8E−56; 3.5E−11; 1.1E−21; |
| | | 230_249; 249_266 | 1.1E−21 |
| 2071 | 63; 64; 64; 60; 61; 61; | 45_130; 46_121; 48_119; 71_100; | 7.07E−24; 26.014; 6.3E−17; —; 1.0E−14; |
| | 61; 65; 62 | 167_214; 171_214; 178_211; | 7.85E−10; 4.4E−12; 4.1E−67; 3.1E−65 |
| | | 248_473; 253_473 | |
| 2072 | 66; 66; 66; 66 | 140_204; 142_194; 144_189; | 2.1E−14; 9.53; 1.7E−9; — |
| | | 147_162 | |
| 2075 | 35; 119; 119; 119; 119; | 183_524; 185_523; 188_530; | 2.39E−105; 9.9E−104; 2.2E−117; |
| | 119; 119; 118; 119; 119 | 190_524; 196_523; 271_292; | 99.525; 1.4E−93; 3.4E−30; 3.4E−30; |
| | | 381_398; 423_434; 424_442; | —; 3.4E−30; 3.4E−30 |
| | | 474_495 | |
| 3041 | 135; 136; 135 | 13_302; 23_307; 31_293 | 1.1E−89; 1.9E−105; 2.01E−26 |
| 3042 | 56; 56; 56; 72; 56; 72; 54; | 46_232; 49_126; 158_383; 195_219; | 3.7E−23; 4.76E−50; 4.76E−50; 46.0; |
| | 72; 54 | 233_383; 244_268; 247_265; | 2.6E−37; 2.0; 1.5; 73.0; 2.2E−7 |
| | | 317_340; 319_378 | |
| 3043 | 56; 56; 56; 72; 56; 72; | 46_240; 49_126; 158_383; 195_219; | 3.2E−23; 1.67E−49; 1.67E−49; 46.0; |
| | 54; 72; 54 | 242_383; 244_268; 247_265; | 2.3E−34; 2.0; 1.5; 110.0; 2.2E−7 |
| | | 317_340; 319_378 | |

Table 318. *arbitrary identifiers for the domains, which are further described in Table 319 below.
**In some cases instead of an e-value there appears “—;”, which indicates that domain was verified by ScanRegExp, which is able to verify PROSITE matches using corresponding statistically-significant CONFIRM patterns (P-valuc of 10⁻⁹).

TABLE 319
Details of Identified Domains

| Domain | | Accession | |
|---|---|---|---|
| Identifier | IPR number | number | Description of IPR number |
| IPR005512 | PF03759 | 1 | PRONE (Plant-specific Rop nucleotide |
| | | | exchanger) PRONE domain |
| IPR005829 | PS00216 | 2 | Sugar transport proteins signature 1. Sugar |
| | | | transporter, conserved site |
| IPR020846 | PS50850 | 3 | Major facilitator superfamily (MFS) profile. |
| | | | Major facilitator superfamily domain |
| IPR005828 | PF00083 | 4 | Sugar (and other) transporter Major facilitator, |
| | | | sugar transporter-like |
| IPR003663 | TIGR00879 | 5 | SP: MFS transporter, sugar porter (SP) family |
| | | | Sugar/inositol transporter |
| IPR011256 | SSF55136 | 6 | Regulatory factor, effector binding domain |
| IPR006917 | PF04832 | 7 | SOUL heme-binding protein SOUL haem- |
| | | | binding protein |
| IPR017970 | PS00027 | 8 | ′Homeobox′ domain signature. Homeobox, |
| | | | conserved site |
| IPR001356 | SM00389 | 9 | Homeobox domain |
| IPR000047 | PR00031 | 10 | Lambda-repressor HTH signature Helix-turn- |
| | | | helix motif |
| IPR009057 | SSF46689 | 11 | Homeodomain-like |
| IPR003106 | PF02183 | 12 | Homeobox associated leucine zipper Leucine |
| | | | zipper, homeobox-associated |
| IPR003137 | PF02225 | 13 | PA domain PA domain |
| IPR001841 | SM00184 | 14 | Zinc finger, RING-type |
| IPR013083 | G3DSA: 3.30.40.10 | 15 | Zinc finger, RING/FYVE/PHD-type |
| IPR004853 | PF03151 | 16 | Triose-phosphate Transporter family Sugar |
| | | | phosphate transporter domain |
| IPR012588 | PF08066 | 17 | PMC2NT (NUC016) domain Exosome- |
| | | | associated factor Rrp6, N-terminal |
| IPR010997 | SSF47819 | 18 | HRDC-like |
| IPR012337 | SSF53098 | 19 | Ribonuclease H-like domain |
| IPR002562 | PF01612 | 20 | 3′-5′ exonuclease 3′-5′ exonuclease domain |
| IPR002121 | SM00341 | 21 | HRDC domain |
| IPR011598 | G3DSA: 4.10.280.10 | 22 | Myc-type, basic helix-loop-helix (bHLH) |
| | | | domain |
| IPR025521 | PF14365 | 23 | Domain of unknown function (DUF4409) |
| | | | Domain of unknown function DUF4409 |
| IPR004314 | PF03080 | 24 | Domain of unknown function (DUF239) |
| | | | Domain of unknown function DUF239 |
| IPR021899 | PF12023 | 25 | Domain of unknown function (DUF3511) |
| | | | Protein of unknown function DUF3511 |
| IPR009262 | PF06027 | 26 | Solute carrier family 35 Solute carrier family |
| | | | 35 member SLC35F1/F2/F6 |
| IPR007608 | PF04520 | 27 | Senescence regulator Senescence regulator |
| | | | S40 |
| IPR011707 | PF07732 | 28 | Multicopper oxidase Multicopper oxidase, |
| | | | type 3 |
| IPR008972 | G3DSA: 2.60.40.420 | 29 | Cupredoxin |
| IPR011706 | PF07731 | 30 | Multicopper oxidase Multicopper oxidase, |
| | | | type 2 |
| IPR001117 | PF00394 | 31 | Multicopper oxidase Multicopper oxidase, |
| | | | type 1 |
| IPR021480 | PF11331 | 32 | Probable zinc-ribbon domain Probable zinc- |
| | | | ribbon domain, plant |
| IPR024156 | PS51417 | 33 | small GTPase Arf family profile. Small |
| | | | GTPase superfamily, ARF type |
| IPR005225 | TIGR00231 | 34 | small_GTP: small GTP-binding protein |
| | | | domain Small GTP-binding protein domain |
| IPR027417 | G3DSA: 3.40.50.300 | 35 | P-loop containing nucleoside triphosphate |
| | | | hydrolase |
| IPR019009 | PF09439 | 36 | Signal recognition particle receptor beta |
| | | | subunit Signal recognition particle receptor, |
| | | | beta subunit |
| IPR000095 | PS50108 | 37 | CRIB domain profile. CRIB domain |
| IPR008936 | SSF48350 | 38 | Rho GTPase activation protein |
| IPR000198 | PS50238 | 39 | Rho GTPase-activating proteins domain |
| | | | profile. Rho GTPase-activating protein domain |
| IPR006511 | TIGR01624 | 40 | LRP1_Cterm: LRP1 C-terminal domain |
| | | | Lateral Root Primordium type 1, C-terminal |
| IPR006510 | TIGR01623 | 41 | put_zinc_LRP1: putative zinc finger domain, |
| | | | LRP1 type Zinc finger, lateral root primordium |
| | | | type 1 |
| IPR007818 | PF05142 | 42 | Domain of unknown function (DUF702) |
| | | | Protein of unknown function DUF702 |
| IPR004041 | PF03822 | 43 | NAF domain NAF domain |
| IPR017441 | PS00107 | 44 | Protein kinases ATP-binding region signature. |
| | | | Protein kinase, ATP binding site |
| IPR028375 | G3DSA: 3.30.310.80 | 45 | KA1 domain/Ssp2, C-terminal |
| IPR000719 | PF00069 | 46 | Protein kinase domain Protein kinase domain |
| IPR018451 | PS50816 | 47 | NAF domain profile. NAF/FISL domain |
| IPR008271 | PS00108 | 48 | Serine/Threonine protein kinases active-site |
| | | | signature. Serine/threonine-protein kinase, |
| | | | active site |
| IPR011009 | SSF56112 | 49 | Protein kinase-like domain |
| IPR004263 | PF03016 | 50 | Exostosin family Exostosin-like |
| IPR006946 | PF04862 | 51 | Protein of unknown function (DUF642) |
| | | | Domain of unknown function DUF642 |
| IPR008979 | SSF49785 | 52 | Galactose-binding domain-like |
| IPR013210 | PF08263 | 53 | Leucine rich repeat N-terminal domain |
| | | | Leucine-rich repeat-containing N-terminal, |
| | | | plant-type |
| IPR001611 | PF13855 | 54 | Leucine rich repeat Leucine-rich repeat |
| IPR001245 | PF07714 | 55 | Protein tyrosine kinase Serine- |
| | | | threonine/tyrosine-protein kinase catalytic |
| | | | domain |
| IPR032675 | SSF52058 | 56 | Leucine-rich repeat domain, L domain-like |
| IPR013320 | G3DSA: 2.60.120.200 | 57 | Concanavalin A-like lectin/glucanase domain |
| IPR016040 | SSF51735 | 58 | NAD(P)-binding domain |
| IPR002347 | PR00080 | 59 | Short-chain dehydrogenase/reductase (SDR) |
| | | | superfamily signature Short-chain |
| | | | dehydrogenase/reductase SDR |
| IPR003016 | PS00189 | 60 | 2-oxo acid dehydrogenases acyltransferase |
| | | | component lipoyl binding site. 2-oxo acid |
| | | | dehydrogenase, lipoyl-binding site |
| IPR004167 | SSF47005 | 61 | E3-binding domain |
| IPR001078 | PF00198 | 62 | 2-oxoacid dehydrogenases acyltransferase |
| | | | (catalytic domain) 2-oxoacid dehydrogenase |
| | | | acyltransferase, catalytic domain |
| IPR011053 | SSF51230 | 63 | Single hybrid motif |
| IPR000089 | PF00364 | 64 | Biotin-requiring enzyme Biotin/lipoyl |
| | | | attachment |
| IPR023213 | G3DSA: 3.30.559.10 | 65 | Chloramphenicol acetyltransferase-like |
| | | | domain |
| IPR004827 | PF00170 | 66 | bZIP transcription factor Basic-leucine zipper |
| | | | domain |
| IPR006121 | SSF55008 | 67 | Heavy metal-associated domain, HMA |
| IPR002937 | PF01593 | 68 | Flavin containing amine oxidoreductase |
| | | | Amine oxidase |
| IPR001613 | PR00757 | 69 | Flavin-containing amine oxidase signature |
| | | | Flavin amine oxidase |
| IPR023753 | SSF51905 | 70 | FAD/NAD(P)-binding domain |
| IPR001209 | PF00253 | 71 | Ribosomal protein S14p/S29e Ribosomal |
| | | | protein S14 |
| IPR003591 | SM00369 | 72 | Leucine-rich repeat, typical subtype |
| IPR015943 | G3DSA: 2.130.10.10 | 73 | WD40/YVTN repeat-like-containing domain |
| IPR011047 | SSF50998 | 74 | Quinoprotein alcohol dehydrogenase-like |
| | | | superfamily |
| IPR011611 | PF00294 | 75 | pfkB family carbohydrate kinase Carbohydrate |
| | | | kinase PfkB |
| IPR002173 | PS00583 | 76 | pfkB family of carbohydrate kinases signature |
| | | | 1. Carbohydrate/puine kinase, PfkB, conserved |
| | | | site |
| IPR029056 | G3DSA: 3.40.1190.20 | 77 | Ribokinase-like |
| IPR024937 | PF01348 | 78 | Type II intron maturase Domain X |
| IPR000270 | PS51745 | 79 | PB1 domain profile. PB1 domain |
| IPR033389 | PF02309 | 80 | AUX/IAA family AUX/IAA domain |
| IPR017849 | G3DSA: 3.40.720.10 | 81 | Alkaline phosphatase-like, alpha/beta/alpha |
| IPR002591 | PF01663 | 82 | Type I phosphodiesterase/nucleotide |
| | | | pyrophosphatase Type I |
| | | | phosphodiesterase/nucleotide |
| | | | pyrophosphatase/phosphate transferase |
| IPR017850 | SSF53649 | 83 | Alkaline-phosphatase-like, core domain |
| IPR019786 | PS01359 | 84 | Zinc finger PHD-type signature. Zinc finger, |
| | | | PHD-type, conserved site |
| IPR001965 | SM00249 | 85 | Zinc finger, PHD-type |
| IPR021998 | PF12165 | 86 | Domain of unknown function (DUF3594) |
| | | | Alfin |
| IPR011011 | SSF57903 | 87 | Zinc finger, FYVE/PHD-type |
| IPR019787 | PF00628 | 88 | PHD-finger Zinc finger, PHD-finger |
| IPR011989 | G3DSA: 1.25.10.10 | 89 | Armadillo-like helical |
| IPR016024 | SSF48371 | 90 | Armadillo-type fold |
| IPR008004 | PF05340 | 91 | Protein of unknown function (DUF740) |
| | | | Uncharacterised protein family UPF0503 |
| IPR001810 | SM00256 | 92 | F-box domain |
| IPR011043 | SSF50965 | 93 | Galactose oxidase/kelch, beta-propeller |
| IPR015915 | G3DSA: 2.120.10.80 | 94 | Kelch-type beta propeller |
| IPR015425 | PS51444 | 95 | Formin homology-2 (FH2) domain profile. |
| | | | Formin, FH2 domain |
| IPR011333 | SSF54695 | 96 | SKP1/BTB/POZ domain |
| IPR027356 | PF03000 | 97 | NPH3 family NPH3 domain |
| IPR000210 | PS50097 | 98 | BTB domain profile. BTB/POZ domain |
| IPR003903 | PS50330 | 99 | Ubiquitin-interacting motif (UIM) domain |
| | | | profile. Ubiquitin interacting motif |
| IPR002035 | PF13519 | 100 | von Willebrand factor type A domain von |
| | | | Willebrand factor, type A |
| IPR008590 | PF05915 | 101 | Eukaryotic protein of unknown function |
| | | | (DUF872) Protein of unknown function |
| | | | DUF872, transmembrane |
| IPR000863 | PF00685 | 102 | Sulfotransferase domain Sulfotransferase |
| | | | domain |
| IPR005516 | PF03763 | 103 | Remorin, C-terminal region Remorin, C- |
| | | | terminal |
| IPR003226 | PF03690 | 104 | Uncharacterised protein family (UPF0160) |
| | | | Metal-dependent protein hydrolase |
| IPR008814 | PF05817 | 105 | Oligosaccharyltransferase subunit Ribophorin |
| | | | II Dolichyl-diphosphooligosaccharide--protein |
| | | | glycosyltransferase subunit Swp1 |
| IPR011014 | SSF82861 | 106 | Mechanosensitive ion channel MscS, |
| | | | transmembrane-2 |
| IPR010920 | SSF50182 | 107 | LSM domain |
| IPR006685 | PF00924 | 108 | Mechanosensitive ion channel |
| | | | Mechanosensitive ion channel MscS |
| IPR002495 | PF01501 | 109 | Glycosyl transferase family 8 Glycosyl |
| | | | transferase, family 8 |
| IPR029044 | G3DSA: 3.90.550.10 | 110 | Nucleotide-diphospho-sugar transferases |
| IPR004554 | TIGR00533 | 111 | HMG_CoA_R_NADP: |
| | | | hydroxymethylglutaryl-CoA reductase |
| | | | (NADPH) Hydroxymethylglutaryl-CoA |
| | | | reductase, eukaryotic/arcaheal type |
| IPR023076 | PS00318 | 112 | Hydroxymethylglutaryl-coenzyme A |
| | | | reductases signature 2. |
| | | | Hydroxymethylglutaryl-CoA reductase, class |
| | | | I/II, conserved site |
| IPR009029 | SSF56542 | 113 | Hydroxymethylglutaryl-CoA reductase, class |
| | | | I/II, substrate-binding domain |
| IPR023074 | G3DSA: 3.90.770.10 | 114 | Hydroxymethylglutaryl-CoA reductase, class |
| | | | I/II, catalytic domain |
| IPR009023 | G3DSA: 3.30.70.420 | 115 | Hydroxymethylglutaryl-CoA reductase, class |
| | | | I/II, NAD/NADP-binding domain |
| IPR023282 | G3DSA: 1.10.3270.10 | 116 | Hydroxymethylglutaryl-CoA reductase, N- |
| | | | terminal |
| IPR002202 | PS50065 | 117 | Hydroxymethylglutaryl-coenzyme A |
| | | | reductases family profile. |
| | | | Hydroxymethylglutaryl-CoA reductase, class |
| | | | I/II |
| IPR019821 | PS00411 | 118 | Kinesin motor domain signature. Kinesin |
| | | | motor domain, conserved site |
| IPR001752 | SM00129 | 119 | Kinesin motor domain |
| IPR011991 | SSF46785 | 120 | Winged helix-turn-helix DNA-binding |
| | | | domain |
| IPR016158 | SSF75632 | 121 | Cullin homology |
| IPR019559 | PF10557 | 122 | Cullin protein neddylation domain Cullin |
| | | | protein, neddylation domain |
| IPR001373 | PF00888 | 123 | Cullin family Cullin, N-terminal |
| IPR016157 | PS01256 | 124 | Cullin family signature. Cullin, conserved site |
| IPR016159 | SSF74788 | 125 | Cullin repeat-like-containing domain |
| IPR015424 | SSF53383 | 126 | Pyridoxal phosphate-dependent transferase |
| IPR004839 | PF00155 | 127 | Aminotransferase class I and II |
| | | | Aminotransferase, class I/classII |
| IPR004838 | PS00105 | 128 | Aminotransferases class-I pyridoxal-phosphate |
| | | | attachment site Aminotransferases, class-I, |
| | | | pyridoxal-phosphate-binding site |
| IPR015422 | G3DSA: 3.90.1150.10 | 129 | Pyridoxal phosphate-dependent transferase, |
| | | | major region, subdomain 2 |
| IPR015421 | G3DSA: 3.40.640.10 | 130 | Pyridoxal phosphate-dependent transferase, |
| | | | major region, subdomain 1 |
| IPR002139 | PR00990 | 131 | Ribokinase signature Ribokinase |
| IPR000300 | SM00128 | 132 | Inositol polyphosphate-related phosphatase |
| IPR005135 | SSF56219 | 133 | Endonuclease/exonuclease/phosphatase |
| IPR005886 | TIGR01179 | 134 | galE: UDP-glucose 4-epimerase GalE UDP- |
| | | | glucose 4-epimerase GalE |
| IPR029058 | SSF53474 | 135 | Alpha/Beta hydrolase fold |
| IPR004142 | PF03096 | 136 | Ndr family NDRG |

Table 319.

### Example 36

### Evaluation of Transgenic Brachypodium NUE and Yield Under Low or Normal Nitrogen Fertilization in Greenhouse Assay

[1935] Assay 1: Nitrogen Use efficiency measured plant biomass and yield at limited and optimal nitrogen concentration under greenhouse conditions until heading—This assay follows the plant biomass formation and growth (measured by height) of plants which are grown in the greenhouse at limiting and non-limiting (e.g., normal) nitrogen growth conditions. Transgenic Brachypodium seeds are sown in peat plugs. The T₁ transgenic seedlings are then transplanted to 27.8×11.8×8.5 cm trays filled with peat and perlite in a 1:1 ratio. The trays are irrigated with a solution containing nitrogen limiting conditions, which are achieved by irrigating the plants with a solution containing 3 mM inorganic nitrogen in the form of NH₄NO₃, supplemented with 1 mM KH₂PO₄, 1 mM MgSO₄, 3.6 mM KCl, 2 mM CaCl₂ and microelements, while normal nitrogen levels were achieved by applying a solution of 6 mM inorganic nitrogen also in the form of NH₄NO₃ with 1 mM KH₂PO₄, 1 mM MgSO₄, 2 mM CaCl₂, 3.6 mM KCl and microelements. All plants are grown in the greenhouse until heading. Plant biomass (the above ground tissue) is weighted right after harvesting the shoots (plant fresh weight [FW]). Following, plants are dried in an oven at 70° C. for 48 hours and weighed (plant dry weight [DW]).

[1936] Each construct is validated at its T₁ generation. Transgenic plants transformed with a construct conformed by an empty vector carrying the BASTA selectable marker are used as control (FIG. 9B).

[1937] The plants are analyzed for their overall size, fresh weight and dry matter. Transgenic plants performance is compared to control plants grown in parallel under the same conditions. Mock-transgenic plants with no gene and no promoter at all, are used as control (FIG. 9B).

[1938] The experiment is planned in blocks and nested randomized plot distribution within them. For each gene of the invention five independent transformation events are analyzed from each construct.

[1939] Phenotyping

[1940] Plant Fresh and Dry shoot weight—In Heading assays when heading stage has completed (about day 30 from sowing), the plants are harvested and directly weighed for the determination of the plant fresh weight on semi-analytical scales (0.01 gr) (FW) and left to dry at 70° C. in a drying chamber for about 48 hours before weighting to determine plant dry weight (DW).

[1941] Time to Heading—In both Seed Maturation and Heading assays heading is defined as the full appearance of the first spikelet in the plant. The time to heading occurrence is defined by the date the heading is completely visible. The time to heading occurrence date is documented for all plants and then the time from planting to heading is calculated.

[1942] Leaf thickness—In Heading assays when minimum 5 plants per plot in at least 90% of the plots in an experiment have been documented at heading, measurement of leaf thickness is performed using a micro-meter on the second leaf below the flag leaf.

[1943] Plant Height—In both Seed Maturation and Heading assays once heading is completely visible, the height of the first spikelet is measured from soil level to the bottom of the spikelet.

[1944] Tillers number—In Heading assays manual count of tillers is preformed per plant after harvest, before weighing.

[1945] Statistical analyses—To identify genes conferring significantly improved tolerance to abiotic stresses, the results obtained from the transgenic plants are compared to those obtained from control plants. To identify outperforming genes and constructs, results from the independent transformation events tested are analyzed separately. Data is analyzed using Student's t-test and results were considered significant if the p value was less than 0.1, e.g., equals or lower than 0.05. The JMP statistics software package was used (Version 5.2.1, SAS Institute Inc., Cary, N.C., USA).

### Example 37

### Evaluation of Transgenic Brachypodium NUE and Yield Under Low or Normal Nitrogen Fertilization in Greenhouse Assay

[1946] Assay 2: Nitrogen Use efficiency measured plant biomass and yield at limited and optimal nitrogen concentration under greenhouse conditions until Seed Maturation—This assay follows the plant biomass and yield production of plants that are grown in the greenhouse at limiting and non-limiting nitrogen growth conditions. Transgenic Brachypodium seeds are sown in peat plugs. The T₁ transgenic seedlings are then transplanted to 27.8×11.8×8.5 cm trays filled with peat and perlite in a 1:1 ratio. The trays are irrigated with a solution containing nitrogen limiting conditions, which are achieved by irrigating the plants with a solution containing 3 mM inorganic nitrogen in the form of NH₄NO₃, supplemented with 1 mM KH₂PO₄, 1 mM MgSO₄, 3.6 mM KCl, 2 mM CaCl₂ and microelements, while normal nitrogen levels are achieved by applying a solution of 6 mM inorganic nitrogen also in the form of NH₄NO₃ with 1 mM KH₂PO₄, 1 mM MgSO₄, 2 mM CaCl₂, 3.6 mM KCl and microelements. All plants are grown in the greenhouse until seed maturation. Each construct is validated at its T₁ generation. Transgenic plants transformed with a construct conformed by an empty vector carrying the BASTA selectable marker are used as control (FIG. 9B).

[1947] The plants are analyzed for their overall biomass, fresh weight and dry matter, as well as a large number of yield and yield components related parameters. Transgenic plants performance is compared to control plants grown in parallel under the same conditions. Mock-transgenic plants with no gene and no promoter at all (FIG. 9B). The experiment is planned in blocks and nested randomized plot distribution within them. For each gene of the invention five independent transformation events are analyzed from each construct.

[1948] Phenotyping

[1949] Plant Fresh and Dry vegetative weight—In Seed Maturation assays when maturity stage has completed (about day 80 from sowing), the plants are harvested and directly weighed for the determination of the plant fresh weight (FW) and left to dry at 70° C. in a drying chamber for about 48 hours before weighting to determine plant dry weight (DW).

[1950] Spikelets Dry weight (SDW)—In Seed Maturation assays when maturity stage has completed (about day 80 from sowing), the spikelets are separated from the biomass, left to dry at 70° C. in a drying chamber for about 48 hours before weighting to determine spikelets dry weight (SDW).

[1951] Grain Yield per Plant—In Seed Maturation assays after drying of spikelets for SDW, spikelets are run through production machine, then through cleaning machine, until seeds are produced per plot, then weighed and Grain Yield per Plant is calculated.

[1952] Grain Number—In Seed Maturation assays after seeds per plot are produced and cleaned, the seeds are run through a counting machine and counted.

[1953] 1000 Seed Weight—In Seed Maturation assays after seed production, a fraction is taken from each sample (seeds per plot; ˜0.5 gr), counted and photographed. 1000 seed weight is calculated.

[1954] Harvest Index—In Seed Maturation assays after seed production, harvest index is calculated by dividing grain yield and vegetative dry weight.

[1955] Time to Heading—In both Seed Maturation and Heading assays heading is defined as the full appearance of the first spikelet in the plant. The time to heading occurrence is defined by the date the heading is completely visible. The time to heading occurrence date is documented for all plants and then the time from planting to heading is calculated.

[1956] Leaf thickness—In Heading assays when minimum 5 plants per plot in at least 90% of the plots in an experiment have been documented at heading, measurement of leaf thickness is performed using a micro-meter on the second leaf below the flag leaf.

[1957] Grain filling period—In Seed Maturation assays maturation is defined by the first color-break of spikelet+stem on the plant, from green to yellow/brown.

[1958] Plant Height—In both Seed Maturation and Heading assays once heading is completely visible, the height of the first spikelet is measured from soil level to the bottom of the spikelet.

[1959] Tillers number—In Heading assays manual count of tillers is preformed per plant after harvest, before weighing.

[1960] Number of reproductive heads per plant—In Heading assays manual count of heads per plant is performed.

[1961] Statistical analyses—To identify genes conferring significantly improved tolerance to abiotic stresses, the results obtained from the transgenic plants are compared to those obtained from control plants. To identify outperforming genes and constructs, results from the independent transformation events tested are analyzed separately. Data is analyzed using Student's t-test and results were considered significant if the p value was less than 0.1, e.g., equals or lower than 0.05. The JMP statistics software package was used (Version 5.2.1, SAS Institute Inc., Cary, N.C., USA).

[1962] Although the invention has been described in conjunction with specific embodiments thereof, it is evident that many alternatives, modifications and variations will be apparent to those skilled in the art. Accordingly, it is intended to embrace all such alternatives, modifications and variations that fall within the spirit and broad scope of the appended claims.

[1963] All publications, patents and patent applications mentioned in this specification are herein incorporated in their entirety by reference into the specification, to the same extent as if each individual publication, patent or patent application was specifically and individually indicated to be incorporated herein by reference. In addition, citation or identification of any reference in this application shall not be construed as an admission that such reference is available as prior art to the present invention. To the extent that section headings are used, they should not be construed as necessarily limiting.

1. A method of increasing yield, growth rate, biomass, vigor, oil content, seed yield, fiber yield, fiber quality, fiber length, photosynthetic capacity, nitrogen use efficiency, and/or abiotic stress tolerance of a plant, comprising over-expressing within the plant a polypeptide comprising an amino acid sequence at least 80% identical to SEQ ID NO: 2005, 1992-3039 or 3040, thereby increasing the yield, growth rate, biomass, vigor, oil content, seed yield, fiber yield, fiber quality, fiber length, photosynthetic capacity, nitrogen use efficiency, and/or abiotic stress tolerance of the plant.

2. (canceled)

3. A method of producing a crop comprising growing a crop plant over-expressing a polypeptide comprising an amino acid sequence at least 80% homologous to the amino acid sequence selected from the group consisting of SEQ ID NOs: 2005, 1992-3040, wherein the crop plant is derived from plants which have been subjected to genome editing for over-expressing said polypeptide and/or which have been transformed with an exogenous polynucleotide encoding said polypeptide and which have been selected for increased yield, increased growth rate, increased biomass, increased vigor, increased oil content, increased seed yield, increased fiber yield, increased fiber quality, increased fiber length, increased photosynthetic capacity, increased nitrogen use efficiency, and/or increased abiotic stress tolerance as compared to a wild type plant of the same species which is grown under the same growth conditions, and the crop plant having the increased yield, increased growth rate, increased biomass, increased vigor, increased oil content, increased seed yield, increased fiber yield, increased fiber quality, increased fiber length, increased photosynthetic capacity, increased nitrogen use efficiency, and/or increased abiotic stress tolerance, thereby producing the crop.

4-10. (canceled)

11. A nucleic acid construct comprising an isolated polynucleotide comprising a nucleic acid sequence encoding a polypeptide which comprises an amino acid sequence at least 80% homologous to the amino acid sequence set forth in SEQ ID NO: 2005, 1992-3039 or 3040, and a heterologous promoter for directing transcription of said nucleic acid sequence in a host cell, wherein said amino acid sequence is capable of increasing yield, growth rate, biomass, vigor, oil content, seed yield, fiber yield, fiber quality, fiber length, photosynthetic capacity, nitrogen use efficiency, and/or abiotic stress tolerance of a plant.

12-13. (canceled)

14. A plant cell transformed with the nucleic acid construct of claim 11.

15-17. (canceled)

18. The method of claim 1, wherein said polypeptide is expressed from a nucleic acid sequence selected from the group consisting of SEQ ID NOs: 138, 63, 50-1991.

19. (canceled)

20. The method of claim 1, wherein said amino acid sequence is selected from the group consisting of SEQ ID NOs: 2005, 1992-3040 and 3041-3059.

21. The plant cell of claim 14, wherein said plant cell forms part of a plant.

22. The method of claim 1, further comprising growing the plant over-expressing said polypeptide under the abiotic stress.

23. The method of claim 1 wherein said abiotic stress is selected from the group consisting of salinity, drought, osmotic stress, water deprivation, flood, etiolation, low temperature, high temperature, heavy metal toxicity, anaerobiosis, nutrient deficiency, nitrogen deficiency, nutrient excess, atmospheric pollution and UV irradiation.

24. The method of claim 1 wherein the yield comprises seed yield or oil yield.

25. A transgenic plant comprising the nucleic acid construct of claim 11.

26. The method of claim 1, further comprising growing the plant over-expressing said polypeptide under nitrogen-limiting conditions.

27-31. (canceled)

32. The method of claim 1 further comprising selecting a plant having an increased yield, growth rate, biomass, vigor, oil content, seed yield, fiber yield, fiber quality, fiber length, photosynthetic capacity, nitrogen use efficiency, and/or abiotic stress tolerance as compared to the wild type plant of the same species which is grown under the same growth conditions.

33. A method of selecting a plant having increased yield, growth rate, biomass, vigor, oil content, seed yield, fiber yield, fiber quality, fiber length, photosynthetic capacity, nitrogen use efficiency, and/or abiotic stress tolerance as compared to a wild type plant of the same species which is grown under the same growth conditions, the method comprising:
(a) providing plants which have been subjected to genome editing for over-expressing a polypeptide comprising an amino acid sequence at least 80% homologous to the amino acid sequence selected from the group consisting of SEQ ID NOs: 2005, 1992-3040 and/or which have been transformed with an exogenous polynucleotide encoding said polypeptide,
(b) selecting from said plants of step (a) a plant having increased yield, growth rate, biomass, vigor, oil content, seed yield, fiber yield, fiber quality, fiber length, photosynthetic capacity, nitrogen use efficiency, and/or abiotic stress tolerance as compared to a wild type plant of the same species which is grown under the same growth conditions,
thereby selecting the plant having the increased yield, growth rate, biomass, vigor, oil content, seed yield, fiber yield, fiber quality, fiber length, photosynthetic capacity, nitrogen use efficiency, and/or abiotic stress tolerance as compared to the wild type plant of the same species which is grown under the same growth conditions.

34. (canceled)

35. The method of claim 32, wherein said selecting is performed under non-stress conditions.

36. The method of claim 32, wherein said selecting is performed under abiotic stress conditions.

37. The method of claim 1, wherein said amino acid sequence is at least 95% identical to SEQ ID NO: 2005, 1992-3039 or 3040.

38. The method of claim 3, wherein said amino acid sequence is at least 95% identical to SEQ ID NO: 2005, 1992-3039 or 3040.

39. The nucleic acid construct of claim 11, wherein said amino acid sequence is at least 95% identical to SEQ ID NO: 2005, 1992-3039 or 3040.

40. The method of claim 33, wherein said amino acid sequence is at least 95% identical to SEQ ID NO: 2005, 1992-3039 or 3040.

The application's sequence listing, which the Patent Office published only in electronic form, follows.

SEQUENCE LISTING (3156 sequences)

SEQ ID NO: 1 - DNA, 2000 bp, Triticum aestivum
  Wheat SPA Promoter
ttttctcttgcgagagccgctcacctcaaggccccccgccattcctgctgtgaactatagccagcggctggggatgatacaagcaggggcaaccaacgaccaccggagttgccacggttgtcactgatgttgcggtggcgccaccatgaagaccatgtccatgcggtggttggtgcagtttccagcggtgctacaaccgcggaacactaatgctgcaaccggtagcaggagctgttgcgaccgacgacgaaatttgctgccttgaggctgatggtaatggacaagacgagggcggacgccttggtgctacaaccagcatccggtgttgccggaacgacaaccgccatttgctgcaaccggcaatcatgcaacacagagaggaagataccgcgtgctgggatcggccgtcaccctgggcgcgacaaaaagctgcaaccattcgttggtaaagcttcaacctcctgatgaatttcctggaaccagtattcaattttgcttgaactggataattttttgctacaatcgatcaacgagagttcttgctggtaagttgtttttgctagaaccggtgttcaattttgctagaactatattttgctacaatcgatcaccccgagagttcttcttgatgagttgttttgctcgaaccagtattcaattctgctggaactgagtaattttttgcttcaaccaacaaatggtggatttgctgctttccaagttttttgttgggcacgactgtgcaagtcaacgatcgcggcggcgccgatggtgctccaaccatggtgaacgcgcgatggaaccagccgggccggagctgcaatggcctggttcccgagctatggacgcggcgtgcggtgactgcaagcttcagcagaagggtggcagggggctggatgatggtgctgcaaccagtagcggtgcaaggggacggggtgctgccgcccctcgatggagcgcacatgcatgggaccgagagcagagatgctcacggggaacaggaaggaggggatttcctgctcacgttgaccaaagcgagaggaaggagatgattcggtgaccgactacaaatcatcatatcaaacaattgggggccgaccggccaaaacgttcggtcggcgtgctagtggctaataatggcctaccggtatggaccacgttagtcaaatggtaagcgacgcatgtatataaggtatattaatgcgaccaactcgcaaggtccgtcacctatattcggagaacatatttctgtaatatataaatttaataggtaaagtcacatttatcattctcaaaagagggtggcccgtgtgaggaactcgtcctgagcaaagacgaggaggtttccactcaaccgttgtcactctagctatagtgtatattagaagttaagtgtttccgttaccttttcatatacaacaacaatttaaagttagaaaccctgtaaatcacatggaagcgtatggatcgcaacgagtcaaaataaacatggcgcattagtgacacgtattttaaactttctgttaacactttttgttctttcattaaaggatatttgtttgcattagcgttgtcatgctagacgagcacatacattacaacattattatgtgtttgttgtggtttctagagacaagacatgaacacctaaataaagaggacatggacgaaaaggttaaccgtaatagctcatgcaagatgacaagcaaaacatttcattgtatgaggttccgtggatcacacttctctatgtactctcagaaacgaaaacacttgtctagacgatggtagaccgtcggaataggtgaacatcttttgtacaacagaaagtatgactaacgtggcgccgcggccgaaactgcattatcagttcagctgaatttgtactgtatgtcatatctatctcgagtattcaagacagaaaaaccttgtgcagtagtagtactactgaaataaaatagacatgagaggatcgcaccctcaacccatctcattcagca

SEQ ID NO: 2 - DNA, 1919 bp, Triticum aestivum
  misc_feature (1306)..(1316): n is a, c, g, or t
  misc_feature (1649)..(1649): n is a, c, g, or t
  Wheat LMW Longer Promoter
tatcatgatgacatttctatgtgctaaagattcttctacaaagccggttcaaatacaaaacaaatatgccaaaaaactacttaaattaccagtagcgagtgtacaaaagttagcagcagcgcctcaatagcagtagagcgtccggccaaagagcgctagcgctactagcggtagcgagcttctcataaccgcgctgctgctacacttgtgtagcagtagcgcgggtgctcacgcgttactgctatgagttagctgtagcgccgtattagtagcgcgggtacccgcactactgatacatctaaaacccgcgctgctgctagccttttccctagtagtgctagtcgatgtatctccccacaacctcacctctacaccggactacaaggaagtcttctgacggcgggaattgccgaagcacgcttgaccccacttgttcctcgccggacaaaagacatctagcgcggcataattcaaacgccacgctggaaccaatagtcgtagcggggcggtcaggaactgcgtcatctcgcttattaggcatgcttttcatatttttacttgcgaccctacagcacggttccgtgtcaatatcatagacttctagttgtggagttttgttttttcgtcgtcgacatgagaaatatatggtccacctgcttagcgcgcatagggggaaatttgatgattattggaacttttgaagtgaaattctcagaaagcacatagttatattcagctactaaagccacaaatgtacattactgtcaggcttcccagctgaattctgatgcctgaccctcctaatccgtgcagctagcatggagatgggtctgcctctcggatttatgtgcattgaatcgttggaagagacagacgaaacaaatcgataccttgtgttgatggggaggtcggagtggctgccgtcgacgtacggcccacaatcgacggaggagcttcaaaagtgaccttttttgtcgagcggtggtggtggtggtggggggccggatgttgagggtgggagggaggctgacgtctccgctgccgcggaggtacgtggaggggccgcgagcggtgggcgtccgggagaggctgcgacggcgagcggtccggccggcgaggaggacgaggaagggagggacgcagatccgcggagtgtgggctgggcttgtgtcgttggggcctacgagaactatagcccaaatcgaattggtgccctaacacacggcacttatgttgggcctaatctctcgctccaggctgggggcctctgttccagccccatctatcatttccccctagcgtcatnnnnnnnnnnnaaaaaaatccccctagcataaaaaaactatcatttcccccaaaaaaacccttcacaaatagatgaaactgatgatttatctaaaaaaataggcgaaactgatgatgacgtgtcaagagttaggaccggatatatgctagtaggagtagcttgtaagcaattaccatcctttacatgtaaagggaattcgatgagtcatgtcatgctctataggcgtcggttcatctaatcattttagaggaaaaatacaaagttagttctacacttagtcctacacaagttttgcctttcttgtttatggatgacagcctatacaaggttccaaactcggttnacaaggttccaaactcggttgcaaaagtgatactatccagataagtgtgtgacatgtaaagtgaataaggtgagtcatatataccaaacatcaaggtttctgtactttatgtgtgatcatatgcacaactaaaaagcaactttgatgatcaatccaaaagtacgcgtgtagctagtgcaacctaacacattgtaccaaaaatcattttagatgcatccaaacagaattattaaagctaatgcaaagaagaaaagaggtggtgcccgggct

SEQ ID NO: 3 - DNA, 326 bp, Triticum aestivum
  misc_feature (56)..(56): n is a, c, g, or t
  Wheat LMW Promoter
agttttgcctttcttgtttatggatgacagcctatacaaggttccaaactcggttnacaaggttccaaactcggttgcaaaagtgatactatccagataagtgtgtgacatgtaaagtgaataaggtgagtcatatataccaaacatcaaggtttctgtactttatgtgtgatcatatgcacaactaaaaagcaactttgatgatcaatccaaaagtacgcgtgtagctagtgcaacctaacacattgtaccaaaaatcattttagatgcatccaaacagaattattaaagctaatgcaaagaagaaaagaggtggtgcccgggct

SEQ ID NO: 4 - DNA, 2000 bp, Triticum aestivum
  Wheat HMW glutenin-1 longer Promoter
cctaccattagaagaacgtccggcaaagagatgcactgcaacatatgaccaaaacgtcatccatgatcgagtacaatttcttagtgcctttttcatcaaagttatatttgaaacattttagaaaatttgtcttaaattttttcccatggcgtttcgatcaaaaaaatgccttaaaacctacctatataaaggcaataagggaaaacacttcaggataccttcgaatctaaggtgtctttctttagatggtatgctaaactgttcttcatggcgcctcaaatcatcattctgcaagtaaagactaaaaataacgctaaatatggagttaaaggtttacaaacgacgagcggaaaaggagtcttatataattccagtagcatttattccattttgcttcacatagaaaatgtagctgaggtggtcgatgtttattttgactcgcgtgaggtcgccggttcgatctcagaagcaacgctggaatatcccatatagatttatttttcaggctgagtgatgctcgggtacctccagcgtatgggctgaaattcgccccccctgcaaatcatgggccctgtgacgttcgcacgggttgcacatgccttggcccgggcctactaggagtgtacctggattatgttggacgacgggagatgaaagggatgtattaattaacaaagataatgaagcttaattttcttatatgttgttaatattgacaagaaacaagctgctaactcaaagttacggttacatagtcgcaaccttttatatctaaataatatctctctctcaacatgcaaacatgccacctcagcatgtagcatgcatggaaattgtccacttcaacatgcaaccatgcatcaaaatttccattttactaggctatttatttgataaaatttcacaaatatacaataatcaaacacaatagatcatatgtgttttcagttttggttctcacattattactccaaatataaatgtttcgtataaccaaatttcattcaaatatactgcaaaacatttccgtgaaaacatgtggggtacatctagttataaggaaatattagtgatgtcctgcaagtgataaggccaaggagagaagaagtgcaccatctacagaggccagggaaagacaatggacatgcagagaggcgggggcggggaagaaacacatggagatcatagaagaacataagaggttaaacataggaggaggatataatggacaattaaatccacattacctgaactcatttgggaagtggaaaaatcccctattctggtgtaaatcaaactaattgacgcgagttttctctgaagattctatgttaattttagacatgaatgaccaaaggtttcagttagttgagttttgtcatcgaaaggtgtttacataagtccaaaaattctaccagcttttggtacggcgcgtcatagaacagataaatgttgtgagtcattggatagatattatgagtcatagcatggatttgtgttgcctggaaatctaactatgacaagaaacaaaacataaatgggcttttgaaagatgatttatcaacttaccttatccatgcaagctaccttccactagtcgacatgcttagaagcttttagtgaccgcagatttgcaaaagcaatggctaacagacacccaaaccccaagaagcataaccacttctcttagataaaaatagcagatcgatatacaaacgtctacacttctgcaaacaatacccagaagccagaattaggattgaaccgattacgtggctttagcagaccgtccaaaaatctgttttgcaaagctccaattgctccttgcttatccagcttcttttgtgttggcaattgttcttttccaaccgactttattcttttcacatttcttcttaggctgaactaacctcgtcgtgcacacaaccattgtcctgaaccttcaccacgtccctataaaagcccaaccaatctccacaatttcatcatcacccacaaca

SEQ ID NO: 5 - DNA, 425 bp, Triticum aestivum
  Wheat HMW glutenin-1 Promoter
catgcaagctaccttccactagtcgacatgcttagaagcttttagtgaccgcagatttgcaaaagcaatggctaacagacacccaaaccccaagaagcataaccacttctcttagataaaaatagcagatcgatatacaaacgtctacacttctgcaaacaatacccagaagccagaattaggattgaaccgattacgtggctttagcagaccgtccaaaaatctgttttgcaaagctccaattgctccttgcttatccagcttcttttgtgttggcaattgttcttttccaaccgactttattcttttcacatttcttcttaggctgaactaacctcgtcgtgcacacaaccattgtcctgaaccttcaccacgtccctataaaagcccaaccaatctccacaatttcatcatcacccacaaca

SEQ ID NO: 6 - DNA, 595 bp, Triticum aestivum
  wheat alpha gliadin (B genome) Promoter
tcaagcttgtctagttacagtaacaacttgtggaacattacaaaatttatgtttgctagtaacttctagaacactacaacacttgacatgtataaggaatttgatgagtcatggcctactaaagcaagttatattactactcttatctatcttaacaggtcacacaagattacaaactaagttctgtatcagccatgcttatctagtttatgcataacaatttgcagaacattacaaacttagtttcggaaaaataggcaatctagattagtgtttgagctataaagtgaataagatgagtcatgcgtgttatcacacctctttggtggtggaatgatagtgcaacaacatgaaacttcagtgactagtccaagaatacacatgtaagtagtgccaccaaacacaacataccaaattatgattttgggaagcatccaagcactttccagacaagaaaatgccaattgtgaaagagatcataccatgggaactataaaaagccttgtagcatgatcatcatccttcctcacccatcattctcataagtagagcgcatcattcaagccaagcaagcagtggtcaatacaaatccacc

SEQ ID NO: 7 - DNA, 1238 bp, Triticum aestivum
  misc_feature (1231)..(1231): n is a, c, g, or t
  wheat gamma gliadin Promoter
atacttatatagggtagcgatattcacttgggaggtcggggttgtgctcggggaagcaggggcttgccggacgcaaggctcggacggcctccacgcctctgttccgtgaacagaggagatgggatcctccaagtgggcggggccacaatagtttatagtaggcccatgtgcacagcaggtcttccatattttccctttttatctcctgtaatatttccaccactctattgcatttagtttatgcagcaaacgacttttgctataactgaaacttggcacataaatcaagcacacaattttggggtggcacaaaaagtttggggccaaattgaaatcacttaaattataattgcatttaaaagagctaaaagggtgtcgttggtccacagtttaatattcataggcattttaaaagtttccagaaaaaactttgctaatgtatgacagttatgtagtgaatattttcaacctaaggaacatttttaatttattttttataaaattataattcgacttggcattcgaatttggatttgagttttggtttgaaacggaaagaggattagtaaaatgattatgatgacatagcatcattaggcatgagattactgtagcatgacatcgggggtgttacacttgtacaatattcctacccttgacataaaaggagaatttgatgagtcatgtattgataacgtatacaacattactacccttgacataaaaggagaatttgatgagtcatgcattgataacatgtacaagattactatcagcttgttcatcttaccatcatattatacaacactacaagttagttttagaaagaacaagagtccacaacaaatatcagaatacttgcctgatctatcttaacaacatgcacaaggacacaaatttagtcccccgcaagctatgaagatttggtttatgtctaacaacttgtacagatccaaaaggaatgcaatccagataattgtttgacatgtaaagtgaataagatgagtcaatgccaattatcagtattcctcactcttagatgatatgtacaataaaaagacaactttgatgatcactctgaaattacgtttgtatgtagtgccaccaaacacaacataccaaataattagtttgataagcatcaaatcacttttaaaaaagaaagcaataatgaaaagaaacctaaccatggtagctataaaaaggcctacaatatgtagactccataccnactccat

SEQ ID NO: 8 - DNA, 2162 bp, Triticum aestivum
  wheat TdPR60 longer Promoter
agaagaagaaggagcaccaatacaatggagtttcacccggcttcacagccctgttacttttcccagagccccaaaaactctcctcaacaaatacactcgtggtcatggctttgtaggggcacaacaacgcagcgcccacgtttccttgtgcgcatgtacgcacgccgcctagctagcaaccctgcatgcaatcccatcagcccggccatgcgcactacatgcgcgctacgcacacgacgcggccatctccaccggtcactgctaacaatcatctaactaactcacacgcatcaagcaaacttggccggcacacttgccaacgccctgctctacgtgccagactcgagagtatacacgctacacacacatgcgccacgcttctgcgtcccgtacgtcccgcccgtcccgcatgtcatcgacgcgcccgtcaagcccgacgagcccgacggcaccagtgtgtcccgcctgtcccacgcgcacccgacgcgcccgacgagcccgatcacacatgtcgtggcttattccaaaacacaccccttaagccacggcctagaggagtccgtcatcgtcgacgttggcgccggctaagagtgcatgctccgccgccggtcctttccgcagctgcgggcactcgcgccggaagtgcccgtgctccccgtacttgtagcagcgcctgcgcctgtcgccgccgctccccgacgccacgctgcgcccgtcgtcgtcgtcccgagcaccgccgtgtcgacgctcccatgctgcccactgcgccaccgtcatgagcagctgctcacctccgcgctcgccgccgtcttgtccacagcgccgaacccgctcgtcgaacgcacgcagccgcccgagcgcttcgtcgaacgccatcgtcgtcacgtcgtggaactgctcgataccggcgacgacggggaagaggcgatccgacaccgtatcccagcaacttcttgacaagtgccgtgtcgcccagtgtctccccgaggttggcatacctcgccgccatcgccgcgagcctcccgccgtacacgtcgagctcctcgccgtccaccatcttcatccggtcgaatttgccatgcagcgtccccggcctcgctgcgcgtacccgatcagcgcggacgaacctcaccttcagggagtcccatacctccctgacggtgagcttcgtcgataccagcagcagcacatcctccggcaacgccccgagaagcaacgtgcgcaccatcttgtccttccgcgcgttcaccaccgcgtcgcccggcgccaccgcctcccatacggtgtggacgtcgaggatcgcctacgccttgatggcccagaccgtgtagttgtccgcggtcagcaaaggcatcgccatcgtcgccgattccgcccgcgccgccgccgtgtgggacgggcgccatggtcgccggtgatcgcccgaaccaaagctctgtatatcaattgttggaagcgctctctcacactgatggatggagatagaagaagaaggagcacacagtacaatggagtttcacccggcttcacagccctgttacttttcccagagccccaaaaactctcctcaacaaatacactcgtggtcatggctttgtagtggcacaacaacacaacgcccacgtttccttgtgcgcacgtatgcacaccgcctagctagctaccctgcatgcaatccatcagcccggccatgcgcactacatgcgcgctatgcgcatgacgcggccatctccaccggtcactgctaacaatcagctaactaactcacacgcatcaagcaaacttggccggcacacttgccaacgccctgctctatgtgctagactcgagtgtatacacgctacacacacatatgccacgcttctgcgtcccgcatgtcccgcacgtcaccgacgcgcctgacaagcccgacgagcccgacggcaccagtgtgtgccgcccgttccgcgtgcacccgatgcgctcgacgagcccgatcacacacgccgtggcttattccaacacctagatgtataattaatgtatacattaattgtctgacacggtgctatatcttcatgatatacaactggtgtatgcgtctgtatcatcatctcaaagaaggctatatataccaagacatagctagcgaagtcatgtatcccacacattcacagaagcca

SEQ ID NO: 9 - DNA, 2147 bp, Triticum aestivum
  wheat TdPR60 Promoter
accaatacaatggagtttcacccggcttcacagccctgttacttttcccagagccccaaaaactctcctcaacaaatacactcgtggtcatggctttgtaggggcacaacaacgcagcgcccacgtttccttgtgcgcatgtacgcacgccgcctagctagcaaccctgcatgcaatcccatcagcccggccatgcgcactacatgcgcgctacgcacacgacgcggccatctccaccggtcactgctaacaatcatctaactaactcacacgcatcaagcaaacttggccggcacacttgccaacgccctgctctacgtgccagactcgagagtatacacgctacacacacatgcgccacgcttctgcgtcccgtacgtcccgcccgtcccgcatgtcatcgacgcgcccgtcaagcccgacgagcccgacggcaccagtgtgtcccgcctgtcccacgcgcacccgacgcgcccgacgagcccgatcacacatgtcgtggcttattccaaaacacaccccttaagccacggcctagaggagtccgtcatcgtcgacgttggcgccggctaagagtgcatgctccgccgccggtcctttccgcagctgcgggcactcgcgccggaagtgcccgtgctccccgtacttgtagcagcgcctgcgcctgtcgccgccgctccccgacgccacgctgcgcccgtcgtcgtcgtcccgagcaccgccgtgtcgacgctcccatgctgcccactgcgccaccgtcatgagcagctgctcacctccgcgctcgccgccgtcttgtccacagcgccgaacccgctcgtcgaacgcacgcagccgcccgagcgcttcgtcgaacgccatcgtcgtcacgtcgtggaactgctcgataccggcgacgacggggaagaggcgatccgacaccgtatcccagcaacttcttgacaagtgccgtgtcgcccagtgtctccccgaggttggcatacctcgccgccatcgccgcgagcctcccgccgtacacgtcgagctcctcgccgtccaccatcttcatccggtcgaatttgccatgcagcgtccccggcctcgctgcgcgtacccgatcagcgcggacgaacctcaccttcagggagtcccatacctccctgacggtgagcttcgtcgataccagcagcagcacatcctccggcaacgccccgagaagcaacgtgcgcaccatcttgtccttccgcgcgttcaccaccgcgtcgcccggcgccaccgcctcccatacggtgtggacgtcgaggatcgcctacgccttgatggcccagaccgtgtagttgtccgcggtcagcaaaggcatcgccatcgtcgccgattccgcccgcgccgccgccgtgtgggacgggcgccatggtcgccggtgatcgcccgaaccaaagctctgtatatcaattgttggaagcgctctctcacactgatggatggagatagaagaagaaggagcacacagtacaatggagtttcacccggcttcacagccctgttacttttcccagagccccaaaaactctcctcaacaaatacactcgtggtcatggctttgtagtggcacaacaacacaacgcccacgtttccttgtgcgcacgtatgcacaccgcctagctagctaccctgcatgcaatccatcagcccggccatgcgcactacatgcgcgctatgcgcatgacgcggccatctccaccggtcactgctaacaatcagctaactaactcacacgcatcaagcaaacttggccggcacacttgccaacgccctgctctatgtgctagactcgagtgtatacacgctacacacacatatgccacgcttctgcgtcccgcatgtcccgcacgtcaccgacgcgcctgacaagcccgacgagcccgacggcaccagtgtgtgccgcccgttccgcgtgcacccgatgcgctcgacgagcccgatcacacacgccgtggcttattccaacacctagatgtataattaatgtatacattaattgtctgacacggtgctatatcttcatgatatacaactggtgtatgcgtctgtatcatcatctcaaagaaggctatatataccaagacatagctagcgaagtcatgtatcccacacattcacagaagcca

SEQ ID NO: 10 - DNA, 1992 bp, Zea mays
  maize Ub1 Promoter (cultivar Nongda 105)
tctgcagtgcagcgtgacccggtcgtgcccctctctagagataatgagcattgcatgcctaagttataaaaaattaccacatattttttttgtcacacttgtttgaagtgcagtttatctatctttatacatatatttaaactttactctacgaataatataatctatagtactacaataatatcagtgttttagagaatcatataaatgaacagttagacatggtctaaaggacaattgagtattttgacaacaggactctacagttttatctttttagtgtgcatgtgttctcctttttttttgcaaatagcttcacctatataatacttcatccattttattagtacatccatttagggtttagggttaatggtttttatagactaatttttttagtacatctattttattctattttagcctctaaattaagaaaactaaaactctattttagtttttttatttaataatttagatataaaatagaataaaataaagtgaccaaaaattaaacaaataccctttaagaaattaaaaaaactaaggaaacatttttcttgtttcgagtagataatgccagcctgttaaacgccgtcgacgagtctaacggacaccaaccagcgaaccagcagcgtcgcgtcgggccaagcgaagcagacggcacggcatctctgtcgctgcctctggacccctctcgagagttccgctccaccgttggacttgctccgctgtcggcatccagaaattgcgtggcggagcggcagacgtgaggcggcacggcaggcggcctcctcctcctctcacggcacggcagcctacgggggattcctttcccaccgctccttcgctttcccttcctcgcccgccgtaataaatagacaccccctccacaccctctttccccaacctcgtgttcgttcggagcgcacacacacacaaccagatctcccccaaatccacccgtcggcacctccgcttcaaggtacgccgctcatcctccccccccccctctctctaccttctctagatcggcgttccggtccatggttagggcccggtagttctacttctgttcatgtttgtgttagatccgtgtttgtgttagatccgtgctgctagcgttcgtacacggatgcgacctgtacatcagacatgttctgattgctaacttgccagtgtttctctttgaggaatcctgggatggctctagccgttccgcagacgggatcgatttcatgatttttttttgtttcgttgcatagggtttggtttgcccttttcctttatttcaatatatgccgtgcacttgtttgtcgggtcatcttttcatgttttttttggcttggttgtgatgatgtggtctggttgggcggtcgttctagatcggagtagaatactgtttcaaactacctggtggatttattaaagatctgtatgtatgtgccatacatcttcatagttacgagtttaagatgatggatggaaatatcgatctaggataggtatacatgttgatgcgggttttactgatgcatatacagagatgctttttttttcgcttggttgtgatgatgtggtctggttgggcggtcgttctagatcggagtagaatactgtttcaaactaactggtggatttattaattttggatctgtatgtgtgtgccatacatcttcatagttacgagtttaagatgatggatggaagtatcgatctaggataggtatacatgttgatgttggttttactgatgcatatacatgatggcatatgcagcatctattcattcatatgctctaaccttgagtacctatctattataataaacaagtatgttttataattattttgatcttgatatacttggatgatggcatatgcagcagctatatgtggattttttttagctctgccttcatacgctatttatttgcttggtactgtttcttttgtcgatgctcaccctgttgtttggtgttacttctgcag

SEQ ID NO: 11 - DNA, 1358 bp, Zea mays
  Ub1 Promoter (cultivar B73)
gtgcagcgtcgcgtcgggccaagcgaagcagacggcacggcatctctgtcgctgcctctggacccctctcgagagttccgctccaccgttggacttgctccgctgtcggcatccagaaattgcgtggcggagcggcagacgtgagccggcacggcaggcggcctcctcctcctctcacggcaccggcagctacgggggattcctttcccaccgctccttcgctttcccttcctcgcccgccgtaataaatagacaccccctccacaccctctttccccaacctcgtgttgttcggagcgcacacacacacaaccagatctcccccaaatccacccgtcggcacctccgcttcaaggtacgccgctcgtcctccccccccccctctctaccttctctagatcggcgttccggtccatggttagggcccggtagttctacttctgttcatgtttgtgttagatccgtgtttgtgttagatccgtgctgctagcgttcgtacacggatgcgacctgtacgtcagacacgttctgattgctaacttgccagtgtttctctttggggaatcctgggatggctctagccgttccgcagacgggatcgatttcatgattttttttgtttcgttgcatagggtttggtttgcccttttcctttatttcaatatatgccgtgcacttgtttgtcgggtcatcttttcatgcttttttttgtcttggttgtgatgatgtggtctggttgggcggtcgttctagatcggagtagaaatctgtttcaaactacctggtggatttattaattttggatctgtatgtgtgtgccatacatattcatagttacgaattgaagatgatggatggaaatatcgatctaggataggtatacatgttgatgcgggttttactgatgcatatacagagatgctttttgttcgcttggttgtgatgatgtggtgtggttgggcggtcgttcattcgttctagatcggagtagaatactgtttcaaactacctggtgtatttattaattttggaactgtatgtgtgtgtcatacatcttcatagttacgagtttaagatggatggaaatatcgatctaggataggtatacatgttgatgtgggttttactgatgcatatacatgatggcatatgcagcatctattcatatgctctaaccttgagtacctatctattataataaacaagtatgttttataattattttgatcttgatatacttggatgatggcatatgcagcagctatatgtggatttttttagccctgccttcatacgctatttatttgcttggtactgtttcttttgtcgatgctcaccctgttgtttggtgttacttc

SEQ ID NO: 12 - DNA, 1266 bp, Oryza sativa
  rice actin 1 Promoter
tagctagcatactcgaggtcattcatatgcttgagaagagagtcgggatagtccaaaataaaacaaaggtaagattacctggtcaaaagtgaaaacatcagttaaaaggtggtataagtaaaatatcggtaataaaaggtggcccaaagtgaaatttactcttttctactattataaaaattgaggatgttttgtcggtactttgatacgtcatttttgtatgaattggtttttaagtttattcgcgatttggaaatgcatatctgtatttgagtcggtttttaagttcgttgcttttgtaaatacagagggatttgtataagaaatatctttaaaaaacccatatgctaatttgacataatttttgagaaaaatatatattcaggcgaattccacaatgaacaataataagattaaaatagcttgcccccgttgcagcgatgggtattttttctagtaaaataaaagataaacttagactcaaaacatttacaaaaacaacccctaaagtcctaaagcccaaagtgctatgcacgatccatagcaagcccagcccaacccaacccaacccaacccaccccagtgcagccaactggcaaatagtctccacccccggcactatcaccgtgagttgtccgcaccaccgcacgtctcgcagccaaaaaaaaaaaaagaaagaaaaaaaagaaaaagaaaaacagcaggtgggtccgggtcgtgggggccggaaaagcgaggaggatcgcgagcagcgacgaggcccggccctccctccgcttccaaagaaacgccccccatcgccactatatacatacccccccctctcctcccatccccccaaccctaccaccaccaccaccaccacctcctcccccctcgctgccggacgacgagctcctcccccctccccctccgccgccgccggtaaccaccccgcccctctcctctttctttctccgttttttttttcgtctcggtctcgatctttggccttggtagtttgggtgggcgagagcggcttcgtcgcccagatcggtgcgcgggaggggcgggatctcgcggctggcgtctccgggcgtgagtcggcccggatcctcgcggggaatggggctctcggatgtagatcttctttctttcttctttttgtggtagaatttgaatccctcagcattgttcatcggtagtttttcttttcatgatttgtgacaaatgcagcctcgtgcggagcttttttgtaggtagaagatggctgacgccgaggatatc

SEQ ID NO: 13 - DNA, 2199 bp, Oryza sativa
  rice GOS2 longer Promoter
tctagaatccgaaaagtttctgcaccgttttcaccccctaactaacaatatagggaacgtgtgctaaatataaaatgagaccttatatatgtagcgctgataactagaactatgcaagaaaaactcatccacctactttagtggcaatcgggctaaataaaaaagagtcgctacactagtttcgttttccttagtaattaagtgggaaaatgaaatcattattgcttagaatatacgttcacatctctgtcatgaagttaaattattcgaggtagccataattgtcatcaaactcttcttgaataaaaaaatctttctagctgaactcaatgggtaaagagagagattttttttaaaaaaatagaatgaagatattctgaacgtattggcaaagatttaaacatataattatataattttatagtttgtgcattcgtcatatcgcacatcattaaggacatgtcttactccatcccaatttttatttagtaattaaagacaattgacttatttttattatttatcttttttcgattagatgcaaggtacttacgcacacactttgtgctcatgtgcatgtgtgagtgcacctcctcaatacacgttcaactagcaacacatctctaatatcactcgcctatttaatacatttaggtagcaatatctgaattcaagcactccaccatcaccagaccacttttaataatatctaaaatacaaaaaataattttacagaatagcatgaaaagtatgaaacgaactatttaggtttttcacatacaaaaaaaaaaagaattttgctcgtgcgcgagcgccaatctcccatattgggcacacaggcaacaacagagtggctgcccacagaacaacccacaaaaaacgatgatctaacggaggacagcaagtccgcaacaaccttttaacagcaggctttgcggccaggagagaggaggagaggcaaagaaaaccaagcatcctcctcctcccatctataaattcctccccccttttcccctctctatataggaggcatccaagccaagaagagggagagcaccaaggacacgcgactagcagaagccgagcgaccgccttcttcgatccatatcttccggtcgagttcttggtcgatctcttccctcctccacctcctcctcacagggtatgtgcccttcggttgttcttggatttattgttctaggttgtgtagtacgggcgttgatgttaggaaaggggatctgtatctgtgatgattcctgttcttggatttgggatagaggggttcttgatgttgcatgttatcggttcggtttgattagtagtatggttttcaatcgtctggagagctctatggaaatgaaatggtttagggtacggaatcttgcgattttgtgagtaccttttgtttgaggtaaaatcagagcaccggtgattttgcttggtgtaataaaagtacggttgtttggtcctcgattctggtagtgatgcttctcgatttgacgaagctatcctttgtttattccctattgaacaaaaataatccaactttgaagacggtcccgttgatgagattgaatgattgattcttaagcctgtccaaaatttcgcagctggcttgtttagatacagtagtccccatcacgaaattcatggaaacagttataatcctcaggaacaggggattccctgttcttccgatttgctttagtcccagaattttttttcccaaatatcttaaaaagtcactttctggttcagttcaatgaattgattgctacaaataatgcttttatagcgttatcctagctgtagttcagttaataggtaatacccctatagtttagtcaggagaagaacttatccgatttctgatctccatttttaattatatgaaatgaactgtagcataagcagtattcatttggattattttttttattagctctcaccccttcattattctgagctgaaagtctggcatgaactgtcctcaattttgttttcaaattcacatcgattatctatcgattatcctcttgtatctacctgtagaagtttctttttggttattccttgactgcttgattacagaaagaaatttatgaagctgtaatcgggatagttatactgcttgttcttatgattcatttcctttgtgcagttcttggtgtagcttgccactttcaccagcaaagtttc

SEQ ID NO: 14 - DNA, 1024 bp, Oryza sativa
  rice GOS2 Promoter
ggttgttcttggatttattgttctaggttgtgtagtacgggcgttgatgttaggaaaggggatctgtatctgtgatgattcctgttcttggatttgggatagaggggttcttgatgttgcatgttatcggttcggtttgattagtagtatggttttcaatcgtctggagagctctatggaaatgaaatggtttagggtacggaatcttgcgattttgtgagtaccttttgtttgaggtaaaatcagagcaccggtgattttgcttggtgtaataaaagtacggttgtttggtcctcgattctggtagtgatgcttctcgatttgacgaagctatcctttgtttattccctattgaacaaaaataatccaactttgaagacggtcccgttgatgagattgaatgattgattcttaagcctgtccaaaatttcgcagctggcttgtttagatacagtagtccccatcacgaaattcatggaaacagttataatcctcaggaacaggggattccctgttcttccgatttgctttagtcccagaattttttttcccaaatatcttaaaaagtcactttctggttcagttcaatgaattgattgctacaaataatgcttttatagcgttatcctagctgtagttcagttaataggtaatacccctatagtttagtcaggagaagaacttatccgatttctgatctccatttttaattatatgaaatgaactgtagcataagcagtattcatttggattattttttttattagctctcaccccttcattattctgagctgaaagtctggcatgaactgtcctcaattttgttttcaaattcacatcgattatctatcgattatcctcttgtatctacctgtagaagtttctttttggttattccttgactgcttgattacagaaagaaatttatgaagctgtaatcgggatagttatactgcttgttcttatgattcatttcctttgtgcagttcttggtgtagcttgccactttcaccagcaaagtttc

SEQ ID NO: 15 - DNA, 2103 bp, Arabidopsis thaliana
  arabidopsis Pho1 Promoter
actgtttaaggacaaaaaatgtggaactgatgtctcctaggtggtggaatatgtgaagctagaaaacaaataaatgcggtccgactcagaccatcattttcctcttgtctcattggttttaaaattaaatattatattataaaatctgttgcagtattttttttaatctcaattagagttatttatttaggtctcaacccatggtggggaaaaaaacagctattttaggtaaatttagattacaaaattgtatagtcaatatcaataataggttaaagttttaataaactgggtgaatcagtttttgtttggtcttcttggatctttgtttggtctcaatattttggattacatataaattccatcccgactattatttgggttttgccgctggactctataacacactgattttagttttatatgaattttacgttgttttacgtttgatcatgaactaaaaattcagcaatccataagaaaatattttttggactagttcgaaactcggccagacaatactaaacctattcacatatttaactttttttttttttggacaaacataattaactttagtaagtgttatatttttgtcaatattaaactagatgtggtgtttttaattgtgggaaataaaattaaagaagcaaagttccatgaaatatggactttccgtaattggaaggccgccatatgttgccttcatttgtattttccttttattgacccttttgttttcttataagataaatatatatataactaattaggcagaagctgagtggcattagttagtgaaatatatttatcattatcccaaattcctctagctgacattactttgaatttagaaatttcttatccgcaaaatttgtactaatattatgaagtagtacatcgaatagaatatatattggtgcacattatgatccactttcaatgccatccattcgaatggttgctcagaacgtacttgtagaaaccgcgtgcataaagtttcatatgagcatcgtgtgctttgttatttaattttttcttccctaaataatcagacagaaaaattcataaacttctttaataaaaccatccaaaaggggattatactacgaaaattatggcatctaaacgcaaagtttaatatatttttagtaccaatgcattgtaaaagaatggaaattaaataaaaacaatatgaaactgtttgttcccttggacaaaaaaaaaacttggtatgactatgatttttatatgcgcttttgtaattgcattgtaattttgtcgatatggaagtggattttaaagaacattaatccatgatctgataggtgaaaactcacactacttgactgctatataacatggtttggtagtatctgcatttgtaatgtgaaactatgaaatcagaatttgattggtaattcttcttctgcttcttttttcttgattctttaagatttagtatgtgtttcaaatttttcattgtcctccgaaaaaatgtagtggaaatcgagctggtccaatctaagttcactcaccttttgtgtctcttggcacctaatttctttttggtccatttcagctatcttcttccttttccacacaaaacattacaaaatacttactatttctagttctccgatttacaatacccaaattacccttacccttgcccctcatatagttcgtataacaactttcactctaagatgaaacattttgagtgttgagaaaggtatatgaagctcggtagccggaggaagcacggtggatatacactggcgagaatcaggacggtcccacacgagacaagatttacctctcccaaaagcacaagtggaaggagcataggataaaaattagtacatgaaattaggtttcaagaaggatatttgagaatgtgctttgtgaggcatcgtcagtaggagtaagcaatccagtcaaatatattcttctttttttctctgcctttgcttttgtccactataaaacaaatctcatcctcctctcttgccctacactcacaaaacaaacacactctcttcttgatcattttctcttttgagtttttgagtttaaggacttaaaagagaaaacgctatg

SEQ ID NO: 16 - DNA, 901 bp, Oryza sativa
  rice ExpB5 longer Promoter
gttgatgggccgtagaggagtataatggcaacgtttgacgagacatctagaaattataaaaataaaacccaacgtgacaataaactctaaaaactataaaatctattttttaaaggttccaagaagtatgaatagaaatagtgatagatcgagcaagcaaataaagaagaagatgacataaggggtagtaattggtgtgacttttaaaaactatataattaaaaacacgagaatgatatggtttggtctttcaaagtcttaagataatgagatagctatttaacaaattttgaataaatcatattaaaatagataattttgtatgggtgctaattgcgcgggctacccagctagttcgattgaattgctgccactaagtgttactatacaacattctcctctaaaagaactatatatatttctccaaaagaaaaaggaactatatatgtaccatatgtacaaacattcgagtggccgggcatgatactcgctactttgctaggcacgttgcgcacgtacagctcacgctcaagtcgtacacattatggagtagccatttgacaaacgtacggatgacacaagacgaatatcaaattgcgaattttcaaagcgtttctaaccaacacaactaccttgtgagaatagtttatccaaacccttgcggctgcgtgatcacctccttcatgcaaggacctccgtaaagtccacaagtatactcttcgatcccacacacacatagttgacatacacatcaacacatgtacaaattcaagttgccacgttcacctcaataatgcttgggtacacataatttgctaccacgtttgtgaccgctaatcttccctataaataccaaccaaatcaaatcatcttaaaaatcaccgagcaatctccgcttaac

SEQ ID NO: 17 - DNA, 844 bp, Oryza sativa
  rice ExpB5 Promoter
taaaaataaaacccaacgtgacaataaactctaaaaactataaaatctattttttaaaggttccaagaagtatgaatagaaatagtgatagatcgagcaagcaaataaagaagaagatgacataaggggtagtaattggtgtgacttttaaaaactatataataaaaacacgagaatgatatggtttggtctttcaaagtcttaagataatgagatagctatttaacaaattttgaataaatcatattaaaatagataattttgtatgggtgctaattgcgcgggctacccagctagttcgattgaattgctgccactaagtgttactatacaacattctcctctaaaagaactatatatatttctccaaaagaaaaaggaactatatatgtaccatatgtacaaacattcgagtggccgggcatgatactcgctactttgctaggcacgttgcgcacgtacagctcacgctcaagtcgtacacattatggagtagccatttgacaaacgtacggatgacacaagacgaatatcaaattgcgaattttcaaagcgtttctaaccaacacaactaccttgtgagaatagtttatccaaacccttgcggctgcgtgatcacctccttcatgcaaggacctccgtaaagtccacaagtatactcttcgatcccacacacacatagttgacatacacatcaacacatgtacaaattcaagttgccacgttcacctcaataatgcttgggtacacataatttgctaccacgtttgtgaccgctaatcttccctataaataccaaccaaatcaaatcatcttaaaaatcaccgagcaatctccgcttaac

SEQ ID NO: 18 - DNA, 602 bp, Hordeum vulgare
  barley ExpB1 Promoter
cgtggagttgaaactggttcggggtttgcgtcgtcgcccaactcgcttgtccgtcggctccggccggtggtaaagacgaggagatggcaccgcaggaaaacaaggctgtcttcgatggccgacgacttgagacaccgttattttgatgaaggcaccatgaaggctttcggtgtcgctttaccttcgggggacatcgtttttggagtagctacaggctagagggatgggtcaggatggaccgtttatgaaacgtgcgaacattttatttgaagggtacgaaacattttgaaggctgcataggatggaccgttgaaccccacgtgcacgcaatcacgcaacaaacccggccggatgagtcctctttatccaaaatctccggagttgaaagagccttcagcgccatggctccgtcatcaaaggatcggccggctccgtctcagttgaccacagtgcaaagtatgtatgcgcaccctctccgtgaacaagttgccgccacgttcgcctccataattcgtgtgtgcacgactaaacgtattcgctcccacgtttataacacctagaccttccttatcctatatataccaaccaaccgaaccacccca

SEQ ID NO: 19 - DNA, 1729 bp, Hordeum vulgare
  Barley SS2 Promoter
gaattgtagtaagtcacgggtgtttatttgatccagactcttttgtaaactaaaggcctctacctacatataaaggagagccctcgagttagaaagatcaagtaaacaactctcgagagctaggttagtgattacgcatccttgtagttgagatccccatcaacatagacaccaaagcaggacgtaggcttttatctccattgaaggggccgaacctgggtaaatccacctctcgttcccgattaacctcttcgagtcgccacaccgccatgatggcctcaacactaagtccgttcacgagctaggtcatgtcgtttggtgacattggccctagactcggagcccgacatcatggggacgaggctccatcgctagggttgcgctccaccccgtgtagttagtcgccactctacctacaaccaatgctcaccacctccattccgtcgcgctcacgcaccttgagttgtcgacgccgctggaaccgagccccactcttgtggatgcaatggggccagagtgactccgacaacggagctcgagtttcctctcgggactagcaaagtgccagctggacgactaactcctcctcgtccgcacatgaggacgaggtcccacccgatggatccagagttgtcaaattcaggctcgctattggccatgtcagaaaagggtggagatcactagagaggagttgggggtggagcggagtggactcggagtgggtggttagggtttcgtttggatagggacacattatgaggccgaggtgggttggtcggggcaagattcaatgtgaagaatgtgtcggggcacctcatatgacatatatgaccggtttaagggtccgattagatggcattttcgtgactagaccgtccgctcagacataaatggacgtgttaagtgcaagacaagttacaaaccaacatgtatatcaaatttaagttctaaactacactcatgcttatatttttcttaaattatttcaaaccttccaacgatgcgacttcaccaggagatgtttctgtcatgaacatatatgcaaatgtattttgcgttaccgtgtttcaaaaagaaaaaagtattccatccgtttttaaatataaaaccttttagagattttactgtagactacgtactgcgatggaaattaaaatgcaaaccacatggcagcggcatacgagagccattcatcgctacaggacactttgcatcggtagccagctagtttccgacggtaccgacgagccgcagagaacttctaaatgcggtttttatgtgcagggacaaacgcgggtttctctgtctgcggaacagaaaaacaaattcggttcccagcaaaaacaaaacaaaacaaagaaacaaaaaaactgcggttgcacgtagtaacaaagtctgtcgcgcacggagcatctcatgcagccgatgatggctcgccagcacgaaaacacttgtcacggcgcgctcccacgaaccggaaacacttggcgcggtgcgtccctccgaaccgaagcacctgtctctaccgcctcgggaaccgggcgctaatctccaaatcaggccggaggcctccacggccgtcgatgcgatgccgccaagagccagtgcggaaaagagagtgtccttttcccccggccgcccggcgagaggaggtggcagcggcgcctgacgcacgcctcctgctggcagctcctccggcgcgccgcgtgtataaataggggcgcagcgc

SEQ ID NO: 20 - DNA, 879 bp, Oryza sativa
  rice PG5a Promoter
aagcttgcgcgcggaatacggtggtggagatgggttgggaaccctggattccaaacacagcccaagtctatccaaaatgtttagacaagaaaatacgtaacaagttggtttacagaaatagcaattagatcaatcctgcactacaagtagagtaaagtggtgatttctcttaaatctctcgaatggtgatttaagaattcagtgcaaaccaaatccttgctataatcaaatgttcggtaccccatcaacggaacaataaaaagcgcctggctaccataattttgtcattcttcttcaatttgtaatttaagatgcatgaggccacacgaccttaatgttcaacgtgtcatgcattagtgaaataatagctcacaaaacgcaacaaatatagctagataacggttgcaatccttaccaaactaacgtataaagtgagcgattagtcatatcattatctcccgcctgctaaccatcgtgtacaccatccgatccaaaaatgacaacttctagggatgaacctggacaaggtttagggtttagggatgaatctggacaatgattgttcaggttcatccctagatgttgctttctccttacgggacggagggagtatatgtgatggacacaaaagttactttcatgatgaaaggaaaggggatttgttggggcactaatagaacatctgtccaaatggcatgactcacttatatcctaataggacatccaagaaaaactaacactctaaagcaaccgatgaggaattgaaagaaaatacgtgccaccgcatctataaatggacaagcgcaatggaaaccctcctcatcgttcacacagttcaagcattatacagcaaaatagaaagatctatgtcccagagca

SEQ ID NO: 21 - DNA, 666 bp, Cauliflower mosaic virus
  CaMV 35S (pQXNc) Promoter
gcatgcctgcaggtcaattctcatgtttgacagcttatcatcggtgcgatgccccccatcgtaggtgaaggtggaaattaatgatccatcttgagaccacaggcccacaacagctaccagtttcctcaagggtccaccaaaaacgtaagcgcttacgtacatggtcgataagaaaaggcaatttgtagatgttaacatccaacgtcgctttcagggatcccccctcagaagaccagagggctattgagacttttcaacaaagggtaatatcgggaaacctcctcggattccattgcccagctatctgtcacttcatcgaaaggacagtagaaaaggaaggtggctcctacaaatgccatcattgcgataaaggaaaggctatcgttcaagatgcctctaccgacagtggtcccaaagatggacccccacccacgaggaacatcgtggaaaaagaagacgttccaaccacgtcttcaaagcaagtggattgatgtgatatctccactgacgtaagggatgacgcacaatcccactatccttcgcaagacccttcctctatataaggaagttcatttcatttggagaggacaggcttcttgagatccttcaacaattaccaacaacaacaaacaacaaacaacattacaattactatttacaattaca

SEQ ID NO: 22 - DNA, 781 bp, Brachypodium distachyon
  PJJ 35S from Brachypodium Promoter
tcgacctgcagccaagcttggcactggccgtcgttttacaacgtcgtgactgggaaaaccctggcgttacccaacttaatcgccttgcagcacatccccctttcgccagctggcgtaatagcgaagaggcccgcaccgatcgcccttcccaacagttgcgcagcctgaatggcgaatgctagagcagcttgagcttggatcagattgtcgtttcccgccttcagtttagcttcatggagtcaaagattcaaatagaggacctaacagaactcgccgtaaagactggcgaacagttcatacagagtctcttacgactcaatgacaagaagaaaatcttcgtcaacatggtggagcacgacacacttgtctactccaaaaatatcaaagatacagtctcagaagaccaaagggcaattgagacttttcaacaaagggtaatatccggaaacctcctcggattccattgcccagctatctgtcactttattgtgaagatagtggaaaaggaaggtggctcctacaaatgccatcattgcgataaaggaaaggccatcgttgaagatgcctctgccgacagtggtcccaaagatggacccccacccacgaggagcatcgtggaaaaagaagacgttccaaccacgtcttcaaagcaagtggattgatgtgatatctccactgacgtaagggatgacgcacaatcccactatccttcgcaagacccttcctctatataaggaagttcatttcatttggagagaacacgggggactcttgaccatgg

SEQ ID NO: 23 - DNA, 877 bp, Cauliflower mosaic virus
  CaMV 35S (OLD) Promoter
aagcttgcatgcctgcaggtccccagattagccttttcaatttcagaaagaatgctaacccacagatggttagagaggcttacgcagcaggtctcatcaagacgatctacccgagcaataatctccaggaaatcaaataccttcccaagaaggttaaagatgcagtcaaaagattcaggactaactgcatcaagaacacagagaaagatatatttctcaagatcagaagtactattccagtatggacgattcaaggcttgcttcacaaaccaaggcaagtaatagagattggagtctctaaaaaggtagttcccactgaatcaaaggccatggagtcaaagattcaaatagaggacctaacagaactcgccgtaaagactggcgaacagttcatacagagtctcttacgactcaatgacaagaagaaaatcttcgtcaacatggtggagcacgacacacttgtctactccaaaaatatcaaagatacagtctcagaagaccaaagggcaattgagacttttcaacaaagggtaatatccggaaacctcctcggattccattgcccagctatctgtcactttattgtgaagatagtggaaaaggaaggtggctcctacaaatgccatcattgcgataaaggaaaggccatcgttgaagatgcctctgccgacagtggtcccaaagatggacccccacccacgaggagcatcgtggaaaaagaagacgttccaaccacgtcttcaaagcaagtggattgatgtgatatctccactgacgtaagggatgacgcacaatcccactatccttcgcaagacccttcctctatataaggaagttcatttcatttggagagaacacgggggactctagaggatcc

SEQ ID NO: 24 - DNA, 2322 bp, Arabidopsis thaliana
  Arabidopsis At6669 (OLD) Promoter
aagctttaagctccaagcccacatctatgcacttcaacatatctttttctagatgagttggtaaaagtagaaaaagatatgatgattttaaatttgtttctatttatatgtgttcatcgaaacttcattttttttagttttaatagagagtttatatgacttttaaaaattgatttaaaactgtgtcaaaaattaaaaggacaataaaaaatttgcatacaaccgaaaatacttatatttagacaagaaaaaataatacttgtgatgctgattttattttattatatatcatgaatcatgatcatccaattttccggataagccaaagtcaaaatgatgggttccccctaatcttttatgctgagaaatagatgtatattcttagatagtaatataaaattgggttaaagaatgatgattcgattatagcctcaactagaagatacgtgtagtgcaggtgtgtagttaactggtggtagtggcagacaaccagattaggagttaaataaagcctttagatttgagagattgaaatattcgattggaacctttctagatttttacagccatctaaaattagatgcagatcacctactaccattcaaaaatgaacaaaataatttcatttacattttcctagcataagatataataataaaatagtgctcattttaattactttttctaaatattttcgttattttaaattttgcttgtctatactctacagctcatttaataacggaaacaaaaataattgcagggatacggatgggtagctttcaaaacttacatcatcttctgtttcttgagatcaactatttttggagctttgtctcaatcgtaccaaaggataatggtcctacctccttttgcattcttaactttatcttctctacttatttcttttttgggatttttgggggtattattttatcttttgtagatatacacattgatttactacaaacgtatactactatccatcttcaactcttcggaatatgatttcgaaaaaactatgaagattaacgggtatcttaaacatgttaagatacaccggacaattttcatttagaagaattgatatgcaattaacaataaatagttgatgatcttttagttttgaagatgtgcgttaagacttaagcgtgtggtaacaaggtgggactcgggcaacgcaaagccttgtagagtccacttgctcaacttgtctttcttttatctcttttccaagtctcaagattcaatgaactccgtgtaacacaaacacgcccatagatgagctcatttttggtatttccaatattgccactccatgataatatcatctagggatggggttcatttattttgaaatctcaacaaatctcgtcgattctaacacacatgattgatttgtttacttacttgaaagttggcaactatctgggattaaaatttatctttttctactgctagctagaagcatctatatatgttagcctaatacgtggaagatgtcattgctaataatggctaaagatgtgtattaatttttcttcttttttccttgaatttttgttctttgacataaactatgctgtcaaaatgtgtagaatctttttacataaatcattccctgttacacactaaaaggttcacaacggacgattgtattggacttccagatcataaaccatgcaaaactgaaaaccacaagaataattagttctaactttagaacgttcgtacgtgtttcatgttcaaaaagcgtcaattataaaagttgggaaattacttttgagttttgacatttctaaggacagtcaaatatgacaacattgggatgcaacttaccttgtattaacttattttgttataaaaccatatattacatattttaaagggttgataaataatcaaatataccaaaacatagcttttcaatatatttgtaaaacacgtttggtctactagctaattatgagaacatttgttcaatgcatgattatctagtatctactagtggattatgaaaattagatattttcattgcatgattatcttccatatatagtgataacatcaaaagaatctacaccaattattgcattttttcattatataataagcactaaactgtaaaattatattcagccacccaaaccatgacaaatcaccttaaaggcttaaacacataacagccattacgagtcacaggtaagggtataatagtaaagaatcaatctatataatatacgacccaccctttctcattctttctggagagtaacatcgagacaaagaagaaaaactaaaaaagagaaccccaaaggatcc

SEQ ID NO: 25 - DNA, 2318 bp, Arabidopsis thaliana
  Arabidopsis At6669 (NEW) Promoter
aagctttaagctccaagcccacatctatgcacttcaacatatctttttctagatgagttggtaaaagtagaaaaagatatgatgattttaaatttgtttctatttatatgtgttcatcgaaacttcattttttttagttttaatagagagtttatatgacttttaaaaattgatttaaaactgtgtcaaaaattaaaaggacaataaaaaatttgcatacaaccgaaaatacttatatttagacaagaaaaaataatacttgtgatgctaattttattttattatatatcatgaatcatgatcatccaattttccggataagccaaagtcaaaatgatgggttccccctaatcttttatgctgagaaatagatgtatattcttagatagtaatataaaattgggttaaagaatgatgattcgattatagcctcaactagaagatacgtgtagtgcaggtgtgtagttaactggtggtagtggcggacaaccagattaggagttaaataaagcctttagatttgagagattgaaatattcgattggaacctttctagatttttacagccatctaaaattagatgcagatcacctactaccattcaaaaatgaacaaaataatttcatttacattttcctagcataagatataataataaaatagtgctcattttaattactttttctaaatattttcgttattttaaattttgcttgtctatactctacagctcatttaataacggaaacaaaaataattgcagggatacggatgggtagctttcaaaacttacatcatcttctgtttcttgagatcaactatttttggagctttgtctcaatcgtaccaaaggataatggtcctactcccttttgcattcttaactttatcttctctacttatttcttttttgggatttttgggggtattattttatcttttgtagatatacacattgatttactataaacgtatactactatccatcttcaactcttcggaatatgatttcgaaaaaactatgaagattaacgggtatcttaaacatgttaagatacaccggacaattttcatttagaagaattgatatgcaattaacaataaatagttgatgatcttttagttttgaagatgtgcgttaagacttaagcgtgtggtaacaaggtgggactcgggcaacgcaaagccttgtagagtccacttgctcaacttgtctttcttttatctcttttccaagtctcaagattcaatgaactccgtgtaacacaaacacgcccatagatgagctcatttttggtatttccaatattgccactccatgataatatcatctagggatggggttcatttattttgaaatctcaacaaatctcgtcgattctaacacacatgattgatttgtttacttacttgaaagttggcaactatctgggattaaaatttatctttttctactgctagctagaagcatctatatatgttagcctaatacgtggaagatgtcattgctaataatggctaaagatgtgtattaatttttcttcttttttccttgaatttttgttctttgacataaactatgctgtcaaaatgtgtagaatctttttacataaatcattccctgttacacactaaaaggttcacaacggacgattgtattggacttccagatcataaaccatgcaaaactgaaaaccacaagaataattagttctaactttagaacgttcgtacgtgtttcatgttcaaaaagcgtcaattataaaagttgggaaattacttttgagttttgacatttctaaggacagtcaaatatgacaacattgggatgcaacttaccttgtattaacttattttgttataaaaccatatattacatattttaaagggttgataaataatcaaatataccaaaacatagcttttcaatatatttgtaaaacacgtttggtctactagctaattatgagaacatttgttcaatgcatgattatctagtatctactagtggattatgaaaattagatattttcattgcatgattatcttccatatatagtgataacatcaaaagaatctacaccaattattgcattttttcattatataataagcactaaactgtaaaattatattcagccacccaaaccatgacaaatcaccttaaaggcttaaacacataacagccattacgagtcacaggtaagggtataatagtaaagaatcaatctatataatatacgacccaccctttctcattctttctggagagtaacatcgagacaaagaagaaagactaaaaaagagaaccccaaaga

SEQ ID NO: 26 - DNA, 1321 bp, Brachypodium distachyon
  RBCS Promoter
ccaagagtcgttgtctccatgacaacgcccccaaggaggaaatcgacgtaaaaacgccgttgtcgcccgatctggccatagccaaatcttaggttttcacccgaagacaccaaacatcaaagtgagggaaagtgaagctcttcgacgacacctccaagaaggaaaacggcgctacaacatcgttgtcttcggcatacctcgcacacgggcagttttcatccagagcaacactccaaacaccggagccgacgtccatacctcgcacacgggcagcagccgaagacgcgaccgaaaatgaaaaccacgccaccatggcatcgaaaaggaccgacttggaccatgtatggccgcagcagcagcccatctgccgccggtgaagttcaatcagccgcctcaccaaactgagaggaaaaatgatggaaacgaagagacctgggacatgccggatcagccggaggagatgacggatctggccaacgagtagctagatccggccgaagagcgccgccgtgaagccgcgcagccacgagcagaccgagcaccagggagaggaagaacgaggggaaacaccggatccgggaggaagccggccggatctagccgaagacgaggcatagcctgccggatcgggccggagacgccgcgaccacgatgaggcagcacctcaaacgcctcagccaagagctctaggacacccccgccaagaaaaacagccccgccgccgccgtccccgtgcgggctttgcccggcggcggcgagggggaggagaggacggggagaggctgctgccggggctggtgtggttgccgcccgtgtcgccccagactgagcgacgcgggggcaagcttcgttctcgataagatcttagaagagtttctcttaatttgttgttcctctagttcataaaaagtgctgctcattttgcattaactcattacaaattttctaataagtgggcgagattttttatggattggagggattagcaagttctgtttttgagtgcatgccgtggcacattggatctatcctgataggtgaaaattggtcacttcatggcatgatttgcagagtgcgttgcagccaattgtatccgtccagaggataacgcgcgccatttcgtgcggccatgtggcgcccgacctgatccgtaggatgccagcgtggcctgggcaaatccgcgcggcgaactgcagccacccctcctagatcttgtgctgatattggatgggtggggagcctacagttatataagccgctgtagctagagagcactcaagcaagcctgcctcctcttgttagctatctacgtacgtgtacg

SEQ ID NO: 27 - DNA, 1599 bp, Arabidopsis thaliana
  Arabidopsis AT5G06690 Promoter
ggaccatttgtttagacgacattgttaaggggatgacttaaagtgatgagtttcaaattaaaatacccctcgtttttggagttatttacttaaaatgccacttcaaagaagcgtgtcggtgtgttcgagattcgaattttaattactgtcttttgcccctatctatatatatctcactttaatcacacttttattatcgttaatgtttaatgtttatttatgttaatgaaggattagtggttagtggttgtgttactaattgttcgttgctaatgtccttgaaaggtgtaatttgtatgatctatctaactaaattatccggaaataatgcggttgaaataaaatcacgatacatattaggatatcacaatctatttatagtatattttagtcgagatttgaaaataaaaagggaatatattactcgattaaagacattttcaaacgcaaaatcgtatataactatagattgaatcatatatatatctgtgactcaagtcttttatctttgttttttggtttaatgttaaaactttatatcaacaaagacttttatcttgtatcttatgtttactatttctgatgagtaaatattaattttgtaggtaagtaaggtggcaggtttgggtaaagaggaaatcaaaaatgtatggtaggatagtacttgacaaaatacaaaattctaattcgcgtttattaaagtccttagcgtgtggactctacttgtttaatttcgactctctaaacgtcggcctttattttctttcaaacgtacttcaccaactctattagagagatcgattataaccgacaagcataagtatgtgatttctatattagtttatatatagctatgtcttcgaatgattatttatagtaaacacataattatacgtaataagtccgagagtatataaactatgaaggataattaattgaagacaagaaaattaacgaaatagtgtggggaattcccaaggcatcatattcagatcaatgcaccgtcacaagtttggctattctttatttggttttctgattaacacaaagttttaaatagttttgaacgtttctaatccatttgaggcagtgattttttctgttccaagtattttatgttcaatattattaggaatgtgaacggaacgatttttttttttttttgtggaaccgagcgaccaaatttgagaaaataaaacaaattagattgatttaacatttagacgaggtttaattagaaaggaaaaaaaaaacacaattttatataaatatgaacagccaaaataattttcctagagtttataagttcagggtttacctttttcatagagaaaactaataaagtcactattaacattttaagaatatacatttttaaaacaaattataaagacaatgagagaaaggtagcccccaccagtagcacatcgttggcattgtccaactcatcttccggataagctctctatccatctcctcacatctcttcccaaaactttcaaaaacaaaaaaaatatcttaattatggcatttgaaaacttaaaaatatctcgtcacatatcttcatcgacaaaaaatttactgaaagcgaaaaaaata

SEQ ID NO: 28 - DNA, 1774 bp, Arabidopsis thaliana
  Arabidopsis AT5G61520 (AtSTP3) Promoter
ctgttatgaggtgttcttgcacggcatgtctagttgcaggctgctgaagaattgcccaccggcttttaaacaacgacccaactctttctgcaacatctgcaacattcactttcgcatccttagcaacttccccgacaaaactaccagcagtctgccctgcttccctaagcttcgttcctaattcagtaactccatagtaagctttccaccataaacactcacagagagaaacgaaatgaggttagcatagaaattatcaaacctgatgaagaaaagaatccactagtcctctcctgccattgctgtgagatgagagaaggcattatccaataccaaccactttaaacaagtcactagaaacctgtttgcatcaagaaacaaatgggaagatatatacttattcttagcaaattatgatacaacctcacaagcggtattatccgttgtaatcaacttcatcacatgaaatcatcttcaatctaatcatatacaattgatacagaagaaacacaaaagaaaaccaaaaccttgacttcatcgtcaaccatggaatgaatttcttgacaaagaataaaaaccaagtctttaactgccaaaaggagataacttttaaggaacacaaaccctaatcctatattctctaatcaatcatatacgagaatcaaaaagaacaaatagaacaaaagcaatccgatcatcaaacctttagaacaatccccagaaaaattgagatagctgatgatcgaatcgaactaaacccaattcctcgatacgatcaaagacgacgaagacgagagtcagcgatatgatgaaaaagaaattgatcgctccaggagatgaaaaggttccacttttttaatttccccctggagcagagaaaaaaagatattattgctgtttaggtaaaaaaaaagtcggctttgaattttgaataggaaagtcttcttccctttgcaaatcacagatattctctccgtcacggactgtgacggtaataaatattctgttggtgccacgtgtaataagtttttctcttcacaaaaatggtccttcatcttcttttagtatctcatttgtgacctaagcttctaatttcacagcttatcatccccttaatgttttaagttttttgaccatagagtaaaattattttactataaaattaaaagcaaaaaataaaatttactataaaattataattataaaaagtgaatgtaaaaatgattccataaatttacatgattgatagtaattattctgccaacttaattccacatgtatatcagtatttatatatagaaaatgatggtttttctacatagtcaaattccaaaacaaaatatcagtattatggaattaaacaatcaaagtttgcaacttggtatgtccaatatcatcgaaagagctttatcattcagtcgttgaaaaaagtatagccatctttttcttctatcgattttcaaaaaaaaaaaaaaaaaaaaaaaaaaaaaaaaaaaaaaaaaaagaggaagataatgaaggtaggcagtgaaaagtctttcttcacatgtcttttattgtccactttcgatatctcatcagccagaaccgaaacaaacaaaaactataagtcccacactcaagtcaattaaagcactccaatggtccaacaagtttcgtcgtctaccttgaaactcaacctttggatgattgatatacaaaaatacaggatctaaaaacacctaccgaacttgaatagtaggtgtgttgtgtttgagtgtctctctaggtaaac

SEQ ID NO: 29 - DNA, 1127 bp, Brassica napus
  Brassica napus NAPIN Promoter
attgattcctttaaagacttatgtttcttatcttgcttctgaggcaagtattcagttaccagttaccacttatattctggactttctgactgcatcctcatttttccaacattttaaatttcactattggctgaatgcttcttctttgaggaagaaacaattcagatggcagaaatgtatcaaccaatgcatatatacaaatgtacctcttgttctcaaaacatctatcggatggttccatttgctttgtcatccaattagtgactactttatattattcactcctctttattactattttcatgcgaggttgccatgtacattatatttgtaaggattgacgctattgagcgtttttcttcaattttctttattttagacatgggtatgaaatgtgtgttagagttgggttgaatgagatatacgttcaagtgaagtggcataccgttgtcgagtaaggatgacctacccattcttgagacaaatgttacattttagtatcagagtaaaatgtgtacctataactcaaattcgattgacatgtatccattcaacataaaattaaaccagcctgcacctgcatccacatttcaagtattttcaaaccgttcggctcctatccaccgggtgtaacaagacggattccgaatttggaagattttgactcaaattcccaatttatattgaccgtgactaaatcaactttaacttctataattctgattaagctcccaatttatattcccaacggcactacctccaaaatttatagactctcatccccttttaaaccaacttagtaaacgctcttttttttaattttatgaagttaagtttttaccttgtttttaaaaagaatcgttcataagatgccatgccagaacattagctacacgttacacatagcatgcagccgcggagaattgtttttcttcgccacttgtcactcccttcaaacacctaagagcttctctctcacagcacacacatacaatcacatgcgtgcatgcattattacacgtgatcgccatgcaaatctcctttatagtctataaattaactcatccgcttcactctttactcaaaccaaaactcatcaatacaaacaagattaaaaacatacaccc

SEQ ID NO: 30 - DNA, 916 bp, Arabidopsis thaliana
  Arabidopsis AT1G61720 (BAN) Promoter
ttgtacttttgaaattacagagatagagatttagttgttatgagtttatcgtcttgagacttctatataagaagtaaaaagatttgcaaatagtccttgctcattaggtacaacagtagatcaataaggctgttttagaaggtaagcacgtgatctttgaaataaccaacttgtcttcacctaagaatcaaaaaagattgaccttcagagttctgatttgttatcatctaccaaattatcacaagagtttgattatttctgtctctaaacaatataacacagctttagagtaacgaatagtgttacagtaaggttctgttacttcaattttttctttgccgatcttaaaatgagttgcaaaagaatgctttttacttccaccaatctgtcaaattctctgcagtttttaacacaacttggacttgctatgttctgtttcacgaattacacgagtcaattcaacataacttgctctgttcttgtccatgtttcacagaatctggccttaagcaattttatcatatttaagctacaaatccataacagagtttaacaaagataaaataaccagaaagttacattgaaagataaaaagtgaagaagacaaaaaaaagagagggtaaatcctaaatcgaaaacaaaagaaggcattggcaatagcattccgattttaaaaaaccgataaatctatgtatctaatggcttgttcttagaagcttcaacgaacatagaagcaacctcattcaaaaacttagtcttctccaacacaaattccaactccttagcttgcaacaacttatacttctcttcaacaatcttcttactctcaaccgaaaccaaactccattgctgcttcacataatactcatcaacacccaaactagcaatcatcctaacaagagacgagttatcaaac

SEQ ID NO: 31 - DNA, 3965 bp, Arabidopsis thaliana
  Arabidopsis ABI3 (AT3G24650) longer Promoter
catgttaagttttactagatacgttctcatctaactagatacgacctaaaatacgatatttgtggttttagttgttagatgttgtgtcacacgagagaaagaggtcgacgaagaaaaaaacaaaaagaagaagtaaaacgtagttattggcggacaagggataaagattgctttgaagtcagaaatgctgacacgtggcagcatatgaagacaacccgccgcttaaaaccacgaatggtgacgaaaggcttctttgtttgcatgtgcaaccaatctctctctttctctctgtctttactaattttggttgttcgtagaaaatgaaatatttgaacgaagaagataaaggttggtgatgtacgtatgactctaaattagagtttgataatttgtatgtaagattagatcggttttgttatttgcttgatccaatttattgaagtacatgtgaataatcgtgatatatgtcaatatatatgtgctataattaaatctattaacaaatttctttttatcgatttagttacaccatctttaatatatttctattttctattttaaactaaagcatagtttctccaatatattaatttatatatttactctaggatagaattagattcaaaaactagaatagagaatatagatgctctaaatagacaataattctattacttactctattttagagtaaaacatatagtgatgctgacaaaaatattattttataatagagtttagaaagaaaagaaaaaacaaaaaaaacttgaagatgctggaactattaaaaattaaagaaaaagtttaaaatgaataatgctttttattcttagttttttttttcttttttttcttttagttgatgttaaagttttagtcaaatctccaaaatttgcaaaaaagatacattagttacggacggatatatattaaataaattaagtcacaaatatcatatatatatatatatatattaattttttgcctagttttgttccaaataaaattttcaatttttagtgtacaatatttttcatcgtccaaatacacaaacacaacaaataataataccactaatttatttgttttctaatataattgaaccttttctaattttattaaataggctgaaaaccataaattatttggagccaagattaaattatgttacataaatccttttctcgtcatcaatactcaaatttaaatttttttattttcatagatatttttgggaatttaaaatccttccaaataaatttgggaaaataatagatgttttaaaatatttttgttattttcgagtagtttacactgattttacatcactttatggatcaagaccataaaatttaactacatttattataacttatttgaaaagacatgaaactttcattagagtttaggaaaatacggcaaactattagattatcaccctcttgtgactaatgttaatactatttggtaaagcaaataatcccataactaattttattttgatttgttcactatcaattgtatcatagacgatccgatgattaatgtacctaaattttgatttaaattgtattccttgtagtacgcatagtaaaacaaagttcacatgttcttttacaattggttttctaacattttagatttcattttaaactaaagaaaaagggtttttcgatcccaacaatttttaaagtatgtttttgaatttcaacaaacgactagtactgatatatacatcaatgcttacaaaaatcaaattatctatctcaacgtttacttttgtacgtaattacaagtcaatattaacaaatattagtcaactgtaacggttgttgactcaattgatacgtgtacgtttaggtggcatgttttttaataaaataattttgttttatgttttgggattaaaaatatttacttttaaaaaactaaaccgaaaaactggaacccccaacctcacatattcatcaccatcgtatccacaaacattatcgagacataaataataatttatagatatatagcaacaaattggaattaaattaatcaaacaatgtcatttagaattggggaaatcctaaccgacgttatatgattaattttaattccaatttatgtatgtgtatatatctataaattattatttatatattgatgatgttcgtgcatgatggtaatggtaacctttaaaacttttgaatctcaaaacgtaaaacaacgtcatttggtttgaagaacatgccatctcgacgtacaagtgttagctgattcaacaaccgttactgttaattaccataactaacgttgactcataattatgtacaaaagtaagagttgaggtagataatttgaattttttaaatgttaaagtatgaacattactaattgtttgttcagatttataaaacacagtacctattttgatgtgttaaaatgtaatcgggaaaataggaattttcccaagaaaaaaaaatacactaaaattttgatgtgttaaaatgtaataaatacaagtacctatttctttctacaacaggtatcacatgatctgctcaatctcattttgaaggcaaggtcgaaccctgtttgtaactaaatattttacaaatacactaaaagttttgttttgttttcctcatgcagaaaaaagaaaagaaagaagaagaaaaaaaactcacaaaaacatacattgttctacaatatgttaaagtaattgttctagggtaataaaatccgtgtctgcctcttccacttcaataggaaagtgtaagtttttcgaatctttttggccagataatttaaaaccgaccgaggaaacttacttttgtaaaagtgaccatttgcacataggaagtagaaagttgataattggaaaatttataatattttatacaaaagaagtgtttaagaaccaccgcttggtctcaccactcaaattcgaacgtatggctcgtgggcacaaactcctgtaccaacctttagatactagcggcacgaggagacttctattttctctttgtttttaagtttttttatcgacttaaatatggctttttgcaccatttaatttcaaaaccaatgtctttctctcgaggaactttgtttttatttcttagaagatgaggggagatttactatctaaataaaattttaaatgtttgtaagtattatgagctcaacaattttgtcaatagtgccacaaatttaaacgtttgctttttgtcttctttgaaaaatcaaatgctgaaaaactgttacatctctttttcttaaaaactcttgtctctctccttttccttctgctgaggtaattgaatgctgcaaagagaaagagaataacttaaacccaaaattacacttaccgccagaaaaaaaaaagagttcagtttaatctaacatattttatacaatacaattgaattatattagtaaaaaaaaaacttccatataaatcatggaacaaactggaacacatgggctctcttattttaatttattttcttttttgagggatttaaccatgtttattatatagttttataaatatatatataccatctctccataatttataaaatgaaagaaagagagagtcttcttgttggagtaaacccaaacggttttagattacttattagctgttcatcagttcttcctctctaaaagagtaaaacctaaacatctctctctgttctattagaaccaaagaccaatctttgtgaacaaaacacatctcgtatacttcagatctagactcgaaaattttagacctctttacaattggtctttgttcatctgaagttggagaaaatagttagcttaggtcggatcttttcatatgctttggatcctccttcgtctcttttgtataattttaaccttatcaagagttctttttgaatctcaaaagattatatagtagtatagaaggtttatatgtatatgtatagccagatagtttatgt

SEQ ID NO: 32 - DNA, 4074 bp, Arabidopsis thaliana
  Arabidopsis ABI3 (AT3G24650) Promoter
catgttaagttttactagatacgttctcatctaactagatacgacctaaaatacgatatttgtggttttagttgttagatgttgtgtcacacgagagaaagaggtcgacgaagaaaaaaacaaaaagaagaagtaaaacgtagttattggcggacaagggataaagattgctttgaagtcagaaatgctgacacgtggcagcatatgaagacaacccgccgcttaaaaccacgaatggtgacgaaaggcttctttgtttgcatgtgcaaccaatctctctctttctctctgtctttactaattttggttgttcgtagaaaatgaaatatttgaacgaagaagataaaggttggtgatgtacgtatgactctaaattagagtttgataatttgtatgtaagattagatcggttttgttatttgcttgatccaatttattgaagtacatgtgaataatcgtgatatatgtcaatatatatgtgctataattaaatctattaacaaatttctttttatcgatttagttacaccatctttaatatatttctattttctattttaaactaaagcatagtttctccaatatattaatttatatatttactctaggatagaattagattcaaaaactagaatagagaatatagatgctctaaatagacaataattctattacttactctattttagagtaaaacatatagtgatgctgacaaaaatattattttataatagagtttagaaagaaaagaaaaaacaaaaaaaacttgaagatgctggaactattaaaaattaaagaaaaagtttaaaatgaataatgctttttattcttagttttttttttcttttttttcttttagttgatgttaaagttttagtcaaatctccaaaatttgcaaaaaagatacattagttacggacggatatatattaaataaattaagtcacaaatatcatatatatatatatatatattaattttttgcctagttttgttccaaataaaattttcaatttttagtgtacaatatttttcatcgtccaaatacacaaacacaacaaataataataccactaatttatttgttttctaatataattgaaccttttctaattttattaaataggctgaaaaccataaattatttggagccaagattaaattatgttacataaatccttttctcgtcatcaatactcaaatttaaatttttttattttcatagatatttttgggaatttaaaatccttccaaataaatttgggaaaataatagatgttttaaaatatttttgttattttcgagtagtttacactgattttacatcactttatggatcaagaccataaaatttaactacatttattataacttatttgaaaagacatgaaactttcattagagtttaggaaaatacggcaaactattagattatcaccctcttgtgactaatgttaatactatttggtaaagcaaataatcccataactaattttattttgatttgttcactatcaattgtatcatagacgatccgatgattaatgtacctaaattttgatttaaattgtattccttgtagtacgcatagtaaaacaaagttcacatgttcttttacaattggttttctaacattttagatttcattttaaactaaagaaaaagggtttttcgatcccaacaatttttaaagtatgtttttgaatttcaacaaacgactagtactgatatatacatcaatgcttacaaaaatcaaattatctatctcaacgtttacttttgtacgtaattacaagtcaatattaacaaatattagtcaactgtaacggttgttgactcaattgatacgtgtacgtttaggtggcatgttttttaataaaataattttgttttatgttttgggattaaaaatatttacttttaaaaaactaaaccgaaaaactggaacccccaacctcacatattcatcaccatcgtatccacaaacattatcgagacataaataataatttatagatatatagcaacaaattggaattaaattaatcaaacaatgtcatttagaattggggaaatcctaaccgacgttatatgattaattttaattccaatttatgtatgtgtatatatctataaattattatttatatattgatgatgttcgtgcatgatggtaatggtaacctttaaaacttttgaatctcaaaacgtaaaacaacgtcatttggtttgaagaacatgccatctcgacgtacaagtgttagctgattcaacaaccgttactgttaattaccataactaacgttgactcataattatgtacaaaagtaagagttgaggtagataatttgaattttttaaatgttaaagtatgaacattactaattgtttgttcagatttataaaacacagtacctattttgatgtgttaaaatgtaatcgggaaaataggaattttcccaagaaaaaaaaatacactaaaattttgatgtgttaaaatgtaataaatacaagtacctatttctttctacaacaggtatcacatgatctgctcaatctcattttgaaggcaaggtcgaaccctgtttgtaactaaatattttacaaatacactaaaagttttgttttgttttcctcatgcagaaaaaagaaaagaaagaagaagaaaaaaaactcacaaaaacatacattgttctacaatatgttaaagtaattgttctagggtaataaaatccgtgtctgcctcttccacttcaataggaaagtgtaagtttttcgaatctttttggccagataatttaaaaccgaccgaggaaacttacttttgtaaaagtgaccatttgcacataggaagtagaaagttgataattggaaaatttataatattttatacaaaagaagtgtttaagaaccaccgcttggtctcaccactcaaattcgaacgtatggctcgtgggcacaaactcctgtaccaacctttagatactagcggcacgaggagacttctattttctctttgtttttaagtttttttatcgacttaaatatggctttttgcaccatttaatttcaaaaccaatgtctttctctcgaggaactttgtttttatttcttagaagatgaggggagatttactatctaaataaaattttaaatgtttgtaagtattatgagctcaacaattttgtcaatagtgccacaaatttaaacgtttgctttttgtcttctttgaaaaatcaaatgctgaaaaactgttacatctctttttcttaaaaactcttgtctctctccttttccttctgctgaggtaattgaatgctgcaaagagaaagagaataacttaaacccaaaattacacttaccgccagaaaaaaaaaagagttcagtttaatctaacatattttatacaatacaattgaattatattagtaaaaaaaaaacttccatataaatcatggaacaaactggaacacatgggctctcttattttaatttattttcttttttgagggatttaaccatgtttattatatagttttataaatatatatataccatctctccataatttataaaatgaaagaaagagagagtcttcttgttggagtaaacccaaacggttttagattacttattagctgttcatcagttcttcctctctaaaagagtaaaacctaaacatctctctctgttctattagaaccaaagaccaatctttgtgaacaaaacacatctcgtatacttcagatctagactcgaaaattttagacctctttacaattggtctttgttcatctgaagttggagaaaatagttagcttaggtcggatcttttcatatgctttggatcctccttcgtctcttttgtataattttaaccttatcaagagttctttttgaatctcaaaagattatatagtagtatagaaggtttatatgtatatgtatagccagatagtttatgttgtttaaagattcgatgatagccaagttgggttaactttctttttccttgcctccttactcacatacaaaccctatctgtccgtacaaaatactaaaaaccctaacttt

SEQ ID NO: 33 - DNA, 1700 bp, Arabidopsis thaliana
  Arabidopsis (AT1G69120) APETALA 1
ttagactgatttctctatacactatcttttaacttatgtatcgtttcaaaactcaggacgtacatgtttaaatttggttatataaccacgaccatttcaagtatatatgtcataccataccagatttaatataacttctatgaagaaaatacataaagttggattaaaatgcaagtgacatctttttagcataggttcatttggcatagaagaaatatataactaaaaatgaactttaacttaaatagattttactatattacaattttttctttttacatggtctaatttatttttctaaaattagtataattgttgttttgatgaaacaataataccgtaagcaatagttgctaaaagatgtccaaatatttataaattacaaagtaaatcaaataaggaagaagacacgtggaaaacaccaaataagagaagaaatggaaaaaacagaaagaaattttttaacaagaaaaatcaattagtcctcaaacctgagatatttaaagtaatcaactaaaacaggaacacttgactaacaaagaaatttgaaacgtggtccaactttcacttaattatattgttttctctaaggcttatgcaatatatgccttaagcaaatgccgaatctgttttttttttttttgttattggatattgactgaaaataaggggttttttcacacttgaagatctcaaaagagaaaactattacaacggaaattcattgtaaaagaagtgattaagcaaattgagcaaaggtttttatgtggtttatttcattatatgattgacatcaaattgtatatatatggttgttttatttaacaatatatatggatataacgtacaaactaaatatgtttgattgacgaaaaaaaatatatgtatgtttgattaacaacatagcacatattcaactgatttttgtcctgatcatctacaacttaataagaacacacaacattgaacaaatctttgacaaaatactatttttgggtttgaaattttgaatacttacaattattcttctcgatcttcctctctttccttaaatcctgcgtacaaatccgtcgacgcaatacattacacagttgtcaattggttctcagctctaccaaaaacatctattgccaaaagaaaggtctatttgtacttcactgttacagctgagaacattaaatataataagcaaatttgataaaacaaagggttctcaccttattccaaaagaatagtgtaaaatagggtaatagagaaatgttaataaaaggaaattaaaaatagatattttggttggttcagattttgtttcgtagatctacagggaaatctccgccgtcaatgcaaagcgaaggtgacacttggggaaggaccagtggtccgtacaatgttacttacccatttctcttcacgagacgtcgataatcaaattgtttattttcatatttttaagtccgcagttttattaaaaaatcatggacccgacattagtacgagatataccaatgagaagtcgacacgcaaatcctaaagaaaccactgtggtttttgcaaacaagagaaaccagctttagcttttccctaaaaccactcttacccaaatctctccataaataaagatcccgagactcaaacacaagtctttttataaaggaaagaaagaaaaactttcctaattggttcataccaaagtctgagct

SEQ ID NO: 34 - DNA, 1096 bp, Arabidopsis thaliana
  RootP Promoter
tcagatgaagaaggcggcttttgcacgatttcataatggctacgtatttggcagataaagttattgtgtatgaaggagaaccttccgtggattgcacggcatcttctcctcagtctctacgtagtggaatgaatttgttcttgtctcgtttgaacatcactttcagacgagatcctacgaatttcagaccaagaatcaataaactcgattcgatgaaggatagtgaccagaagcttgcgggatgttattactacttggatgattaagagagagatgacattgagagaatctttcaccggagaaaacctgaagtagtgagaaactcacgttttgatctttcctagccccttcaatctattataagatctcttgaattttattagatccatctggagtttaatttttgagaatatattatggtgtttgaattcggtttgtttcaatcgttcccatatattagactagtttttttcttcacacatgagaatctcaaaccgattgcgtagaagaagaactcgcattcatctgtttttgtctttagttgagaatgaatgaccgttgtaatgtcatgggcttcttttggtttgggtctgaatcacttaagcccaacacaatctcttcttaggttgaaacactgttgtttttgctgttttgtctgacacaaggcatcggatgatgtcgattgtcgaatatgcttcctcattcggagtgttctcagacatcttgagcttctcattagttaggcggtgcgctcgaaagtcgaagccgtgttgacatatcaaaacattgggaccattcaattttgtacaaatgtccaaacattatttcggtttgataacaataaacaaataaagaaagagttttttattggattcacttggcaacagccaacaacgaatcaaataatctatatacataattatattagaagctgtgaatgtgcctccgagtagacaaaagcacatgcaccataaatgatcaaacccatgaaacttccatctctctttttcccctatataaactaatgtcacttacctcaatattccatcaacaatatacatctgagatatcaaaactcctagagagatctaataaa

SEQ ID NO: 35 - DNA, 2432 bp, Arabidopsis thaliana
  arabidopsis ATTPS-CIN (AT3G25820) Promoter
atgtcaattttcatggcacatcgaggagaaactgtttccttgtggtaatcctttataatctctgttgctaggaggagatttttcattaatagtctatctttcacaaaggcagattgatttgaagagatgaacttgggaagaatgattttgagtctgtttgcaagaatcttcgatatcaccttatagagaacattacagcatgatatcggtctatagtccttcatcatcacagcttcttttctcttgggtatcaaggccaaaatagtggagtttactcctttgggtaggaagcctgtcttaaaaaaagattggatggctaccacaaaatcgtttcctactatcgaccatgtctcgttaaagaactcacaagtatatccgtcagggcctggggatttatttgaaggcattgagaagagaactttccgcacctcctctgcagtgacttctagtgtgagcttgtcttgtcattctcatcacatctataatccagtagagtttccagttcctcccgcgaccaatccacgtagtctggcggtttgagcgttaaaaagtctctgaagtatcgaactgcctctgcttttatttgctgctgatttgatgcaatatgtccatcatcacacttaatctctctaacattgttacgaacctcccgaatctttgcagcattgtagaaagttttattattttggtctcctatcttcatccaatgcagttttgctttttgcctaaggtagctttcctcaatacccgacagccttaaccacttctcatatgcgtccgcttcagctaccactgcctgtgaagatggccttgtcatagtttctgcttgcttttcacataaagttttataggcttcttttgctttttttgagatatcaccaagtaactgcttccccatctttctgaaatgtggcttcagaccttttaatttttttgataagcggtgcatggctgaggtagaatgaaagagaggctgagttgtcttccaaagctcttctgtctcacttctgaaatccgaatacgaaattaaagcatttataaatttaaaaggcctcttgactcgttgttcctgctccataatatagaatcgacatcttaggtgatctgaacaaccgcctgattcaaagacgctgtaggactgttcatactattgcatccattgcttgctaatcagtaccctatccagcttcttacatattactccttcctttctcttgttacaccatgtgtatctctggccttggtagctcatatctgttaattcacaatgtctgattaagtcttgaaaatctctcatcccttggagaacgaatggagatgattcatagagtgaatggtcctctccttctaatatctcattaaagtctccacatattaaccaagctttgttatagaacaaaggggaatcatgatgatatttaatatcactccacaaatcctttctttctgctgcaaaatttgatgcataaacaaacgacacaaagaactcttcttgtcttccttctaataagacagagcaagtgatgagttgtgacgtcttatatattggagatacacgcacgttatcttctattatctttcaatagtaatttgatataaattaagataatgtgcagtgaacgagtggcgattgttaagccaagtgaacattatatactttattttatactttctccaagcttcgaatggagaatttatttccatacgactaactctacctaaaagggccatgtttgtttgccaacataacacgacgatcacgagatacacataacatttagaatttggagaagatacattttgtttgacttcactttttgtgcgaatggctgttctacctgaaggggccattagtataatttttttgtacataataacgtcaccaaatataacacgagaatcacgaggtacacaaatcatttaggcttggacattatctaatcaaataagctatgatatcaaatttacatacatatagtggcctcgtgggtataattacacaaggagcttttggagaaaaagaagtgtgtgatttaaatgacaattatacaaatgtgtacaattatcagatccaaagttcatgttttaaatcatcaaaaaaataataattgatgagttaaatgatatttttttcatttagatttagttagattagttgtacggttgtaccattatttaataatttaaaagttgaaatgattataatgtataaaagttgaaaatattgtaacagatatagattaagcatttttgcggtcaatatattataaaagcttttttagctattaattgaaaaatattttacacccttagatcttttgatctcctaattatataaaatattttcttctaccgtttgtctatataaccatatgtgttgtctagtgcatgtattcagccacgaataagagaatagtctactaaatcaatgg

SEQ ID NO: 36 - DNA, 277 bp, Agrobacterium tumefaciens
  NOS TERMINATOR
gagctcgaatttccccgatcgttcaaacatttggcaataaagtttcttaagattgaatcctgttgccggtcttgcgatgattatcatataatttctgttgaattacgttaagcatgtaataattaacatgtaatgcatgacgttatttatgagatgggtttttatgattagagtcccgcaattatacatttaatacgcgatagaaaacaaaatatagcgcgcaaactaggataaattatcgcgcgcggtgtcatctatgttactagatcgggaattc

SEQ ID NO: 37 - DNA, 538 bp, Cauliflower mosaic virus
  35S pEBbVNi Promoter
catggagtcaaagattcaaatagaggacctaacagaactcgccgtaaagactggcgaacagttcatacagagtctcttacgactcaatgacaagaagaaaatcttcgtcaacatggtggagcacgacacacttgtctactccaaaaatatcaaagatacagtctcagaagaccaaagggcaattgagacttttcaacaaagggtaatatccggaaacctcctcggattccattgcccagctatctgtcactttattgtgaagatagtggaaaaggaaggtggctcctacaaatgccatcattgcgataaaggaaaggccatcgttgaagatgcctctgccgacagtggtcccaaagatggacccccacccacgaggagcatcgtggaaaaagaagacgttccaaccacgtcttcaaagcaagtggattgatgtgatatctccactgacgtaagggatgacgcacaatcccactatccttcgcaagacccttcctctatataaggaagttcatttcatttggagagaacacgggggact

SEQ ID NO: 38 - DNA, 555 bp, Streptomyces hygroscopicus
  Streptomyces hygroscopicus (A10) Bar Gene
atgagcccagaacgacgcccggccgacatccgccgtgccaccgaggcggacatgccggcggtctgcaccatcgtcaaccactacatcgagacaagcacggtcaacttccgtaccgagccgcaggaaccgcaggagtggacggacgacctcgtccgtctgcgggagcgctatccctggctcgtcgccgaggtggacggcgaggtcgccggcatcgcctacgcgggcccctggaaggcacgcaacgcctacgactggacggccgagtcgaccgtgtacgtctccccccgccaccagcggacgggactgggctccacgctctacacccacctgctgaagtccctggaggcacagggcttcaagagcgtggtcgctgtcatcgggctgcccaacgacccgagcgtgcgcatgcacgaggcgctcggatatgccccccgcggcatgctgcgggcggccggcttcaagcacgggaactggcatgacgtgggtttctggcagctggacttcagcctgccggtaccgccccgtccggtcctgcccgtcaccgagatctgatga

SEQ ID NO: 39 - DNA, 562 bp, Artificial Sequence
  BAR_GA
agcagccatgagcccagagaggcgcccagccgatatcagaagggctacagaggccgatatgccggccgtgtgcaccatcgtgaaccactacatcgagacatccaccgtgaacttcaggaccgagccgcaagagccacaagagtggaccgatgatctcgtgaggctccgcgagagatacccatggctcgtggctgaagtggatggcgaggttgccggcattgcttatgctggcccatggaaggctaggaacgcctacgattggaccgccgagtccacagtgtacgtgtccccaaggcatcagagaaccggcctcggctctaccctctacacccatctgctcaagtcccttgaggcccaaggcttcaagtctgtggtggctgttatcggcctcccgaacgatccatccgtgaggatgcatgaggctctcggctatgccccaaggggaatgctcagagctgctggcttcaagcacggcaactggcacgatgtgggcttttggcagctcgacttcagcctcccagttccgccaagaccagtgctcccagtgaccgagatctgatga

SEQ ID NO: 40 - DNA, 20 bp, Zea mays
  5prime gRNA
agatgcattgatctcgcgcg

SEQ ID NO: 41 - DNA, 20 bp, Zea mays
  3prime gRNA
atttgccaaagtattccggg

SEQ ID NO: 42 - DNA, 1000 bp, Zea mays
  Upstream flanking region
taacacaagtgtcgaataggaaattcacgagctgtcaaaaaccacatgaggtttgtttttgacccgcgaccgcgagcttgctaacgcaaggtttcagttctcgccgaaacgaaacaaaatgacggtgccgcgcttgcgctgtcatttttttgttttcgacggccaggctgaaactgtatggctgaggatgtcactgagcttcttgtttcctagtgaaaatggtagagagcagttacttgttcacgtgagagaagaaactaaagagaaaataaattagcctttctgcctttgtgactgttttgaacttttgatatatatatccagccttccgcatgctatatttgaatctcaataaacggtgctaggggggttttagcaaaagtacttcaatgttcaatactgtcttaatagacgtccttctctaacatcaaggagtacattgcgtacgggccctatttatttcggtttttggctgttagaatcggcttttggcagccaaatattttgtttttcagattgcttacatgagaatcgcgtctgtaaaaatcgtctaaatcaacgttaatataaaatcctaaattgtgcagagccctccacctttcttaacacacaacacaggtctcaggatattcaaatccatataagagctagattattcagtagtccagattccgaccaaaactctttaggatgctatcacaaacaaacatgtccatattctttcgtgattttaacgtatcgttttcgtgccctctaaccaaaacactcccaaacttgttttcgcttttcgaaaggaggctcgaaattatgaaactaaattttaggaataaagacacaattgcgacacaaaaataacctttttttacccaacttcacaccaccatatgtaggtcttcgtgctaccggatttgccaacacctataaaatttatgtcaggttgtcacggctttactattatcgcgtctaacttcaaacacatctggagatgcattgatctcgc

SEQ ID NO: 43 - DNA, 1000 bp, Zea mays
  Downstream flanking region
ggaatactttggcaaattctgctctgtccttgcaaccaagcataacatacaagtgaccgaaatagacaagcaaagtatatcagaacattgtcaaattgcaagttgcaacaaaactgaagcaaacacaatgtagaaaccattcggagcatcacaggggttggtagcaatctgagatacatgattaaaggaatggtttaatagtacatgcacaattaaatgtttctttttgtttccaagctaggctatgaattgtccacgatcaagctaaaaccccctacccactaaacaggagactgctaggcaggggcgaacagggagcattcctgcatgtaagcaaccagccaaccaaatcacagccatctatcatttcctcttcttagtaggtggttgggggacatcatcgtcatcatcctcttcctcttcttcctcctcatcttcctcattgtcaccatccccatcatcatcgtcgtcatcatcctcctcttcatcctctccaccatcatcatcgtcgtcacttcctccttcaccgttggctgcaggatcgttatcatcgtcgtcgtcatcttcctcctcattcccattgtcatctgatccctcatcaccaccatcatcttcttggttttcagcatcctcatcgtctccctcctcatcattatcatcatcagactctccatcatccttgttctcgaaatcagttgcatttttgtttttgctcagaatccttgtggagaaggaaacaaacaatcctcagctttgggagacgaaaaaaaatgcccatggcaataatgatgtggtacatgttttgacattatgcaccagtgggcattacctattaatcaaattctgatctccaccagatgtaaagatttcattatgaagaatctgcacaagaaagtcaaaacagtacacagtattagctaagacgaggtatatttccaattaaaagtgcacgaacaatgcaacaatggttattcccgggctttaaaggacataagacacg

SEQ ID NO: 44 - DNA, 17 bp, Zea mays
  5prime gRNA after cut
agatgcattgatctcgc

SEQ ID NO: 45 - DNA, 17 bp, Zea mays
  3prime gRNA after cut
ggaatactttggcaaat

SEQ ID NO: 46 - DNA, 5115 bp, Artificial Sequence
  Complete repair construct
taacacaagtgtcgaataggaaattcacgagctgtcaaaaaccacatgaggtttgtttttgacccgcgaccgcgagcttgctaacgcaaggtttcagttctcgccgaaacgaaacaaaatgacggtgccgcgcttgcgctgtcatttttttgttttcgacggccaggctgaaactgtatggctgaggatgtcactgagcttcttgtttcctagtgaaaatggtagagagcagttacttgttcacgtgagagaagaaactaaagagaaaataaattagcctttctgcctttgtgactgttttgaacttttgatatatatatccagccttccgcatgctatatttgaatctcaataaacggtgctaggggggttttagcaaaagtacttcaatgttcaatactgtcttaatagacgtccttctctaacatcaaggagtacattgcgtacgggccctatttatttcggtttttggctgttagaatcggcttttggcagccaaatattttgtttttcagattgcttacatgagaatcgcgtctgtaaaaatcgtctaaatcaacgttaatataaaatcctaaattgtgcagagccctccacctttcttaacacacaacacaggtctcaggatattcaaatccatataagagctagattattcagtagtccagattccgaccaaaactctttaggatgctatcacaaacaaacatgtccatattctttcgtgattttaacgtatcgttttcgtgccctctaaccaaaacactcccaaacttgttttcgcttttcgaaaggaggctcgaaattatgaaactaaattttaggaataaagacacaattgcgacacaaaaataacctttttttacccaacttcacaccaccatatgtaggtcttcgtgctaccggatttgccaacacctataaaatttatgtcaggttgtcacggctttactattatcgcgtctaacttcaaacacatctggagatgcattgatctcgcgcgcttgaaaatttagttattaggttggtaaaagactaggttaggtaagaaatttgaaaacaaaaatccatgggagatgtttttacgtagaagaatagtgagaatttgagaaactttatttcctaagaaacaaagaaagttttggtgaaataattgaaacgaaaaattcgagaaactagaagcccgataatgcccttctcctctaccaactaccagcgcagtcactcgcctctgcacacgtcgctgatgctcgtcttccttccttcccatcctttataaggcccggccgcggctctgctcgcctctcctcccttccctcccgtaccgtatcagtctcccggattctctccggttcgtgggagggccaaagcttcgagttaggaaaaccctaccgctgtgggagtagcctccggcgatgtcgggccaccgtatccccgccgccgcgcgcctcggcggcatcacctcccgccgccacgcggagctcctcctccacagcggcgttggcgacgtctccgtcaaggatctccgcctccgccgcgtcgtcccgcccgcctccggctccctcgactcctcccccgtgtgcgctgcgcccgtgaagcccggatctgtcgagagcacgccaccggaggccgcatcggccgtggcggtggccgaagacctcgaccggaagccggtgctcccgcggtccaagctcgtgcgcgaccccggctcgttcggctaccggcggctgctgcctttcctcaacgagatggctaagaacgacagctccatcggcagatctgactctccgttggttgatgcgcctttgggtgagattcgctgcgaatctgatgccatggattctgtagagccggtggtggcgaagactggaggagaccccgaggtgaaggatggctgcaacaatgtcaccgaagaggccaacactgtccctcatgaccttgcaagcagcaagccgtggcttgcccggtgcacgaggtcgagattttttcgtcatccgagctcgttcagctacaaaaggatgctgccatttctcatggagaatgaaatctcttctcaggaaggggaaagggtcaaaattcgaagagtcgcagatgaaaggatactagcgtcagatgagaatggcgtctcagccagtgggcagcagcatcttgtcgtctctgatgactcttctcaggaatgcaacagagctcaagttgacagaatggaggaagaagagacaccaaaagctgatgaaaatcatgttcttgatgacaggcagcctcaacctgctgttacaaaagcctctcctccagagtgcaatgcagcagaagggcaaaatgtcatgcagcaagaggctttgactacaagtcaagacccactaacttcttctgagggtgatttaacatcagatggggatgttgtccaggcaagtggtcatcatcatattgttgtatcagaggattctccagaggaatgccaaagagatgaagtcaaaagaagtgtacaagatgaagcagtaaaatccgattggagccatgttctggatagcagagaatttcagcctgctgtatcagaagtctttccttcgaagaacagcgtggctgaagtgcaaaaggccacacaagaagaatcattaccttcagatggagatgaggaaaattcaaacaagggtgaccatcttgccaaagagcagcctcagccctgtgtcacaaaggagtccttgactgcacaaccgcatgatagtgctgaaatcactgaagtaccgcagtgccaaaacaaagacgcaggatctcatgatgctggttttgttagccctaccaagactgtgataccattgttgcatcggcattgtgcacagcctgaggattctgtaacttctgttgatgatcagcttcgtgacagtgatgtacaaatgatctgcaggccttctgatccttgtgctgttgacagatcattgtcagtagaggaaatgtctggatgtattccgctcactgaatcaggatgcaaagcaggcatatcccggccaagaggtctccattctacggaaaaaagaggtttttctcctaagaagctttctccaaagaaaggaatacttaagaggcacactagggggtgcaagggcatctgcatgtgcttagactgctgtacgtttcgtctacgtgctgaccgagcttttgagttctctaggaagcagatgcaagaagcagatgatataatatgtaacttattgaaggaggtagcaagccttaggagtctggtggagaagcctgctggccaacaggagtcgacacaagcagcttgcaaacgggcttctcaggtggaagaggtggccagagaacgttgccagcagatgttcgtggatctaaactcccactgcaggatccctggaccgagggtaagattcgcccaatatgttgaggaaaagaaggccttgccatctcctcgtgaaaagaaggcctcgccgtcccctcgcagcagcagctggaggtgagccagcgagagacgcaggataaaggccgtagttttgcaaggcgagtagagcagtatgtcagtaatacagcatctatggcatgtgcttttgctcgtccagttcatgagccccgttgtgtatttggtttccgttttcttggttggagtttttagttccaaggtccgatcatgttttgatcccataaattctcttccagccttcgagcaactgagtccatcttcctaagtcatcagccccagcgagacattgaagcatggggaaacttaaacagtatggtgatgattaatctcagcattttttttcttgcagcaatcaatatggactttgcttaaaatttcgttgtcttttcaaaacgatatgcaagcaaaatggaagtgatgttctttgaaactttgtttcaatgctatagcaaaggtttgcattttacaaagttcggtttagtgacgaccatttagatgacatagattatgcttttcgtattttggtagcttctcgtgcggacgcgcggtcatgcctagcatgccgaagaccttgtcatatagtgaaaggaattgcggtagcaattagttcatttttccctaatcccctccaatcactttctcaccaaacaaactccaaaggtcgtcaccgaagggggacgttcccggaatactttggcaaattctgctctgtccttgcaaccaagcataacatacaagtgaccgaaatagacaagcaaagtatatcagaacattgtcaaattgcaagttgcaacaaaactgaagcaaacacaatgtagaaaccattcggagcatcacaggggttggtagcaatctgagatacatgattaaaggaatggtttaatagtacatgcacaattaaatgtttctttttgtttccaagctaggctatgaattgtccacgatcaagctaaaaccccctacccactaaacaggagactgctaggcaggggcgaacagggagcattcctgcatgtaagcaaccagccaaccaaatcacagccatctatcatttcctcttcttagtaggtggttgggggacatcatcgtcatcatcctcttcctcttcttcctcctcatcttcctcattgtcaccatccccatcatcatcgtcgtcatcatcctcctcttcatcctctccaccatcatcatcgtcgtcacttcctccttcaccgttggctgcaggatcgttatcatcgtcgtcgtcatcttcctcctcattcccattgtcatctgatccctcatcaccaccatcatcttcttggttttcagcatcctcatcgtctccctcctcatcattatcatcatcagactctccatcatccttgttctcgaaatcagttgcatttttgtttttgctcagaatccttgtggagaaggaaacaaacaatcctcagctttgggagacgaaaaaaaatgcccatggcaataatgatgtggtacatgttttgacattatgcaccagtgggcattacctattaatcaaattctgatctccaccagatgtaaagatttcattatgaagaatctgcacaagaaagtcaaaacagtacacagtattagctaagacgaggtatatttccaattaaaagtgcacgaacaatgcaacaatggttattcccgggctttaaaggacataagacacg

SEQ ID NO: 47 - DNA, 2055 bp, Setaria italica
  Cloned gene CDS
atgtcgggccaccgtatccccgccgccgcgcgcctcggcggcatcacctcccgccgccacgcggagctcctcctccacagcggcgttggcgacgtctccgtcaaggatctccgcctccgccgcgtcgtcccgcccgcctccggctccctcgactcctcccccgtgtgcgctgcgcccgtgaagcccggatctgtcgagagcacgccaccggaggccgcatcggccgtggcggtggccgaagacctcgaccggaagccggtgctcccgcggtccaagctcgtgcgcgaccccggctcgttcggctaccggcggctgctgcctttcctcaacgagatggctaagaacgacagctccatcggcagatctgactctccgttggttgatgcgcctttgggtgagattcgctgcgaatctgatgccatggattctgtagagccggtggtggcgaagactggaggagaccccgaggtgaaggatggctgcaacaatgtcaccgaagaggccaacactgtccctcatgaccttgcaagcagcaagccgtggcttgcccggtgcacgaggtcgagattttttcgtcatccgagctcgttcagctacaaaaggatgctgccatttctcatggagaatgaaatctcttctcaggaaggggaaagggtcaaaattcgaagagtcgcagatgaaaggatactagcgtcagatgagaatggcgtctcagccagtgggcagcagcatcttgtcgtctctgatgactcttctcaggaatgcaacagagctcaagttgacagaatggaggaagaagagacaccaaaagctgatgaaaatcatgttcttgatgacaggcagcctcaacctgctgttacaaaagcctctcctccagagtgcaatgcagcagaagggcaaaatgtcatgcagcaagaggctttgactacaagtcaagacccactaacttcttctgagggtgatttaacatcagatggggatgttgtccaggcaagtggtcatcatcatattgttgtatcagaggattctccagaggaatgccaaagagatgaagtcaaaagaagtgtacaagatgaagcagtaaaatccgattggagccatgttctggatagcagagaatttcagcctgctgtatcagaagtctttccttcgaagaacagcgtggctgaagtgcaaaaggccacacaagaagaatcattaccttcagatggagatgaggaaaattcaaacaagggtgaccatcttgccaaagagcagcctcagccctgtgtcacaaaggagtccttgactgcacaaccgcatgatagtgctgaaatcactgaagtaccgcagtgccaaaacaaagacgcaggatctcatgatgctggttttgttagccctaccaagactgtgataccattgttgcatcggcattgtgcacagcctgaggattctgtaacttctgttgatgatcagcttcgtgacagtgatgtacaaatgatctgcaggccttctgatccttgtgctgttgacagatcattgtcagtagaggaaatgtctggatgtattccgctcactgaatcaggatgcaaagcaggcatatcccggccaagaggtctccattctacggaaaaaagaggtttttctcctaagaagctttctccaaagaaaggaatacttaagaggcacactagggggtgcaagggcatctgcatgtgcttagactgctgtacgtttcgtctacgtgctgaccgagcttttgagttctctaggaagcagatgcaagaagcagatgatataatatgtaacttattgaaggaggtagcaagccttaggagtctggtggagaagcctgctggccaacaggagtcgacacaagcagcttgcaaacgggcttctcaggtggaagaggtggccagagaacgttgccagcagatgttcgtggatctaaactcccactgcaggatccctggaccgagggtaagattcgcccaatatgttgaggaaaagaaggccttgccatctcctcgtgaaaagaaggcctcgccgtcccctcgcagcagcagctggaggtga

SEQ ID NO: 48 - DNA, 415 bp, Zea mays
  5 UTR
gcgcttgaaaatttagttattaggttggtaaaagactaggttaggtaagaaatttgaaaacaaaaatccatgggagatgtttttacgtagaagaatagtgagaatttgagaaactttatttcctaagaaacaaagaaagttttggtgaaataattgaaacgaaaaattcgagaaactagaagcccgataatgcccttctcctctaccaactaccagcgcagtcactcgcctctgcacacgtcgctgatgctcgtcttccttccttcccatcctttataaggcccggccgcggctctgctcgcctctcctcccttccctcccgtaccgtatcagtctcccggattctctccggttcgtgggagggccaaagcttcgagttaggaaaaccctaccgctgtgggagtagcctccggcg

SEQ ID NO: 49 - DNA, 645 bp, Zea mays
  3 UTR
gccagcgagagacgcaggataaaggccgtagttttgcaaggcgagtagagcagtatgtcagtaatacagcatctatggcatgtgcttttgctcgtccagttcatgagccccgttgtgtatttggtttccgttttcttggttggagtttttagttccaaggtccgatcatgttttgatcccataaattctcttccagccttcgagcaactgagtccatcttcctaagtcatcagccccagcgagacattgaagcatggggaaacttaaacagtatggtgatgattaatctcagcattttttttcttgcagcaatcaatatggactttgcttaaaatttcgttgtcttttcaaaacgatatgcaagcaaaatggaagtgatgttctttgaaactttgtttcaatgctatagcaaaggtttgcattttacaaagttcggtttagtgacgaccatttagatgacatagattatgcttttcgtattttggtagcttctcgtgcggacgcgcggtcatgcctagcatgccgaagaccttgtcatatagtgaaaggaattgcggtagcaattagttcatttttccctaatcccctccaatcactttctcaccaaacaaactccaaaggtcgtcaccgaagggggacgttccc

SEQ ID NO: 50 - DNA, 2148 bp, Arachis hypogaea
aaacactctcattcagacaaaaaaagggcaagaaagtggataatagaaacagaatagaaaagaatagaatgtatgtgtgaagtgtgaaccgaacaacaagaattgagagtctcattgtttcataaacggtttccattttctttttctgttagctgttactgtttttggtgttgcatactgtgcgagtcaaatgtaggttacttacttagatctgagtgagaatccggtttgttattttgttttttgggaggaatggggagcgtttcttctgaagatggttccgaccagcaaagtgaccgttgcggcagttacagtctcagtgctgacgtcagcgagtccgaaagctgcagcagcttctgtggacgtcgttttgatgccgacggtggagcttccagctccgccaacttgtctccgcgtcctgtcggtggagctgctgttcccgccggcggtcactttcactttccgtcgcaggtcatgcttcccgtcataggaggaaaagacgtggtggtttgggatcacaagccagagaaaagagaccttgatttgtcagaagtggaaatgatgaaggagaggtttgctaaattgcttcttggagaggacatgtctggtggaggaaaaggagtatgcacggcccttgcaatctctaatgcaataaccaatctctctgcaactgtgtttggcgagttatggaggttagaaccgctggcacctcagaagaaggccatgtggcgtagggaaatggagtggcttctatgtgtgagtgattccattgtggagcttgtgccttctgtgcagcagttccccggtggcggaacgtatgaggtcatggcgacgcggcctcgatccgatttgtacatcaatctaccggctctgaagaagctagatggaatgctgcttggtatgcttgatggatttcaggatacaaagttttggtatgttgataggggaatactattgggtgattccaaggaatgtgatgatgcatattcgcccggaaggggtaggacttctgttaggcaagaggagaaatggtggcttccatctcctaagcttccaccaaatggattgtgcgaggatgataggaaaaggctgcagcagtgcagggattgtacaaatcagatattaaaggctgccatggcaatcaacagttccgttcttgctgaaatggaaattcctggtgcatatattgaatcattaccaaagaatggaaaagcttgtctgggggagataatctatagatacattactgctgatcaattctcgcctgaatgtctccttgattgcctggatctatcttcggagcatcacactctggatgtagctaatagaattgaggctgccgttcatgtatggaggttgaaggaccacaaaaaacatctaaatacagttaaagccagacgctcctggggtggaaaggtgaagggccttgttgctgatggtggtggtgataagaaccattctttagcccaacgagctgatacccttctgcaaagcttgaaacacagatttccggggctccctcaaactgcgctagacatggccaagatacaatataataaggatgtaggacagtctattcttgagagttattccagggtcatggaaagcttggcgttcaacataatggcaaggattgatgatgtcctttatgttgatgattccataaagcgatgcgcagccgcagagtctatctctcttttcaaccggggaggtttcggtggtcttccaatccagaaaagaatgactccaagtcccttctcaattcaacacaccccatatgcctctcctccatttgcaaccccatcattttgttcatcctcacccattaccggtagcccttgcagtccaagaaggatgcatactgcgaagaggaatggaccaaaggacacaacagattctactaagtccgaaaaggcagcctcggccgaatttgagagggtctggtcatacacagggaaccttagtgcaagaagaatgtctagtgatgctccagaaagagactgagttaaaaaatcaactgtctttaaaaactggatctggctaaaggctttaggtcccattcccttgtatatgagggtctaatttttgtatattcttagttcttaggtagtatttgtaggattatgatggatcatattattatgccaa

SEQ ID NO: 51 - DNA, 2122 bp, Hordeum vulgare
ctctcctctacctccccgtccctcagccaagccagatcggccagcaggcgcttcccggagtagcggcgttgcatgcccgttgtttagtcgacggctacctgcctccggtttgaatactccgcggggcggactgccagcccaagagcagcgcagcgcagagcgaggacgggcgtgtaaacaggcgaacgggtgaggaggctcctggtttcgtggtttgacgggagaaggaagagagagagagagatggccgggggtttcgccggcgtcgaggccggcgccgggagggcggagcagtacgaggggaggatcacgccctacttcatcctcgcctgcatcgtcggctccttcggcggctccctcttcggctacgacctcggggtatccagtggtgtgacctccatggacgacttcttgatcaagttcttccccgacgtgtacaaccggaagcacgcgcacctgcacgagacggactactgcaagtacgacaaccaggtgctgacgctcttcacgtcgtcgctctacttcgccggcctggtgtccaccttcggggcctcctacgtgaccaagcgccacggccggcgcggcagcatcatggtgggcgccgtcagcttcttcctgggcggcgccgtgaacgcggccgcgatgaacgtggccatgctcatcgtcggccgcgtcctcctgggcatcggcatcggcttcggcaaccaggcggtgccgctctacctgtcggagatcgcgccctgcaagatccgcggcgccgtgaaccagctcttccagctcaccacctgcctcggcatcctggtggccaacgtcatcaactacttcaccgaccggatccacccgtgggggtggcgcctctcgctgggcctcgccatgggccccgccaccgccatcttcgtgggcgcgctcttcctgccggagacgcccaacagcctggtggagcgcgggcggctggacgaggcccggcgcgtgctggagaaggtgcgcgggacgcacaaggtggacgccgagttcgaggacctcaaggaggcgagcgaggcggcgcgggcggtgcgcggcacgttccggaacctgctggccgtgcgtaaccggccgcagctgatcctgggcgcgctgggcatcccggcgttccagcagctgtcggggatgaactccatcctcttctactcgccggtgatcttccagagcctggggttcgggtcctcggcggcgctctactcgtccatcatcaccgggtcgatgctggtggtgggcgcgctggtgtccatggtggtggtggaccggctggggcggcgggtgctgttcatggaggccggggtgcagatgatcgtgtcgatggtggtggtggcgacgatcctggcgctcaagttcgggcacggggaggagctgtccaagggcgtgagcacggtgctagtggtggccatctgcatgttcgtggtggcgtacgggtggtcgtgggggccgctggggtggctggtgcccagcgagctcttcccgctggagatgcggtcggcggggcagagcgtggtggtgtgcgtcaacctcttctggacggccgccgtggcgcagtgcttcctggcggccatgtgccacctccggtggggggtcttcatcctcttcgccgcgctcatagtcgtcatgtccatcttcgtcatcctcctgctgccggagaccaagcaggtgcccatcgaggagatatggctgctcttcgacaagcactggtactggaagcggatcgtcaccaaggacccaaagtaccagggacaccaccaacgccaggaaatcgccgccgccgccgccgtcaagcccgtcgccacatcagaatcagatgcttaaatattagacgtcgatccatgaagatgatgcgtgttttaataagattacaatgcatgggttcataggtgtgtgtgtgtgtgtgttcttgtccaagactcggtgttcttagttcttacgagttcaattaggattcgatctgtcagaaggtgtaattggtggcacggggtatgagatgcaaaagcacggaagtttatgtgcgtgtgtgacattacgttgtgctctcgctatgatgatgtactgacactgtgtgtgttggggcatttttctctaatctcgatcggaatgt

SEQ ID NO: 52 - DNA, 1018 bp, Phaseolus vulgaris
aaaatttgtggacattagccatacaatttcattcacattttatcctttgctcagtagcgttatcctttgctcagtagccatggctgcagctaccatcacatgcaagctttcactgcttctgagtctcttctcagtttggtttctgggtgtaacttctgcttcacttcccccttcttgccagcgcatagaatgtcccagctatgatctcatacaactgggaaatggctacgaaatccgccgctataattcatccgtttggattgccaacacccccattcaagacatttctcttgttgaagccacaagaactggcttcagaaggctatttgattatattcagggtaagaacaacctcaagcagaaaattgagatgacagcacctgtgatctctgaagtattacccagtgatggacctttctgtgagtcctcatttgttgtgggcttctatgtgccgaaagtgaaccaagcaaacccgcctacgcctactgaaaaggaccttaagattaaaagatggaagactgtgcatgtagcagttagacaatttggtggatttgtcaaagatactagtgttggggaggaagctgcagccttgcaggctagtattgctggaaccaagtggggtgctgcagttgagaagagcaagagagccggttattctgtttacactgttgcacagtacaatgccccttttgaatatgataatagggtgaatgagatatggttcttctttgacattgaagatgcacttcgaagcatgtgaaaatatataccagacaaataagctctcaacatgaaatcaatatgcagagtgcagactgagctgtcaggacatcttgaatggatgaataaagtgtttcacatttagctaaaacactgttttctgattgacttgcttttagtttcatgatagctataacacttgaaaacttttcatcatgaattgatgtggctgttgaaatgagcatgtggtacttatatatttttcctttgtttgaaatacatctgcactcaaaccaag

SEQ ID NO: 53 - DNA, 1129 bp, Brachypodium distachyon
acgtcccaacgccacagctgcacgcctgcactagcttaagtggaggcacaacctttgacgacgattcgatttcgatcgagatggagagcgactgccagttcttgctggcgccgcccatgtacggcgacggccagtttctgcagcagcagctgatgggcggctcaggggagatcaggaagcggcggttcacggacgagcaggtgcggtcgctggagagcacgttccactcgcggcgggccaagctggagccccgggagaaggcggagctggcgcgggagctggggctgcagccgcggcaggtggccatctggttccagaacaagcgcgcccggtggaggtccaagcagctggagcacgactttgccgacctgcgcgcccactacgacgacctccacgcccgcgtcgagtcgctcaagcaagagaagctcaccctcgccgcgcaattggaagagctgaaggagaagctgagcgagcggcaagaccagagcggtagcagtgacgacggcgccgagcacgaggtggatcacgacaaggacgtcagggacaacaaagttagctgcgtcgtggaggaggaggaggccgaaggcgcggcgccggtggtggacgtcgtctcggatgaatcggccgtgggctggtacgagtacgaacgcctggcgtacgggggtggtgctgcggctgccctccccgagccgttctgcgccaccccggagctgtgggagacgacatggccgctggtggagtggaacgcggtcgcatgaatcaaccactgctagctcgatctgtgtatgtacgtacgttgggtgaaggtcgatgttgttgctagctcgtccagggagttgatcaacagagatcgattaccgatggggtcaaattaggtagaaccacagagcagagaactagggatgcatgcaactgggacggtgaaatctacatgctctgcacgagagaaatcaatccgacagtcggctgcgtcgactctgggatcgattcatgtccgtgaaaatgtcttgagagccagatcgatccggtccaacgtctgcgtgtcgctcatgtggttcccatatattggcgccgctaccgacggaaaaactactgttgccgatcaaaaaaaaataatgtttttttccta

SEQ ID NO: 54 - DNA, 1641 bp, Gossypium hirsutum
gggtttttaatttttcagttttcggatgaagatgaatcgagttgtggttttattattgttattatggtttctctgtttctcgagtgttttctggatgacgtctgccagtgtggttttgattggtaacaacgttaccctctctttcgatgatattgaagctaattttgctccggcaattaaagggtcaggggaatgcggagtattatatttggcaaatcctcttgatgcctgttcagacttgagtattaaagttgatgaactttcaaatggttcgtccccatttgcattggttattcgaggagggtgtagttttgaagagaaagtaaggagagtgcaaaaggcaggatttgaagccgctattgtctatgacaatgatgatgatggtgtcttggttgcaatggcagggaatgcagctggcattaagatacatgctgtctttgtttccaaagcttctggtgaaatactcaaaaagtttgctgggtctactgatatggaactgtggctaatccctagctttgaaaactcagcatggtcgatcatggcgatctcctttatttctctacttgccatgtcagcagtgctggcaacttgtttctttgtacgtagacatcgcattaggcgagaactcccacagtcttctcgagttcgtgaattccatggaatgagccggcgtttagtaaaagcaatgcctagcttgatattcactgctgtcttggaagataattgtacttcaataacctgtgcgatatgtcttgaagattatactgtgggtgagaagctcaggattcttccatgtcgccacaagtttcatgctttttgtgttgattcctggcttacaacttggagaactttttgccctgtttgtaagcgtgatgcaagaactagcacaggtgatccacctgcatcagaaagtacaccattgctttcatccaccctgagcaccatgtcctcctctgcattgtcatctgttcgatcttcattagcatcatcatcagccatacaaattgccccagcattgtcacggtctccatcaattgctcatactctttctcttgccagcaatccatatattcagcaatcacttaggtcctatcgtcaatctcctatgagcttcagccgaagctcggtagaccttaggaacgcatcttctcaaagatctcgtgcttctcatctggtttcgccggcatcattgaattacccttctatatcgcctcttaatgcaagatacatctccccatatttcccaagcccaagcaacgcatcaccaagtatagtcagttcttcgggtcacctactgcatccgctgcattatagcgagtctgctactagtttttctccttttgcatctgctcaatctcttccagactgttaattagatgagtgataacaaggtgagtttcatggagtcataggttgtgatagcattattgagttccttcggatgtgattgtgtagaatgttaacatgctgctgctaccagatgtgtacattgtaacataagattcgtgtgagttactttgattccccaaatgaaattgtggcttttacataaatgaggtcaatgtgtgtaacgtgaatagagggattatttgtacagtgtttctgcggtcccttactactaaatgcttaaagcctaatcct

SEQ ID NO: 55 - DNA, 1419 bp, Gossypium hirsutum
tgtttttttttcctccaaagctcaaaaatctctctaacccttttctcctgcactctcactgttgaatttcccggtggtggcttgttgtaacttgacttgctttttgttgtttttatggagttttagcaactctctgtcaaataacattgttaatttatatattctttcaaagcaaagatgggagaaatgtcaagcttccaattgggagttataggggccctgtttctttctgttgcatcatctgtctctattgtcatatgcaacaaagctttgatgagcaatcttggcttcccctttgctaccacactcactagttggcatctcatggtaacattttgcacccttcatgctgcccaaagattcaatctgtttgagaataaatcaattgacatcaagactgtgatgctttttggcatcctcaatggtgtttctattggatttcttaacttgagccttggatttaactccattggtttctatcagatgaccaaacttgcaattataccattcactgtattattggaaactgtcttcctcaaaaagcaattcagtcaaaagataaagctatccctcttccttttgcttgttggagttggcattgcctccattactgatctccaactcaattttgttgggacaatcctttctctccttgccattgcaaccacctgtgttggccaaattctgacaaacaccatacaaaagaggctcaatgtgtcttcaacccagcttctgtaccaatcagctccatttcaagcagctattctttttgtgtcaggccctttggtagatcagttcctcaccaatcaaaatgtgtttgcttacaaatattcccctatagtcctggcatttatcgtactctcctgtattatttctgtatctgtcaactttagtacgtttctggttattggaaaaacatccccagttacatatcaagtacttggtcacctcaagacttgcctggttcttgccttcggctatacactgctgcatgacccttttacagacaggaacatccttggaatcctgatagccatttttggcatgggtttatattcatatttttgcacccaagagaacaaaaagaaacaagctgatccattggagtgtcagatgaaagataaggaagacaaaccatttctggctcacgagaaagaaggccatgaagttaaaagttcagacaagaattccattgtctaaagcaaaacaggattttgttataaagattttgtctattaagttaaggtgttgtttcaaacgttttgtaccttccagcacaaatgactttgattctttaaataaactgaaacgatactggtttgtagctgttctaaaaagttgtttcactttagtagcagttgtttcgatagttcagtaatgcaaattttactagtaaaagcacaataagatcaaaattgc

SEQ ID NO: 56 - DNA, 2949 bp, Setaria italica
tcgcacgcggtacaagccggcggtggcggcggaaacccaaccccccctcataaaccctaaaccgcctcattccccacccaatttcgccatggacgcggaggaggcctcgccgccgccgcagcccccgccgtgggcgcagaacaagtcggccgcggccatagattcctcgtcggcccctctcgccgccgcggccgcccgcctctcggcccgctcccgcgcgctcccctcgtcccgcgacttccacttctacaacaacttcccggccttcaaatcccccgtcggcgccgcggcagccaaggccgacgcctccctcggcgtgctgggcgcggccccgctcctcccggcgcggcagcagccgttcccggggggcggcgacctcgacgacgcgcacgactggctcgtcgccctcaacgacgacctgctcgagcggttcggcgcctccgtggacgagttcaaggcgctgagggagaaggaggaggcgtcagggcggagggcggcctcggaggccggggacggggacgggttccaggtggtgtatgggaagaagaagaagaaggtgggcgatggggaggaaggcgttgaaagagcggaggccttcggggcctccagctcagtgaagatggccaaggacaaggcggctgcgccggggatgaaggcgaaggtgcccttccacatccgcaccatcccgcggccgcagggggtgtaccgcattgtggtggacaactcgaccaagccttttgagcatgctttgcttgagcggagcgaggatggcacccgacccgtgcacccattggaaaaactcccaattgaacaactaatcaacagaaatgttcctgatagtgagcctgtaaagccacctgctttagatgataccccttttacatttgttgaagacctgaaaaccttggaggtgctagccacaaagctgaagaatgcaactgagtttgctgttgatctggaacacaaccattataggacatttcagggtctgacatgcttgatgcagatttcaacaagaacagaggactttattgtggacactcttaagcttcgtagatatcttggtgattacttgagagaatttttcagagatccaaccaagagaaaggtaatgcatggcgcaggtcgtgatataatatggcttcaacgagacttcagcatatatgtgtgcaacctttttgacacaggccaggcttcaaaggtcttacagatggaccgcaacagcctggagcatcttttgcaccatttctgtggagtgaccgcaaataaagagtaccaggctgcagattggaggttgagaccccttcctgatgaaatgatcaaatatgctagagaagatacacactatctgttatatatatatgacctgatgagattgagactagtgaaggagtcatcagctgacagtgatatgcttttagaggtttgcaagcgcagcaatgaaatttgcttgcaactatatgagaaggagcagctgactgattcatcgtatctacatttacatggattgaaagaaaatgagctggatgcaagacagctgtcagttctttctagtctatatcgatggagagatggcattgcccgtgctgaggatgagagcactggctatatattaccgaataagagtctacttgagatagcaaaggaaatgcctgtgacaagtgggaagttaaaaagaattgttaaatcaaaaaactttgagcgccatctcagcactgtcattaacactataagggatgccatatcagcttctggtgcttttgagagtgtagcggaacaactaaagaagggaaagctggaagagttaacaatggcaaatgtgaagaacagcagtgaagacactgaaatgatccctgctgttgatgttgataacaatgaagatccgagtgatgaatctgctgtagtttccacagtgattacaaatgttggtactgcttctccctgtatgggaactgttacaagcgaagcttcattcggtaatatgcatttagaggacttcacaccagaaaagaactcggggacttcgtcagggtttactggactggcagataaggaaatattgagcaatggccagcagcaagtagcaaaggccactgttcaagtatcgaagaggactacagcctttggtgctctgtttggaaaaccagctgctggaagaaggccgaatcttttcccagggctttcaagtgatcagggtaagagtaaggtggacaagataacgtcttctgtggtacttcctttccataacttctctggcagtgtgaaacctccatcaggtagcattccattgaaagaacaagtgcattctgaaccagaaagcgtccaacacagtgatccagcctgtcaaatggaagacgtgatacagttggacactgaaacagatgatccgcaaccaccagaaagtcgtaatgatgatgagcatcaggaacccaaagtcatggaaatgtccaagtccccttcagatgccccctctgatactgagcaacggttccggtcactcaatgaagagagaaacgttcatcagaatcaaaagatacctcaagaacctgaattcagattcccagtggtgccttttgattatgccgaagccagagagaatcttgtgtgtggcgagcctaaagctgagacaaaaaaagacaatgcagttgccaggcccataaatacggattccggagataagcggcgaacttcgaacaaaccaggtgctggagaggaggggaatttccagcatccacgaagacggcaggctttcccaccttctggcaatagaaattttacttatcactaatagtcaagatgtataactgatcaactgtgatgttccaagattataggtaaaagagttaagacaaagggaacacacattgtatgtgggaatattgtgggggtagagacaattcttgaacttccattcacgagaagaggctgctcttgcgttgtactccctcc

SEQ ID NO: 57 - DNA, 1866 bp, Setaria italica
gccgtgcctgggggatggatggattgctctgccacgatgcccacctccaccactgaagagagggaggaggaggccacggtgggaggcggaaggcacgcgcacccatcgagtgcgcacgccacctcattcattcggctcccgcgcccgcatcggcccatccatcactgcgctcgccactgctgccgcacgccgctccaccttccttgccctcttccccttctctctctctgtatcactcaaaagaagtgcctgccccaagcaaaaggaacacaccgagcgacagggcagaggcaatcgggagcacgactgcacgagcatccatccgatccaccaccaccggcctggcctctgctcgcccgttgtataagaccaaaccctgtgcccttcccctcctctgccacccccaatacgtttccatcccgctgttctcgacctccatcggtgctgtcgtttcaattcggattgtctgtcctgccttgactggatttcagccggacgccaaggaggccaagggagcaggcagcatgccgttcctcgtgttcttccgcgccaacctgtgatctcgcgttgcaagtttgctaggccagcagcgccctgtcgccaacaacacatcgccacacctcggcaattcaggcgccggccatcagtccccacttcactctccttcaaacaaaacctcaaacccgaaccaggctttactgaaacaattttgaattcaaccacaaaaaaagccagctcccaagtcctgtcaacaaaacaaaattccctcgaattccttgctcaatttcattccaatcaaaagcctgcctagaatcttgctagatttcccacacagacaaccagaaaccaagcagcccgatgcagggagaccccgggtatggtggctacggctacggctatggctacggcgccggcggctacgacaacgacatggccggctacggcgcgtactacacggcaaacgaccggtatcccgccgcgccggccgcctacgaggacccgctcgccggtcggaggcagcacgacttcccggcgccgctcacggggctggagttccaggcgtcggacacctgccccaagaactacgtcatcttcgaccagacgtacgaccggagccgggtcatgttccacccctcccttgccaacaacttcggcggcgggtacgactacgaccaccgctgctacggctacgatcaggcctacgccagcaagaccgcctacgacgaggacgccggcggcggcgccgcctcggttcggcagaaggaggacacggaggagatcgacgcgctgatgagcacggaggacggcgaggacgaggacgacgtgctgagcacgggccgcaccccggggtgccgcgccgggggctcgccggactccacgtgctcgtccgggtacggcggcggcgggaggaagcaggagaccggcggcgagaagaagaaggagcggatgaagaagatggtgcggacgctcaaggggatcatccccggcggcgaccggatggacacgccggcggtgctggacgaggccgtcaggtatctcaagtccctcaaggtggaggtgaagaagctcggcgcgcgcgggtcgagcagttagcagctaccccgctgacaggcatatcggtgaatctgaccggcatcctcctcggacggagttcttttgtaaacgatggtggctctatgttgtttatccattccatgcatcaggctgcattagtacgcgacaacgagaattcagagttgagataggacaaggaaggttcagaacatgcaatcagatgttcccaatgcgacttttgagtgtcgatttattcatgcgggcaatcttcttacaagaaaaatcttcttacaagaaacaagtaggggtgta

SEQ ID NO: 58 - DNA, 1881 bp, Setaria italica
tcatcagcaggggacacacgaacagtaggtcgaacagcatgccggattagtactaaaatgatggaagcatgggtctgtgggggcgcgcgtttcgaggcaattatactactactatgtactgctggtgctgaccctctcgttcgagctgatgacgatcgataagctcagctgcacctgcacctgcaccaaccacaccacacatggaggctggagccatggagggagtgagactggcgatgcctcttcttctcgcagcttcttccagctgaagcctgaagatgggggctggagagcaacgagacaagctcgtcggtgtgcgcgcatagagacagctctagaagagaagggaaaaccacggcagaagcagccacattccgatcctaacctcttctgatcctaatacaaaattcagggcagcaggcgcgcctccaaaagagatccacccggatagatggatccccacggcagctcaatcattgcctcgtttgtttccttcctcttcctcctcgtcgtctcctcctccgccgtcatcccggcgtcggctggagctggaggcagcagcagcaatggcacggcggtgccgttccggtcggccgacgagctgctccggttccagaggatcaaggcccagctcgccaggaccagggatgcctccgtcaagacgatccagagccctgatggcgacgtcatcgactgcgtgccgacgcacctgcagcccgcgttcgagcatcccaagctgcgggggcacaagccagagaaagagcctgcggagaggccgaggagcagtgggcgtgccgatgctgatggcgatcaagacgacgaggaggccttgccgcaggcgtggcggcgctccggtgagtcgtgcccggaggggacgataccggtgcggcggaccacggaggccgacatgctccgggccagctcggtcagccggttcgggatgaaggcccggggtggcggcttcacgcggcgcgactccactgccggaggccatgagcacgcggtggggtacgtgtcgggtggccagttctacggcgccaaggcgagcctgaacgtgtggccggcgcaggtggcgtcgccggcggagttcagcctctcgcagatctgggtcatctccggcgccttcggcaacgacctcaacaccatcgaggccggctggcaggtaagccctcagctgtacggtgacaacaacccaaggttcttcacgtactggacagacgacgcgtaccaggagacgggctgctacaacctgcactgctcggggttcgtgcagacaagcagccgcgtggccataggtgccgccatctcgcccatctcgtcctccggcggccgccagttcgacatcacgctgctcatctggaaggacccgcggcggggccactggtggctgcagctcggctccggcgcgctcgtcggctactggccctcctcgctgttcacgcacctgggcacccgcgccggcatggtgcagttcggcggcgaggtcgtcaacgcgcggccggccggcgcgccgcacacggccacgcagatgggctccgggcgcttccccggggaggggtacgcgcgcgccgcctacttccgcagcgtgcaggtcgtcgactgggacaacagcctcgtgcccgccgccgggctccggctcctcgccgaccggccggggtgctacgacatcgccggcggcagcggcggcgcgtggggcacctacttctactatggcgggcccgggaggaacgcacggtgcccgtaggtagctaggaacggaacgggatgggtgcggtgtttctttacgtgcgcatcactgatcaagcacaaagcaaatatatatatggcaaattaaagctttgattttttttttccatcttcgtgtccctccgtacatgaata

SEQ ID NO: 59 - DNA, 2407 bp, Setaria italica
ctctcctctccctccgtctcacaaccccacccagacgcggacacccgaggcgcgcgcgcgcgtgcggaggcagacaccatgtcgggccaccgtatccccgccgccgcgcgcctcggcggcatcacctcccgccgccacgcggagctcctcctccacagcggcgttggcgacgtctccgtcaaggatctccgcctccgccgcgtcgtcccgcccgcctccggctccctcgactcctcccccgtgtgcgctgcgcccgtgaagcccggatctgtcgagagcacgccaccggaggccgcatcggccgtggcggtggctgaagacctcgaccggaagccggtgctcccgcggtccaagctcgtgcgcgaccccggctcgttcggctaccggcggctgctgcctttcctcaacgagatggctaagaacgacagctccatcggcagatctgactctccgttggttgatgcgcctttgggtgagattcgctgcgaatctgatgccatggattctgtagagccggtggtggcgaagactggaggagaccccgaggtgaaggatggctgcaacaatgtcaccgaagaggccaacactgtccctcatgaccttgcaagcagcaagccgtggcttgcccggtgcacgaggtcgagatttgttcgtcatccgagctcgttcagctacaaaaggatgctgccatttctcatggagaatgaaatctcttctcaggaaggggaaagggtcaaaattcgaagagtcgcagatgaaaggatactagcgtcagatgagaatggcgtctcagccagtgggcagcagcatcttgccgtctctgatgactcttctcaggaatgcaacagagctcaagttgacagaatggaggaagaagagacaccaaaagctgatgaaaatcatgttcttgatgacaggcagcctcaacctgctgttacaaaagcctctcctccagagtgcaatgcagcagaagggcaaaatgtcatgcagcaagaggctttgactacaagtcaagacccactaacttcttctgagggtgatttaacatcagatggggatgttgtccaggcaagtggtcatcatcatattgttgtatcagaggattctccagaggaatgccaaagagatgaagtcaaaagaagtgtacaagatgaagcagtaaaatccgattggagccatgttctggatagcagagaatttcagcctgctgtatcagaagtctttccttcgaagaacagcgtggctgaagtgcaaaaggccacacaagaagaatcattaccttcagatggagatgaggaaaattcaaacaagggtgaccatcttgccaaagagcagcctcagccctgtgtcacaaaggagtccttgactgcacaaccgcatgatagtgctgaaatcactgaagtaccgcagtgccaaaacaaagacgcaggatctcatgatgctggttttgttagccctaccaagactgtgataccattgttgcatcggcattgtgcacagcctgaggattctgtaacttctgttgatgatcagctttgtgacagtgatgtacaaatgatctgcaggccttctgatccttgtgctgttgacagatcattgtcagtagaggaaatgtctggatgtattccgctcactgaatcaggatgcaaagcaggcatatcccggccaagaggtctccattctacggaaaaaagaggtttttctcctaagaagctttctccaaagaaaggaatacttaagaagcacactagggggtgcaagggcatctgcatgtgcttagactgctgtacgtttcgtctacgtgctgaccgagcttttgagttctctaggaagcagatgcaagaagcagatgatataatatgtaacttattgaaggaggtagcaagccttaggagtctggtggagaagcctgctggccaacaggagtcgacacaagcagcttgcaaacgggcttctcaggtggaagaggtggccagagaacgttgccggcagatgttcgtggatctaaactcccactgcaggatccctggaccgagggtaagattcgcccaatatgttgaggaaaagaaggcctcgccatctcctcgtgaaaagaaggcctcgccgtcccctcgcagcagcagcagcagcagctggaggtgaccaaacgtctgaaggtggacgggtcctgctgacctacttactgatcgtctagttattcagaacattctgtgtgccgccacttgtgaattctgtccgggctctggtacccgatctcagcaaatgcaatgcgatgtaatgcagtaggggtaagatgtggttctgtagttgtcgtaggcacacaaggaagactgagatgaggtgtagtcgagtttctgctaaccggaacatgtcagtttgcaatgcaatgcagtgggaatttttaggc

SEQ ID NO: 60 - DNA, 731 bp, Zea mays
cccagctttgactgccctcgcttggtgctcagttctttcctctgctcctccgcctcttctcgcacctcggcaccttcttcggcaactgcgagcgagatggaggcgcaagacgactgcaagtggcggcagatcccggcgttcggcgactggaacgtgtgggacggcgacatgcccgtcacccagtacttccaggcaggggccttcttcttcgcggcgccggcggagaagggcgacgcggatctcttcaaggtgccccagttgcctgccaagccctacggctacaagaagtgcgttgttcgagtgaagggggagaaagaaaccgctgtgccgccggcggcgaggaagggacgcaggaggcgctgcgtgagcgagcagcacaagtggaagcccaagggagctgtggacgaggacctgtacaagatctccccgcagcttctctgcaaggtgaagaagaagaagctgctgaggaatttgcttggagggtgcctcggcttgggctgcatcgcctgatagtgagagatgcagagcttaataagtttcttgaaagttcgcttgcttggtgctctggagagagttgtatagttgtctacgctaatatgagattaatggaaacttactactgcttctgcactcgtttgaatgtaacactagcttgcattccatctttcctacggttgcttcagtgcctgactaagggctgtttgattctgaaaatgtataaattcagcctt

SEQ ID NO: 61 - DNA, 395 bp, Zea mays
agcctgcctcgcgtctcgtcgaccatccaaatccactcccttctctagtccaaggagctcaggaggtcgaggaagaaggaatggcgccgtcgtaccggccctaccacgtcgccggcgaggatcagcagcgtaaggtgaaggcgggtgggaagtggttggccgcgtggagcgtgctgggtgttggcggcgacccggcggagatgaagcggcggaggcgggtggccagctacaaggcgtacgcggtggaaggcaaggtgaaggcgtccatccgccggggcatccgatgggtcaaggccaagtgcgaccgcatcgccgccattcacaactagctagtagagcagagctgagctgagcatgtcgtcggttcctttccttgtgcgcttgcattgcattgc

SEQ ID NO: 62 - DNA, 356 bp, Zea mays
tcaacttcgccatcggtcggagtctgccaggcggccgggtttaggaacgccaatgccgggagagaaattaagatcgacctgtgtggatcttcctcaagcgcgagatgtagggatggatggcctcggccatggtgttcccttgccggtgcgggtctcgccgcggtgccgcaaccccgacgtggacagatctcgtctcaaccttgtcgctgacgagcaagctacagaggattctgaggttcagctggtagagactgctgagcaggagctcgttgaaggagaagaataggtggttcaagtggagccaagtatcgaggagttcgattcgatctaggtggcgtctcccagtcagctttctg

SEQ ID NO: 63 - DNA, 1878 bp, Zea mays
gatcgggcccaaaaagcgggcttcgtgccgggctcacgggcctcgtgctttttggccatctatacccgcatggaatcaggccgtgctaggctcagaccgaccccagacagcaggcttcatgtcgtggttctcgtgcttgttggccatctctagtcttgtcacaagcgacggcagcagaaacgccccgcagcaacaaggccgcgcccaatccaatctgcgctgcgctgcgaaaggccagaagagcacacacaacacaggtacagctagcgcgcgcgggcggtgcggggctgtctggcaattacgcagccttggcagcttgcaccaccgcgcaagctagcgctgacggagggaacaagggcttgcgcgcgcacacagggaggggaggggacgcctgccgccgatcgcctggtggatctcccggcggcgggcgaggcagcagagaggggaccaatggcgccgccggacgcgggtgcggcagcagcgtgcggcgcgcggtgggtgaggcgggacacgctgctgggcctcgcgctgggccagttcgtctcgctgctcatcaccgccaccggcttcgcctcctccgaactcgcccgccgagggatcaacgcgcccacctcgcagtcgctcctgaactacgtcctcctcgccgtggcctacggcggcgtcctcctctaccggcggcagccactcacgataaaatggtactactacttaatacttggaattatcgacgtggaagccaactacatcgtggtcaagtcgtaccagtacacgtcgttgacgagcgtgatgctgctggactgctggtcgatcccgtgcgtcatcctgctcacctgggtgttcctcaagaccaagtacggggcgaggaagttcctgggcgtcggggtctgcgtgcttggcctcatcctggtcgtgttctcggacgtccacgcctccgaccgagccaaagggcctaacccgctgaagggcgacctgttcgtgatccttggttcgatgctctacgcctgcagcaatgtcaccgaggagttcgtcatcaagaaaagcaacagggtggagctgatggcgatgctggggcttttcggagcgcttatcagcgccatacaaattagtgtacttgagcgagaagagcttcactccattacatggactagtggtgctgtgctcccttttctcgggttcgcggtagcaatgttcctgttctactcggctgtgccagtaatattgaagttatgcggcgcgaccatgctgaacctctcgctcctgacctcggacatgtgggctgtcctcatccgcatcttcgcttaccatgagaaggtcgactggatctacttcgttgctttcgccgccactgcgggcggcatcgtcttgtactcgtacaagggctccaatgaagtggaggagacggcacaggtggccggggccagcgacgagcacggcaagggccgggacgaggaggctgggacgcggaacccagcgtgaagctctggcgccagccagcaatggaggtgggttgccccctgccaggcatccaggagtgacgagttgttgttgcatgccttgacggcgagtgtagcagagaactttgtcaagtgtcgcaggagactgcttcaagatttgacgacggagatagtattggttttcatgtaaaacaagaacagttggtaacataccgacaccgaaccgtcgtcagaaatgattagatctaagaatcgaagattttacaggtgtttttggtaggtgtgtttggttgagaaatagagcggtttcatttttattttctgatgcttgatttccaataaaagataagcagagcacagttttcgtatgaagctttatcataaataattgaaatgttaccgctccaaaaaacgatcggatgca

SEQ ID NO: 64 - DNA, 736 bp, Zea mays
ctctctctcatcaggtcagcaggtctcgtgcgcgcccggctttcctctcctcgcgccgcacgacgcgagcgcggtcggcgatggccaaggcgcgcaggtcgccgttcgccgccgctgagcggttcctcggcttcccccgcggcgggccgtcgccgggggccgtggcgccggcgcccgccgccttcgacgacctgccggacctcgccgaggccgacgtctggtactcggccgccgccgccgccgccaccaacgacccggggagcccacgcgccacggcgtccaggcaggtggaggcggcggagggcaggcgcggcccgcggcagggcggcctgagccgggcgttcggcgacgggcccgggcggcaggcggcggcgtcggctcccgtcgaggtgcccgcgtggcccgcccgcttcgcgttcccggacgcggacccgtcgctgctgttcgagatggagatggggggcgacgaccacgacgaagggcgggagggggacgacggcaggcaggggcagggcgccgggtgggtgccgccgcacgtgtacctggcgcggcggcaggcgcgggcgtccgtggtggagggcgccggccggacgctcaagggccgggacatgtcgcgggtgcgcgacgccgtctggagccggacgggcttcgacgggtagtgtggacgagcgagcgaagcgagcccttggacagatttttgatctccctttgcttcctcctctttcttcattctctc

SEQ ID NO: 65 - DNA, 2463 bp, Oryza sativa
tgaaaattcttggcagaaaacaaatcctcctcctttaaattcttcaatagctgtacagtatctagcacattgagatgtacgacagcgtaatgccggattcaacaagcaagtcagcagcagcatcactgcgtcactgatcactgtactggagagagagatggccagagagaaagatggtagccatggaggagaggaggagacaggctgggccgccatgttcctcgcgaccttaatttactcctccaatggccgccgctgctgcgaaacgcggagaattctcttccaatttaaagcgccccatctgtccatcttctccaccaccactagcattcttcttctccatccatccatccatccatctacgcgtagattttgcttttctttgctttgctttccagttgtaattttgtgtacgagtacagcacaagctcagctcagctgcttcagctataaaagcttctcactctctcacacacacactctctctctctgctagctcagctctagatccagcaatggcgcctcctccggctgcagctgcggcgttggcggcgtgcattctcgccgtcgccgccaccctcgccggcgccgacgacccctaccgcttcttcacctggaacgtcacctacggcagcatcaaccctctcggctccaccccgcagcagggcatcttgatcaatggccagtttcctgggccgcgaatcgactgcgtgacgaacgacaacatcatcgtgaacgtgttcaacaacctggacgagccgttcctcctgacatggaatggcatcaagcagcgcaagaactcgtggcaggacggcgtgctgggcaccaactgcccaatcccccctggcgccaactacacctacaagttccaggccaaggaccagatcggcaccttcgtctacttcccctccgtcgccatgcaccgcgccgccggcggcttcggcgcgctcaacgtctaccagcgcccggccatccccgtcccgtacccgccgcccgccggcgacttcacgctcctcgtcggcgactggtacaaggccgggcataagcagctgaggcaggcgctcgacgccggcggcggtggcgcgctcccgccgcccgacgcgctgctcatcaatggcatgccgtcggcggcggcgttcgtcggcgaccaggggaggacgtacctgttcagggtgtccaatgtcggggtgaagacgtccgtcaatgtcaggatccaggggcactcgctgaggttggtggaggtggaggggacgcacccggtgcagaacgtgtacgactcgctcgacgtccatgtcggccagtcggtggcgttcctcgtcacgctcgacaaggcggcgcaggactacgccgtcgtggcgtccgcgcggttcagcccgggcgcgtcgccgctgatggcgacggggacgctgcactacagcagcgccgtgtccagggcgcccggcccgctcccggcgccgccgccggagcaggcggagtggtcgatgaaccaggcgaggtcgttccggtggaacctgacggcgagcgcggcgaggcccaacccgcaggggtcgttccactacggcaccatcgcgacgtcgaggacgctggtgctcgccaactccgcgccggtgctcgccgggcagcgccggtacgccgtcaacggcgtgtcgttcgtcgtccccgacacgccgctcaagctcgtggacaactacaacatcgccaatgtcatcggctgggacagcgtcccggcgaggcccgacggcgcggcgccgcggtcggggacgccggtggtgaggctcaacctgcacgagttcatcgaggtggtgttccagaacacggagaacgagctgcagtcttggcatctcgatggatatgacttctgggttgttgggtatggcaatggtcagtggactgagaatcagcggacaacctacaacttggttgatgcgcaagcgaggcatacagttcaggtttacccgaatggatggtcggcaatcttggtgtcattggacaaccaggggatgtggaacctgaggtcggcgaactgggaccggcaatacctcggccagcagctgtacatgagagtgtggacgccgcagcagagcttctccaatgagtacagtatcccgaccaacgccatactctgcggtagagctgccggccttggacactgaggaagatgatgaagaagaaattcagagttgcatagttcgatccatccttcgtcgtttggtatatgtctagtagaataagtcatactactactactataggtgaaagtgaagatgagaattcagaattacgatttcggatatatgtttgttgtagctaaaactgatgtgctattctttgatcatatgtcagtgtttttctcttgagtttgtagcctgtggacaaggcctcaggcttaatggtgcagagtgctctgtttctgatgccgcatcaatctattattatgctattcagtgatgtttttacgacagt

SEQ ID NO: 66 - DNA, 3346 bp, Oryza sativa
tggacgaccacctttggagcaaagagagagcacaacaacacgatgccttcgtacggccgacctagctacccaagaaaaacaagcccggataccataaaagcagagtgtggttgagctgcctgaacaagtaccgtgtggttgatcctcctcctctcccccccataataaactaaccatctctattcttcttctgcaccaccatcgccagcagcaatttccctttctttttcctttccttcctttgctcttttctttgcttgcgagttgcgacagtgacggagagagagagagagagtactgtagcaaagagaatcggtgagagagtgagagcggcaaagacaaaaggcggcgagggcgaaacccccaagaatcaaggcaagaggggaagctttgcatttgcccggccgactctcttcttggttcttggttgtggcgtcggcgtctccgtgttgtttgggctggccaccgttgctcgccgttcttgggggcaggcaaacggcaccggcggtatggaggcattgggagatatggagggggaggaggggcagcggcggcagcagcagatacgggtggtgcggtgccccaagtgcgagaagttcttgccggagctccccaactactccgtctacgtctgcggcggatgcggcgccactctccaagcaaagaagaactcagcatctgagaattcctcagagaaatctgatggtggacatgtgaagtaccttgaagtgctggagagttcaccagataacaaaggagctgcatctaaagacacttgtgaggctgcccaagaaggagaagccaaaaatggagaagctaaagcagaagagagacaggtacttcttgacagaatggcagcttgtgatgatagccgaattccaagagaaccaaatgccttgaagcttgaggcttcacttagagatgacagcagggaaattcgggaggccaagtaccggcgcatccgcagtgaggacaaaggagaagcaaaacacacagtgagagccagagacagatcgccaagatcagttgttgatgccatccctccgaatgcatatcctgcagaaggcccgtctgactaccatattaagtcaagattcagacataccaatggtgagcaagctgatatgagaaatttggagggcctaaacagagtcaatggtcttgaaaaagaccgtgctgatctgttacggatgcttgatgagctgagggatcaggtgcagagatcctgtgagatcaccaacaagccaagtggaagtacttctacagataaagcggtggatgcctcagggttatataatcctcgtgagcggttgagtcggttacgacatggttcacctcagttgcagcggagtggttctcagcagtcaccatccttgaatgggcaagctccttgcattccgcaagcttatgctccaggaactgctcagcaagatcttcatggatacggggagccaatggcacacatgggggctccaagctatcctgttggcacatatccatggagaaattttgataattatttttatggacagtatgatcctgaccctctgatctcttaccaccatgatggcttctaccatcagcctgcctgttcttgtctacattgctaccaccgtgagttcttacctgttcaggggcctcctctgggtttcaaccatcgcagggtaccaccgtatgttatgaataatcctagagtttacccggttgatggtcctgcaatgtttggcacacagaattacaattcaagagtcaacgcttcaatgcagcgcaatcacatgagggccgctatgagtaaaaaacctgcacagacttgtgaaccgattgcatgtggtgccccattcactatatgctacaactgctatgaagtactgcaacttccgaagaaatcccccgtgccagggaaggatgagtacaaattacgttgcgggtcatgctcacatgcgcttgtggtcaagcttgatggaagcaggcttgatgtttcagcaccttcacctatttcacacatatctggcggcagcaaaattagttccaatgatggccaaggaagcaatgcgaattctgctccacatgagagggtgcttccactttatagtttttctgcagcaagtcatggttctcaagacctaccctcgaactcaagtgaagctgaaaaaatgcaagggatatcgtcttcttgcagcatttctgaagatgagaacagccctgcgagatctaattcccagagggacacccctgggtctagggatcttcatcctgaagctgaggtgtctacccgtgttccaagtttacatcttcgtgatcattttggatactcgccatctgagaaggtagttgatggatcagggaaaggaagcagaagtactcgatctgaacatgagaaggctgtgttgacagaaagtttcaagcagaacactgtaaaagatgtatcagtagtgaacataatggacttgtcggatgatgagtatgatgatcctgactacatgcaagatcgaggtgatgtggcacaacctgtagatcaccctcgggccgtgaaaacgggtgattcatttttcaccaatctcataaagaagagcttcaaaattaacaacggaatgggcaatggcagagcaaaggttttcattaatggctatcccatctctgatcgggcggtcaggaaggctgagaagatagctggaccaatctatcctggtgaatactggtatgattaccgtgctggtttctggggtgtaatgggacagtcttgcctcggcatgataccgccatatattccagaactcaattatcctatgcccaagaaatgcgctgctggaaatacaggtgtatttgttaatgggagagaacttcaccagaaggatttggatttacttgtgggtcgaggactcccagattctcccggtagatcatacagagttgagatgtccggtaaagtgtcggatgaagtctctggtgaggagctgtattgtctcggcaaacttgcaccaaccgtcgagaaaatgaagcgcggatttggcatgagagtccccagaatcatcccttgagatcagtgattcttcggcacaactgtagaattcaagaccccattttggatgctgtttcggttcttctgcgaaatgctttgatgcttgttggttgttgattgtccagccgtctgtttgcgtggtctcatgatctgagatgtataatctgtggttgctttgactggtgcttgtctgaaaaattatccaatggaaattttgcaatgtgaagtttgttttgtgctatgaaaccgggccatgctggaagtatatataaaaaatgtcaattggtttttgaccagttaaatttggccaaactttataacagttct

SEQ ID NO: 67 - DNA, 1146 bp, Sorghum bicolor
gcattctctcgcgagtccccaagcgaccgaccgactcccgccgccgcccgccgccgtcggccttctccaagcagaagcagccatggacgagtgggttcgccaagctgaggtgtgggtgcgccaagccgagagctggatccggcagcagcccccggagcagatctatatcgcggccgtggtggttgccctcacaatcctgctgcttatcctagcatcttgtctgaaatcctcaaagctaaatactatagtgctatccggacttagtggcagtggcaaaactactattttctaccagcttcgggatggatcatcacatcaaggaactgtgacttcaatggaagaaaacaatgacacatttgtactacattcggagcaagaaaggaaaggcaaagtaaaacctgtgcatgttgttgatgtccctggccattcaaggctcaagcccaagcttgatgaagtcctgcctaaagcagctggggttgttttcgttgttgatgctcaagatttcttgtctagcatgcaagctgccgcagagtacctgtatgacattctgacaaaggcaactgtagtgaagaaaaaggttcctgtgcttatattctgcaacaagacagataaagttacagcccactcaaaggagttcataaagaaacaattggagaaagaaataaacaagcttcgggaatcaaggaatgccatatcatcagctgacatctctgatgaagttcagctcggggtccctggagaggtattcaacttcagccattgccagaacaaggtggctgttgctgagggtgccggttcgaccggtaatgtttcagctgttgagcaattcatccgtgaacatgtgaaggcgtagattgttattgttctcagggctgcgaatgattcacctgatgaggcaagacatccattgcatagaccttccatctgacgatgttttgaggcacaatcatattctgcactgcttcagctaacccatgttagaggcgttacatgttgattgttaattaacgcctgacagtcatcgggtatgaatagaggcagttaagaactctctggccatggtggttttgcttgataacatcgttgatatttccctgattattaccagtctctgttctaaactctggtggtagttataagcaaaag

SEQ ID NO: 68 - DNA, 2112 bp, Sorghum bicolor
cggtaacaacgtgggattaatcattaatcaaccacgcaggtaatctgacggggggtaataaagcagggggattagtgcggggccgtttgaagccgggtataaaaactgcgaggctaccaaaggccacctcgcgaaaaaactacctgggccgccaccgccacagcctctgctcgctcccgcctcccgacccgagctgagcgcgcaacggaactagccgtcgtcgcggcgcgcgcgccatggcgccgttccagatgcggttcgggctacagatctctcccgcgcgctccgacgaggaggaggaagaggacgaggaagaggaggacgaagagctcgaggaggaggaggagtatgacgagatggagagcgaggggacggcctcgccgccgatgatgctccgggcagggaggggaggaggaggaggaggaggaggagggggagggggagggctggtgggcgccgtcgtgggggcgctgcggaggtcgctggtgatgtgcagcgccggcgccgtgggtgtcgacgacgacgacgacgacgacgacgaggacagcgagggcgaggggatcgagattgggcggcccacggacgtgcggcacgtctcgcacgtcaccttcgaccgtttcggcggcttcctcggcctccccgctgacctcgagccagacgtgccccggcgcacgcccagtgccagtgtaagtgtatttggcgtttcacccacctctctgcaatgttcatatgatcaaagaggaaacagtgtgcccacaatattgctaatgatgcagaggaagttatatgcgcatgaaggacttaagattgaagggatatttaggattaatgcagaaaatagccaggaagtctatgtcagggaccaattaaacagtggaatggtaccagatgaagttgacttgcactgccttgctgggttgataaaggcatggtttcgggagcttccttcaggtgtattggatgcactaacaccagaacaagtaatgcactgcaacacggaagaggagtgcgctctccttgcttctatgctaccaccagttgaagcaacactacttgattgggccattaatctgatggctgatgttgtagagcaagaaaactacaacaagatgaatgcccggaacatcgcgatggtttttgctcccaatatgactcagatggccgatccattaactgccctgatacatgcagttcaggtgatgaatttcctcaagactttaatcatgaagactttaaaggaacgaaaggagaaaaatggagcactccaagcatcacaatcatgctctggttctccaaatgaccaagatgaacatcagatgccagagcatttggagaaacctttagttctgtcaagtcaaaaagactttgattttcccatgattgatagggacactcctgttcaagtccttggagctgagaaagctctccatcatgactcacaaatccattctgatgagacaaaaaagtttggaattggtatggaccacaagaaaagccagagtgacgtttcttctcttggcagtgattcgaacaatcgattcaacagttcaggaagagaatttggtagcagaaatggcgaaggcttgtttgacagatttagttttaggaaaggggttgagaggctttgcaggcatcccgtgtttcagttgagtaggtccatgaagaagtctgcagatgtcgtggtcttcgatgcccccagagaagcaagacaagcttgggtatgatacaataatgacagtgtatgtactatgtagttggtaattccattgtttccgcctctgtgtctagctgataagccattcccctagtctgtatgagtagcaccggttagcctgttaggtattacaaaatcgaggtcgtctggttgtatattatcgctgtttgcttctgacgaaagtgtctggagaagtagcatgtggcttctacggaacgaacgaaagccacagtgaactcaggcttcgtggctctgtgctgcatacctcaaacgttagtgatctcttgatgatctattataatcttgctgatattctgtaaccttatcagcctgtacaacaactatcagtaaattgttgtataaatgcgtctctttttttgagtacatacattcgccaa

SEQ ID NO: 69 - DNA, 1397 bp, Sorghum bicolor
gagactgcattttcttcttcactcaagccagccctcccttcgtttcaaaactctgaattcctctttcctcactttttcttcactactggctctcatggcttccaaggcgccgccggatctactgaatgctactagttctatccatatgattgtgcgccagctgttctcccggatggtcttttcccttcagatggagtgttccctctccatggagataatttccttttggttgtggcttgaagggaatggtcatcctgatttccttgcaagcgtagaatcctttgataactataatctcaggggaattgccgttgctggaaaaatgtttattgaagctctacgtcgtaagtctagtcacttcaatcatagatctgaggaagaaggctatttccagaaagaagctacggaaggtatccttttctacctcaacaatttctgctacaaggctttagaagatattctagaaatagcagaggcaaaggaacgtatctaccgaaacaatcatcaacaagttcagcaacagaacatgaagggtaaagctcctatcatgagcacgaaggatcttttgtctaagatcagggcatccttcactggtaatccgagtcatgaagaaggctcaagttctagaagcatgccatcccccaaaaatcagatcctcagagatattgaaaatccaatcgatcagtgcctatcaacataccctttggcgaccctttttgatagcctgaacttaagggatgatccacaagctgatgcaatccagctacagatccaggtgcagcgacagcccagtattccccgtgatgagagaactctcttcgtgactttctccaatggctacccatttactgcagatgaactattcgaattttttgaggggaactttggaagtgttgaaatcataagcgtggaggagccagttgaacctaggccaccactctatgcacacatctgttttttcacacaggagacaatcctccacatccttcgtggcaacccaagggtcaagttcgtgatacgagggaagcatctatgggctcggcagtttgttccgaagcggaagaaagtccggaactagctagtgtcacatgcctggatgttggtgccttatatctcatgcaagtcgtaaaacttggaataaagccaccatcctgcttcttattagactttcctggctcctgggccttctttctccttataataacccttgtggaaccttacctggcatggttaataatgttatctgctgttgtatgactatgtgagatcaacagtgttgtcttatatgttatctgggagtatggttaataatgttgtgtgatgtgagaacacatagtgctattgatatgttggaggtttccttcagtaaattctgaaaagcctctttcctaatttcc

SEQ ID NO: 70 - DNA, 2572 bp, Glycine max
tagagaacaaaagtctttatgctctctcttccccttcttcttcttctctctttctactgctacttattatcagagcctgataattggagagagagaagagtgtgtgtgtgggaattggaaaagaaaggttagggaagagaagagaagaagaacccatttcagttttcactttccatatgaagccaagaaaaagaaaggactttagttttgagagataaatattggaagaaaaagaagcttagctaggtttgcgaaggaaggagatgatgatgtgaagagagacaagaaaggtcggaaacaataacaaagaaaagcagagagaaagaaaaaaaaaatatagatagatatatagagagagagagagagacacaggaagtaagaagtcgttattgcattttctcattcactgctcactctgcactcttctgctgcctggacccttcagaaactgatttttctttctctctttcttactcagaaaccaaaactttttcttcctgtggaaaaaagccaaagtgacagtagtagtagtagccacaatagcagcagcagcagcagaaacagaagaagaagcagagaagttgttcgttttcccttccttttcatagagagagaaaaatctaagtccactccactcaactcccccaccccacctcaccctaacaatacaacaagatctcatctcatctcatctcaaacaacaaactcccatcaaaagagaaaacttctctcttttcttttcctccaccaacaaattctttccctgccacaagaccccaccccaagaagaataacacccacattagatacaccctcatacaaaataatatatacacaccactacttagacaatagaagatctatgcttctatagttctacagttagttctgtctttccacctactatacaccccactttttttttttatcaacagaagtaaactatatatcattacttatattgtctcttgatttgagaagtaatcaaggattttcagttgtggctactacaaggaggttaccttcagattctggtgcctttgcggactgggcagcgacagcttcctccggtgctggtggtggtggcggccgcgctgtccccgtcgacgacctctccctcggcttcaatgcgggtcctgctgccgccgccaccggacccaccgccggtatgtggtccacccaagctaggtcaatcaattaccccgaaatggggatgttcgtcgtggcgccagcttcttccttccaccaccaccaccaccaccagccgccgcaacacgatccctctgtcatggcggattcccttaaccccgccactgcactcggcgtcggcgtcggcgtcattcctctcctcgcagccacgccgtgcctcgaatccgacaacaacatcctcggaagtaggacacgtggcggcgggggaattcagctatggcaagaccaacaacaacaccatcaaagccactacatgaagaagcagctgcagcagggtcttctcgaccataatagtaacaccagttcggggaatttgattcagaacagtggcgaggtaactgcttctggaactagtagcggcggaacaacgtgccaagattgtggaaaccaggcaaagaaagattgtaccaacagaaggtgtagaacctgttgcaaaagccgaggctttgattgtcctacccacgttaagagcacttgggtccccgccgcacgccggagagagcgccagctaatgacgtcggccaccgcagctgtcgccggttctagtggctccacttcgggcactaaaaaacctaggctcattgcttcacaaaccacaacaacttcccacacttccacttccaacaccacccctcctagaagctttgacactagctctagccatcaagatgcggggttcaaagagtcattacctgggcaagtacgtgcaccagcggttttcaagtgtgtaagagtgacggcggtggaggatgggcaagatgagtatgcatatcaagctgtggtgaagattggtggccacgtgttcaaagggtttctctatgatcaaggggtggagaatagggatgtgtatcctaacctatctgagttgcatttgggtggtggaagtggtggtgcaggaagaaatggggtttcatcttcatctccaatgatggatcctaatgatgtttatgcagcttctggtggagggttattagggggttcttcagcatatggtaatccaatgaattgatctgaaagtgtctgaaaaactgtgtctttccgagtgcaagatattagtagatgggcttggagaggctgatgatcttttaatttttttctaggctttgtatctttattgcaaatgtcactttttctgtctgccatttttcaacttgattttagttctataattctttctcccgcccaatctggcccttgtcattgcatgagatcatctgtttgtgacaaggaagcctcactatcttctaactgttaaatgaaattgtttcttatgtagtaaatttaactcaaactggaaagcaaaggtgattaaaacttattttacttggttcactattttaaattttatttttagttaagatta

SEQ ID NO: 71 - DNA, 1537 bp, Glycine max
aacacaagtttggaaaacgttatttgtgggaaacaaaaggaacagaacaatgagcgggaagcaggccgcgagacctcgtacccgcgtgggaaagtacgagctgggaaaaaccattggcgagggaagctttgctaaggtcaagttcgctaagaacgttgagaatggtaaccatgttgccatcaaaatccttgatcgtaatcatgtcctccgccacaagatgatggaacagctgaagaaagaaatttctgcgatgaagatgatcaatcatccaaacgttgtcaaaatttacgaggtgatggcaagcaaaacaaagatctatattgtcctagagttggttaatggaggagaactatttaacaaaatagctaaaaatgggaaacttaaagaggatgaagcaagaagatatttccatcaattaatcaatgccgttgattattgccacagcagaggcgtgtaccacagagatttgaagccagagaatcttcttctggactcaaatggtgttctgaaagttacagattttggattgagtacatatgcacaacaggaggatgaacttctccgaactgcttgtggaactccaaattatgttgctcctgaggtgcttaatgatagaggttatgttggttctacatctgatatctggtcatgtggagtcatcctctttgtgcttatggccgggtatttgccctttgatgagccaaatcatgcggcactgtacaaaaaaattggcagggcccaatttacatgtccatcatggttttctcctgaggcaaagaaactattgaagcttattcttgatccaaaccctttaacaaggataaaagttcctgaactcttagaagatgaatggttcaaaaaaggatacaaacaagcaacttttataatggaagaggatatcaatgtagatgatgttgctgctgctttcaatgattctaaggaaaatcttgtgacagagagaaaagagaaacccgtgtcaatgaatgcttttgagctcatatctaggtcacaaagcttcaaccttgaaaatttgtttgagaagcagcaagggtctgttaagagagaaacacattttacctcacagcgccctgcaaatgaaatcatgtcaaaaattgaggaagctgccaagcctctgggatttaatgttcacaagcgaaattataagatgaagctgcaaggtgataagagtggaaggaagggtcacctttcagttgctacagaggtttttgaagtggctccctccttgcacatggtggagctgcgaaagaccgggggtgacacactagagtttcacaagttctacaaaaacttttcatcatcatcagggttgcaagacgttgtgtggcattctgaagaaaaacaatgaagaatcaaggtgtggatgcatggaagatatcgtgcacttatttttgttcatggaagatatcaggcactttttcttttgttcatggaagatatcatgcttagctaaaactggagcatgttgagttgggagagtctgctctaatgttagatagggtaaaaacaaaacctagat

SEQ ID NO: 72 - DNA, 1964 bp, Solanum lycopersicum
gccgctattcattctgctccatttacaatacaatgtgacctttctgtaacactttctctctctctcctaattttctctctcatctctgcaaactccatgaccttcatgattattttacattgggaaaacaaaactcaaccaaaccccattacaaaattagtattttcttgaagaatcagcaaaaaattaggtgttaaaacgaaatcttaacaaacacaagtctttatcattcatccatcccctgtttctttgttattttttcaccaacaaacgaaaaccccatttcatcttctttggggttttaagaagatgatagaacccaaaaaacagagcaaaaacagaggtttttatgtaagaatgaagcttttaaatcacaacaatggcggaagtagaaacagaggattgttttgttacagatatttcaaatgggttctttggttttcactttctttttatttttttgcttcgtttctattcaatcataaacctaataccatttctaaaactaccgttcctcaatattctaaagcttctcgtgctcttattgaataccctgaaactcaacaccatcgagattcgttgaatggattgaagatttacgtttacgatttgccgagtaaatacaatatcgattggttatcaaatgaaagatgtagtaatcatttatttgcatcagaagtagccatacataaagctctgttaaacagcgatgttcgaacattaaatccatatgaagctgattttttcttcgtccctgtttacgtatcgtgtaatttcagcactgttaatggattccctgctattggacatgctcgttctttaatttcttcagctattaaactcatttcatcggaatttaatttttggaatcgaagttcaggttctgaccatatcttcgttgcttctcatgattttgggtcttgttttcacacattagaagatgtagctatggcagatggagtaccggagtttttgagaaaatcgattattttacaaacatttggtgttaaatacgatcatccatgtcaaaaagcagagcatatagtgattccgccgtatatttcgccggaaagtgtacggaaaacactagctacgtcggacgttaatggccgccgtgatattttcgcgtttttcaggggtaaaatggaagttcacccaaaaaatgtcagcggacgtttttacagcaagaaagtccgtactgttatattgaaaaaatacggtagcgatcggagattttacctaaaacgtaatcggtttatcggttatcaatcggagattttacgatcaacgttttgtttatgtccattaggatgggcaccgtggagtccgagattagttgaatcagttgttttaggctgcgtgccggtaattatcgccgatggcattgatcttccgttttcctccgccgtgccgtggtcggaaatctccgtcacggtggcggagaaagacgtcggaaaactcggcacgattctcgagaacgtggcagcaaccaatctgagtacaatacaacagaagctgtgggacccaagaatttcaagggccctactttttcatgatcggacggtggagggtgacgccacgtggcaggttctgcatgccttgacggagaaattaagtaggtcccaccataggtcaagagtatcgaacgaatgagatcatgacacgtggttgtttggttaaatagattccagtgccagctaagaaaaaacaacagctagacaatgtatacgcggagatagatcaatcgactatctgaactttcactttattatcgagtcttattatcgagtgatgaggatagtaagcgaggtctcggtgtgctgagttgttgaggtgtgattggatgatgaagcgggatgggttggacaggagcttgttattgttgtacatgtgaaaaggaatattattttattaatttggagagaaataagaagagtcaggatgcttattgctttgctgtacaa

SEQ ID NO: 73 - DNA, 1395 bp, Solanum lycopersicum
acaaatcggtcctcctcttcttcctctttcacccatttctccctcttatttaccactggggaaaaatagtagtactaataatgaagagctcaataaaagtactattgctgctcgtgctattgtgcgccatttccaacatttccattgctgttattgatggattgttaaagaatggaaacttcgaaatgcccccatcgaaagcggacttaaacggcacggaggttctaaagcacaacgccataccggaatggtcaatttccgggttcgtagagtacataaaagctggccaaaaacaaggtgatatgcttctagtcgtacccgagggctacgccgcggtacgtctaggtaacgaagcatcgatcaagcaaatactcaacgttacaaaaggaatgtactattccttaacgttcagtgctgctagaacttgtgctcaagaagaacgtatcaacgtatctgttacacctgatttcggagtactgcctatccaaacattgtatagtagcagtggttgggactcatatgcttgggcatttcaagctgaatttccccaagttgagatcttgcttcataatccaggtgttgaggaagatcctgcttgtggtcctctcatcgattcgatcgccattcgtactttatatcctcctagggccactaatcagaatttgttgaaaaatggagattttgaagagggtccatacgtattcccaaacacaagttggggagtacttgtaccaccaaacattgaagatgaccattccccattgccagcatggatggttgagtccctaaaggcagtaaaatacttagactctgaccatttttcagtaccacatggcaagagagccatagagttagttgctggtaaagaaagtgccattgctcaagttgcaagaaccacaattggcaaaatgtatcaacttagtttcaaagttggagatgcaagtaatgcttgtgaaggttctatgattgttgaggcctttgctggaagggatacacttaaagtcccatatgagtctatgggaaaaggtggatataagcgtgctatcctccgtttcaaggccactgctagccggactaggatcatgttccttagcacctactatcacacgaggagtgatgattttgtttccctgtgtggccctgtggtcgatgatgtgactctcttgagtgtaaggacccatcgtcgagtcctctaagacatgtattttgatgaaatacggtggattttatgagttaaatttggttgtattaatgaagcaaagaaggtgggagctctattttatcttacttttggtttgtttactactagtggcattatcttatgcatgtgtactatactaatgtctaatggaaggcaaagaagtatatatgatatatatattttgattggtgttg

SEQ ID NO: 74 - DNA, 2386 bp, Solanum lycopersicum
gaaaccaactgagtcagtactagtacttcatctctgaaacaaaacattaaccttactctctaccatttccagtcaaaggtgggtaacaactaacatgggttttcctcctttattcctctgttttctcttcatactcttttcactctctgtaagtggaaatgctgagttacaagctctaatggacttaaaagctagtcttgaccctgcaaatgctttgctcacttcatggactgtttctggtaatccatgtgatggttcttttgaaggtattgcttgtaatgaaaagggtcaagttgctaacatttctctacaaggtaaaggccttaaagggaagttgtcacctgccattgctgggctaactcacttgactggactctacttgcattataattcattgtatggagagataccaagagaaatttctaatttggttgagctatctgatttgtatttgaatgttaatgatctctctggtgagatccctcaagaacttggaaacatgtcaaacttgcaagttctgcaactatgctataaccattttactggtagcatacccactcaactagggactttaacaaagctcaatgtcctggctctgcaatccaatcagttaactggtgcgatccccgctagcttgggtgacttgggagtgttgatgagggtggacttgagttataatagtcttttcggttcaattccttcaaaacttgcggatgctcccctacttgaagtcttggatatccgaaataacaagatttctggcaatgtgcctcttgctttgaagagattagttggaggtttccagtatgagaataatccaggactatgcggtgtgggtttcccatccttgcgagtatgtacatctttcgatcgctcgaatccgaacagaccagagccctatggagttggctcaagtggtttatctactagagatattccagaaacagctaatctcaatttaaattgcagtggaaatgcctgcacaacgtcgtctaaaacctcacaggcatctgttgttgtaggggttattgtggttactattattgcatctgctataggaattctttccttcacgcactatagaagacgaaagcagaaacttggaggtggactggaaatgtgtgatagccgtctcagtatcgaccaggccaaggaagttaataggaagaatggttctcccctagtcagtcttgagtactcgattggttgggatccgttggctgagggccggcgttatggtggagtttcccaagaaattctgcagagatacagattcaatttggaagaggtggagtcagctacacagtactttgctgataagaatctattggctaagagcaacttttcaactacatatagagggactctaagagatggatcacttgttgctgttacgagaattgccaaaattagctgcaagtcagaagaagccgagtttttaagaggactaaatgttttgacatctctgagacatgataatttagttaggctgagaggtttctgttgctctaaaagtaggggagaatgttttcttgtttatgattttgtgccaagaggaaacttgttgcactacctagatttgaaggaggacgaagctcgtgctcttgaatggtccacaagggtatctatcattagtggaactgcaaaaggcgttgagtatttgcacgggtgcaaggtgaataagccagctctagtgcatcagaatatctgtgctgaaaacgtgctccttgaccagcgattcaaaccattgctttcaaattcaggccttcataagctcctcacaaatgataccgtcttttcagcgctcaaggctagtgctgccatgggatatttagctccagagtactccactacaggccgatttactgagaggagtgatatttatgcctttggagtgctcattttccaaattttatctggcaagcgaaaattcaccagttcaatgcgttctgctgctgaatcgtccaaattccatgacttgatggacgtgaatctccatggaaggttctctgagtctgaagcaacaaaactagcgaaaatcgctttgttatgtacacatgaatgcccagaggagagaccaaccatggaaacaatcgtacgagaaattggtaatttagctagtccctcctaatgctaatgatattcttccatcaactattgcctgtagggcaagttttcaatactcctaacttattagcttgaaatagattcgtactaacctctcacgagtattggagcttcaaatttttagtcagtctgagaacttctttgactgaggacttgaccattttgtgaatgtttgtatctcgtttgccatttaaccttaggatttctcatgttggaggattttcctctgtttgtctcttggcttcttattaatctgttt

SEQ ID NO: 75 - DNA, 1089 bp, Triticum aestivum
cgactccagagctcacacagtgctggacgcgccgcgacgagtcggaggggaaagatcaagatggaggcggccgcctcgaatccgtcgagcaagaggatcgccctggtcaccggagggaacaaaggggtcgggctggagacgtgcaggcagctcgcgtccaaggggctcaaggtcgtgctgacggcgaggaacgaggccaggggactagaggcggtcgaaggcgtcaggcgctccggtgctgacgtcgtcttccatcagctggatgtcaccgaccctgacagcgtcgcccggctggcggatttcgtcagggatcagttcgggaagctcgatatcctgataaacaatgcaggcatttcaggcgttgatcgagatccagttctggttgcgaaagttaaagaacaggttgaaagcatggatgtagatcagagagttcaatggatgaaagaaaattccaaggagacatatgaggaagcaaaagaatgcatgagaacaaactactatggggcaaagcttgtcacggaggcactacttcctcttcttcagttgtcctcctctgggagaattgtcaatgtctcatcaggcttttcactgctaagaaacttcaacagtgaagaactgaagaatgagtttaacgacgtcgacaaccttactgaaaagagactagaggagctgttggattcgttcctagaagatttcaaggccaatttgatagaggcacatgggtggccgaccggtggctcgtcagcgtacaaagtcgccaaagctgccctcaatgcttacacaaggattctcgccaagaagtaccctaggatgcgcatcaactgtttgacgcctggttatgtcaagagcgacatgtcgatgcacatgggagttttgacgcctgaggagggcgctagcaaccctgtgaaggtcgctctcttgcccgacgatggcccgacgggtgcttattttgatagggatggcgtggcctcgtttgtgtgactctgtcgtacgtgtaatggtttcgtccggttttactttcagaatatgagacacctgtaacagtagttgtcaataaacattgtgcagtttaacctgtgctgtgcactc

SEQ ID NO: 76 - DNA, 1605 bp, Triticum aestivum
cctcgccccccaccctcgagcgagctctgcaatggcggcatcctcggcccccctcgcgttctccgcctccgcctccgccctgtccgcgcgcctgcgcctcgccgctccggcggcgtcgtgcgcggccacgacgcggcgccgccgcccggtggtggtccgcgccaagatccgcgagatcttcatgccggcgctcagctccacgatgacggagggcaagatcgtgtcctgggccgccgcggagggcgaccgcgtcgccaagggcgacgccgtcgtggtcgtcgagtccgacaaggccgacatggacgtcgagacgttctacgacggcatcgtcgcggtcgtcctcgtccccgcgggcgagtccgcccccgtcggcgcccccatcgccctgctcgccgagtctgaggaggacgtcgcgctcgccgtcgcccaggcccaggcgctctccagcaaacagccccagcagcaggcccctgctccttcggacgccgccgcttcaccgcccccgccggcggctccggtggctgctgctccggcgcctgtggccgcggggacgaagggcgttgccacgccgcaggctaagaagctagccaagcagcatagggtggaccttgccaaggtgaccggcaccgggcagttcggccgaattacgccggctgatgttgaggcagccgctggcatccagccaaaaccaaaggtggctcccactcctgctgctgcgcctgtggctgcagcttcgtcagtaagggctgtgccgcaggcggccgtgcttccgccggtgcccggtgccacggtggttccgttcactgcgatgcaggctgcagtgagcaagaacatggtggagagcctgtcagtgccagcattccgtgttggttaccccattctcactgataagctcgatgcgctgtatgagaaggtcaagccaaagggggtgacgatgactgtgttgcttgcaaaggccgctgccatggcgcttgcgcagcaccctgtggtgaacgctagctgcagggatgggacgagcttcacttacaacagttccatcaatattgctgtggctgtatctattgatggtggactcatcacacccgtcctggagcaagctgataagctggatatatatttactctcacaaaagtggaaggaactagtcaagaaggcacgggcaaaacagcttcaaccgaatgagtacaactctgggacatttactctgtccaacttgggcatgtttggtgtagatagatttgatgcaattcttccacctggccagggagctataatggctgttggagcctcaaaacctacagtggcggctgataaagatggtttctttagtgttaagagcaaaatgatggtcaatgtcacagctgatcacaggattgtttatggtgctgatttggcagcattcctgcaaacttttgcgaaaattattgaggatcctgagagcctaactttgtaggattttcttggaagtggtctatgagttgttcaaccgtcagttcatttccagttggaagtctatcgctgagtttgtttttcgttttcctatttgtatctttgagtactcaaggggatattgctttcctgctgtttgtactattttcacttggg

SEQ ID NO: 77 - DNA, 1015 bp, Triticum aestivum
gctagctttggcgtggctaggaggagaggtagcggctagctagctgttgtgcattgccgggctcgctctcgagcgtaatggcgcagctcccgcccaagatcccgacggcggcgaccggggcgcaccactggcccggcgccggcgtggagcaccacggccacgggcccgccgcggtgtgggcggacgagttcgccgagttcgcggcggcgcgccggggcgcgcaccgcaggtcgctcagcgactcggtggccttcgtggagatggcgccgggaggctgcggcggggccggcgacttcgacaggctggacgacgaccagctcatgtccatgttccccgacgagggagggtcgacggccccggggtccgagaacggcaccagcgacagcgacggcgacaagcacggcaaggaccggtacgacgacgggcacaacgacgatgctaacccggaggagccggggccggggcaagccacgccgacctcgtccacggagacgatccgcgaccccaagagggtcaagaggatactggctaatcgccagtcggctcagagatctcgggtgaggaagctgcagtacatctccgagctcgagcggtgcgtcacaacgctgcagaacgaggtgtccgtactgtctccccgggtggcatttctggatcagcagcggacgatcctcaccgtcggcaacagccacctcaagcagcggatcgcagctctggcgcaggacaagcttttcaaggacgctcatcaggaggcgctcaaggaggagatcgagaggctgcggcaggtgtaccagcagcagaacctcaggatgtcgtccggcgcgggcgcggcctccgaccacggcgggccgccccctgtgcgcgcggagaaggagctcatgagctgaagcgatcatcgcatgtcccttccgcgcagccgccccgccgccgcatcattgacctgggagggaacacatggcatcatgaaatgcatgaatgaaaccgtccatgctttttttctcttgttcttctttttctt

SEQ ID NO: 78 - DNA, 1430 bp, Arabidopsis thaliana
aatcttttgcattccccaacacacactcctgtctctctttctatctctctcttccacttcaaacttcaaagatctcacaacttctttgagttttgtaatggcaacagatgaaatgaaatcagaaactaaaaaaacagaacataagcaaaaacaatctacacaaatcaaacaagaccttcctcctccgaccataccacctcttccacttccttacaagtcatgcaccttgaaagtttctattcactgcgaaggctgcaaaagaaaagtcaaaaaaatacttaccagcattgaaggtgtttttaaagtggacattgatgtgaaacagcataaagtaacggtgataggaatcatctcgccggagattctgttaaagaagcttaacaaagctggtaaaaacgctgaacaactgccggagatacccgacccggttgacaacaaacccaaacccgtcgacccgaaagagaagaacaagaagaagaagaaagaagagaaagtgcaaataaccaatgaagctacttcttccggtatagataatccggaaaaacccggttctggagagtgtgataaaccggaatctgaaaaacccgtcgacgaaaagtgtctttccggtgacggcggtgaaacttccggtcctgtgaaagaggaaaaaaaggacgttcttaaggagaaagattctgggaaggaagaatctccgtcaccaccggcggattcttcggctccggcggcggagaagaaagctgaagacaccggtggagctgtccctgataatggcaaagttggtaaaaagaagaaaaagaaagggcaaagtttggctactactaacaatcctaccgatggacctgcccgtactcaatcacttcctccgcccactgcaacagattatgaccgtccaattaatcagatcaacgaccaccatataacaaccactaataatccgccacgtcacgatctgtatccttatcctgcacaaggctattatgcgccgcaagtcatgtatggcgtaagttataacgttgctcaacctccggtgagtgtagacgctgcgtcgtattatacacctccaccaccgtattcgtatgcgtacatgcacaacggttatcaaccgtccgatcaaaacccttgtcaacctcggccgtcagattcgtttgagttattcagcgatgagaatccaaacggttgtgcgataatgtgatgtcaaattaccaaaaggaccttgaactctgcttatacgccttgtatgacttaaggatggtttcgtaatttgaagttctttcacgtgcaagttagcttaatggtgtttctagttaagtttattttaatgaatgttgtattagttttataactatgattatgattatgttaagataaagattaagctttcatttcttttttggcagcttttgttttgatttaatgatttagagatcctt

SEQ ID NO: 79 - DNA, 1828 bp, Hordeum vulgare
atcgatctctttcccactctgtctctgtttcgattcgacccgatcctccttcccgccgccgtcgccgtcgcgctgcagctgggctcgtcggtctgaccgaggatggaccagccgccgaatggcttcgccgcaggaggtctcttcgttcaacacattgatgggcaaaatgcttctcccccttctgtaattgtgattggtggagggatttcaggcattgcatctgctcgtgcattgtcaaatgcttcatttaaggtcacactgttagagtcgcgggagcgacttggtggccgtgtgcatactgactattcttttggctgcccaattgacatgggagcatcttggttgcatggtgtttgcaatgagaattctttggcgccattgattaggcttcttgggcttagattatatcgcaccagtggtgataactctgtgctttatgaccatgatttggagagctacgcgctctttgataaagatggtcgtcaaattccccaggagatagtaaccaaagttggggaaatatttgagcagattctgaaggagacggtaaaagttagagatgaatatgcgaacgacatgcctcttgttcaagccatctcaatggtgcttgacagaaatccacatctaaagcttgagggtttgcaatatgaagtactgcagtggtgcatttgtcgattggaagcatggtttgccacagacgtggataatatatctttgaaaaattgggatcaggaacatgttcttactggtggacatgggcttatggtgaatggctatgaccctgttatcaaagctctctctcgagatcttgatgtccaccttaaccacagggttaccaaaatcatccagcggtataataaagtcattgtatgcgtggaagacgggacaagctttgttgcagatgctgctataataactgtccctctcggtgtactcaaggcaaacatcatcaagtttgaacctgagctcccagactggaaactatctgcaatctctgatcttggcgttggtctcgagaacaagatagcccttcggttcaacacaatattctggcccaatgtagaggtactgggcagggttgcccaaacatcaaatgcatgcggctactttcttaaccttcacaaagccacaggacatccagtccttgtatgcatggtggcgggcagatttgcatacgaaatggagaagctatcagacgaagaatccgtaaactttgtcatgtcacagctcaggagaatgctaccaggggccaccgagccggtccagtatctggtttcacggtggggaactgaccccaactccctcggctcctactcgtgtgacttggtcggaaaaccagctgacttgtacgaaagattctgcgctccggtgggcaacatgttcttcgccggggaggccgcctgcatagaccactctgggtctgtgcacggggcgtattcgtcaggtatcgacgctgcagaggactgccgaaggcgcctctcgacgcagctcggtatctctgacctgttccaggtcgggaagattgtgatgagggaggagatgactgaagtcatggtccccctccagatatccaggctgtgaaaggaaggaagaacaagcctgtctactattcgacacgtgttctgttaacatcgtagctgtaatttacctctgaaactgtacaatttcccagtgtctgatctatgatgtatctctgaataacatgcggactttccctctgatttcatcactattggtcttgttatcattatatctgcgaagtttttttgggtgtggttctgctcatgttgaaaaccttgcggtgcctgcctaaattcgcacatgtggg

SEQ ID NO: 80 - DNA, 1334 bp, Setaria italica
atgagcagccagcctttctatcttccacttcctgccaacaggtcctcttcacctccaaagaaaccaaacacaacagcaaatagttgcaggcacagagatcttcaatggcgaacttctcatcgcaccactctgctctcctcctcaagatgcctgcggccttgaccaatggccactcccccaacctctcaagcctcttgttctacggccaaaaccatggccaaggagcaccggcgaatgccaacgcggcatcaggaacggcagcagccatggcggaggacgcttcgcttgagagctcctctgcagtggttgacacctccccgcagggtagtgcgtctccaatggacaggaagaggaaggccaccgaggacagtgccacacttagctctgctcactccaaggattgcaagcaggagggcaagagcaagagggggaagaggccccacaaggaggctgaggagaagagcaccactgatgatgaggcccccaaggggtacatccatgtgagggcaaggaggggtcaggcaacagacagccacagccttgcagagagggtgaggagagagaggatcagtgagaggatgagaatgctgcaagcactggtccctggttgtgacaaggttactggaaaggccttgattttggatgagatcatcaactatgtgcagtccttgcagaaccaagttgagttcctttccatgaggattgcctccatgagcccagttttgtatgggtttggactggacagtgatggcctccatgaccatgcacaaaagatgggaggcatgatccaagaagcccttgcaatgcctggtccagtcctgagccaagctagtccaactccatctcaaaccatcatggacaccaccaccacctcctccacaccctattcactgcagggccagggtgccatctctttctctcaggacaatggcagcaattacctgatgcaacaagcagtgggggaaccaacaaggcaggagctgctcaaccagttggtgttcaacaacatgtgctctttccagtaggagaagaatgagagagtgagagagagagagagaaaggggccccacattgacaataggaggaaataatgctgcgagatttggtaggagcaccagatgagtttgagatgttggatctagtccatccccttgtctggatttggagtgagcaagtagagtctgctgtttacacgttttcagagacctttgtaatatttgtagctcctttattaggcattgtccatgaggattttctaagcggctgcatctcatcatcgctgctgtagtcgactttgatcaatcagttgttaatacataagagagctatttttg

SEQ ID NO: 81 - DNA, 425 bp, Setaria italica
ctacgcctccccatctctctcgtcctcccgcgccgccgccgccgccgccgccgagtaggaaggaagaggaggaggaaggagcaggcggagatgggccactccaacgtgtggaactcgcaccccaagaactacgggcccggctcccgcgtctgccgggtctgcgcgaaccctcatggactgatcaggaagtacgggctcatgtgctgcaggcagtgcttccgcagcaatgccaaggacattggcttcatcaagtaccgctgaagacattgccttgctgctgtcatcgagaacttcacctgcatcaaagaagaaaatgatccttcaatagaaggctcaatttatgtgctttagctttttgttcagacaaggaatgatgtgctagtaaactacctgttaaagttttgatgggtgctatgtgcctgttg

SEQ ID NO: 82 - DNA, 2588 bp, Setaria italica
gcccaccactccagctgagggtcacatgcagcagcgttgcatctcccccacaaatccagcaaaaacacggcgccccagccgggagcgccgctcactgcacaccacccggcaacccacgccatctctccctcccccgcctccagcgctcgcgcacgcttccccacgacgccaagctaccagtctaccgcagctgagcagccagccagccaccacctaggcacctcctcctccctcccccccttcacggctcctctgctcccccctcactcactcacgcgtctcgcctcccctcccgttccgtaccgtgctgctcctcgctccacttcagatccaacgaaaccgtccgcccccaccgccaccgccggcggcagcacaccatgccgcggcgcccgccgctccgcgtggcggcggcggcgctcctgctctgctgcatcctctgcctccgcctcgcgtcggccgagcccgacgccgacaaggcggcgctgctcgccttcctcgcgggggtgggccgcggcggcgccgcccgcgcgcgcatcaactggcccaccaccccgctcgcctgcgcaggccccggctggacgggagtcacctgcagcgccgacgccacccgcgtcgtggcgctgcacctcccggggctgggcctctccggcgccgtcccctccggcaccctcggccgcctcgacgcgctgcagctgctcagcctccgcgccaacaacctctccggccggttcccgacggacctcctcagcctccccgcgctcaccgggctccacctccagcgcaacgccttctccggcgcgctccccgcggggctcgccgcgctgcagaacctccaggtgctcgacctctcctacaaccgcttcgaggggggactccccggcgcgctctccaacctcacccacctcgtcgcgctcaacctctccaacaactcgctcgccggccgcgtcccggacctcggcctcccagcgctacagttcctcaacctctcaaacaaccaccttgacggccccttgcccggctccctcctcaggttcgccgacgccgcgttcgcgggcaacaacgtcacgcgcccggcggcgccggtgccgccgccggcgctcctgccgccctcaacgctggccccgccttccactaagaggcgggtgcggctcagcgaggcggccatcctcgccatcgccgtcggcggctgcgtcctcgtgttcgccgtcgtcgcggtgtccctcatcgcgttctgcaaccgggacggcggcgaggagatgggcggcggtgcggtgtctgggaagggcggggacaagatggggagggagtcgcccgagtccaaggccgtcattggcaaggccggggacggcaaccggatggtgttcttcgagggcccgtcgctggcgttcgacctagaggacctgctccgcgcttctgccgaggtcctcgggaagggcgcgttcgggacggcgtaccgggcggtgctcgaggatgccaccacggtcgtcgtcaagaggctcaaggaggtcaatgccggccgccgcgagttcgagcagcagatggagctggtcggccggattcggcatgacaacgtcgtcgagctccgtgcttactactactccaaggacgagaagctgctcgtgtacgattactacagcaggggaagcgtatccaacatgcttcatgggaagaggggagaggacagaacgccattggactgggaaaccagattaaagattgccctgggagcagcaagaggaatcgcacacattcacacggagaacaatgggaagtttgttcacggcaacatcaaggcctccaatgtgttcatcaacaggcacgacttcggctgcatctcagacctcggcttggcacaactgatgaacccaatcaccgcaaggtcccgttctctaggctactgcgcgccagaggtcaccgacacgaggaaagcatcacaggcttcagacgtgtacagcttcggcgtcttcatcctcgagctcctcacggggaagtcgcctgtccagataaccggcggcggcaacgagttcgtccacctggtgaggtgggtgcagtccgtcgtccgggaggagtggaccgccgaggtgtttgacggcgagctgctgcggtaccccaacatcgaggaggagatggtggagatgctccagatcgccatggcgtgcgtgtcgaggaccccggagcggcggcccaggatggcggacgtggtgaggacgatcgaggaggtgcggcggggcgacaccgggacgcggccgtcgacggaggcgtccaccccggccgtggaagccgccgcccagaccagggcggagagctcatcatccgcagcacagtgagtgagttcaagttcattcgctggatgatcctcgcggatggtattcgttgttcttgtgttgttgcacggtagggagcacggatggggtcgatccctgtgtgctccggcgggtgctgtaccattcttttgtgttaagattccatcaatgttacgaaattgtaacagaatgtcatgtggacttggttcgattatgcagcaattgctcgctgctgattgtcactgagcgaaggatgaaaaattgctcgctcctgtgtccgctgcg

SEQ ID NO: 83 - DNA, 3394 bp, Zea mays
gtcccacctcaaacactcccgctcaaacaatctcgaaatttgaaacaacccttcccctaattttcaaatcaatcaatcaagcaatcccaaatccaaatcagagcgacctttcctctcgccccatcttccccgaatccccggatcccccaaaccctagcactgcatcccctcccgctatgtcctcccgcctcaaggatcgcggcggcggcagggccacggccgcggccacccgcccgctcaccccgaagcccttctccatttcgtcatccgcccggcagacgaccgccgccgccgggaaggagaacacggcgtccaagccgtccaagcccacctccgccgtgcggtggtccacgtcgtcgctcccgcgggccagcaggatccaaagctcggtggactcctccaagctcgcctccaccctcagggctcccgtgctgccggggaggacttccatcagtaaggatcccgtggtggaggcaggcttgcggcggagcgtcagtggtgggatcagggcttcttctgtagagaaagggaggaggtcgattagtgttgttggatccagggcctccgaggctaggagagggagtgctggcgctggtagtgatgacactggtagaagggcgaggtttgatgcgaaggcgaaggggtcggatgagatcagcaggaaaagaggtgaccttgatgccaaggggaagcagactgatgagattggcaggaaaagggagagctttgatgcaaaggccaagcagatcggtgggaaaagagatagcttttgtgtgaatgtgttgaagcaatgtgatgagaacaaagggaaaacaaatgcattcgtgactaatatgaagaagcaatgtgaagatgttggtgggcaaataaagggctctgattcaaaggtaaaggcagctgaagaaatcaatatgaagaaagaggggcccaataaattgatgaaggagatgaataccaaaaaggctgatccaggagaggctgcttccaaatctgtggaatgttgtgccatccagaaggatgacgatataggcaagacttctgtcatccctgttttcactgtccatgtggtgaattcaaatgatgtccctgatccaataaggaaacagcaaaagaataatgaagagggcaggaagcaggaagaaaaggtaaaattggcagacaggataggagtttttgagaaagtggctgcaggtggggagggagggtcagcaaaacccgtgtctgctatgaacaggtacccaagcaaattacatgagaaactagccgcgctggaagggagggttcagaagattgctaccgatatcaagaaaaccaaagaaatgcttgatgagaacaacccgaatgagccaaaacagatcttgtcaaatatccagaaggaaatcactgccattgagaaggcaatttctcatgtaaaggatgataataagatacagctgggtactgcagatagcagtgaatgtgagagctctcaccctgaaacagctgaaaaatgtaccataacaaagccaggtaacctgaagcaagctggaaaaggcttgaatgctgatgagctggaggcaaggttctttccacaccacaaattgttgaggggtcgcatatcttcaacttctactcaacaggagttatctgtggatgcaaaaaaagattgtagtggaaaaacaagacctgccgcatctgatcctggcgatgatgagaacagtatagccatggagtttctggcttctttagatggggaagaaaatgatttcttcaaggatcgtcgagctaagaaattggaaaagaataaaatatgtgaagtagcagatgctaccagcaagacatcaagtcaaggtagcacaaagaatccagttgctcccaatcataaggatgaagttgaattgcttgctacagaggagctagaagaatttgatgatcaggaaaacaagtcatccatgatgttacaggaagaaactgaggagtcatgcaatagtcagttatcgggtataggaaacaagtcttcaactggtggatggtttgtttcagagggggaagctgtgcttcttgctcatggagatggcacatgctcctattatgacattgcaaaccatgagttcaaatctgagtacaagcctcccagcttggtatcaaataatacgtggggcgattgctggttgattcgtgccccaggcgtagatggatgttctggtagatttgttgttgctgcatcggctgggaatgcattggagcctgggttttgcagctgggattactataccagagaagtaaaatcatttcatgtcgaggaggaagcttctcaaacttttgctccaacatccagggctattcttggtgctctctctaatgtaggctcatcaagatccagctctgcgctgtcaaatacagagaggcagcaatggtggtataaaccatgcggacctctcctgctatctactgctagcaagcaaaagatggtcacagcttatgatatacgtgacggtgatgttgtgatgaaatgggaagttagcaatctagtaatgggaatggaatactccagcccactacaatggcgtagcagggggaaagtagtaattgctgggagtgaatcaatagggctgtgggatgtgaattcacttaacccacaacccttgttgtctgttgcttctggtaagaaagtgtactgccttcacgtgaataacactgatgctgaggtgggcggcggagtgcgtcaaagggttagttcatctgaggtggaaggaaatgatggtgttttcagcacacaggaaagtgtcaatgtatttgattttcgtgtacctgctggcattgggcttaaaatagcaagacatggcggcacagcaaactcaatcttttcacgtggggactcggtatttattggtagcacagaaggaaggctgcaaataaaaggagggtcaagatcacgagttcagcaatactcgttgagaaaggggaaacttgtcgccacctatgagttacccgaattcaacgctcatatccatcactctgcgataacccaagtatggggcgactcaaaccttgtcttggctgcatgtggtatggggctgttcgcctttgacacgtttaaggaagacacgcagccaacctacagctttgaccgtggaaacaccattgcagcgagagaagctattggccctgatgatctgtactgtcctacatttgactactcatcatcaagggttcttctcgtctcaagagaccgcccggcacattggaggtacttgtaggctgtagctagctatttcttgtttattttgtgtgcaacatgccatgtaatatatgcactttgtttatgcttcacatgtggtgtcatctgccgtgtcaaccatctcgcgctttcactgtaatattatctagtttttacccctgcaattataaatta

SEQ ID NO: 84 - DNA, 1515 bp, Zea mays
ctgctccggacagagccctcgctccacaccgccggcgacctttttcctcctccgctcgaggagtgggccaacggagggagaccatatgggcgcggaggcagcgcatgggcatccgcagcagcagcctccctcgtccctccgacccggcagggaggccgcggcgccgcccgcggtggtggggctgcagctctcggcgctgatcgaccacgtcgcgcgcgtcgactggtccctcctcgaccgcgtccctggcgaccgcggcggctcgcagcaggtatccattgatgagctgaatcatattcttgatgaagtgaatgcccacatccttccttcccgcaatgatctcactccggtaactacaatagccggtggaagtgttgccaacacaatccgtgggctctcagctggttttgggatatcaactggaataattggagcttgtggagatgacaaccagggacttctgtttgtcaacaatatgagctttagtggtgtagatctcacaagattaagggcgaaaaaagggcacaccgctcagtgtgtgtgcttggtcgatgcaagcggcaatcgcaccatgcggccatgcctatctagtgcagtcaagatacaggccaatgaatttagaaaggaggatttcaaaggctccaagtggctcattgtgagatatgcacaacagaacatggaacagattgtcgaagctattaggattgcgaaacaggaaggcctttcagtatcattagatttggccagtttcgagatggttcgtgactctaggtctaaacttgttaaccttttggagactggtaacattgacctttgcttcgccaacgaagatgaagctagggaggttatagggggaagcctggaatcagatccagaggaggcgcttgcattcttgggcaagtactgcaaatgggccgtggtgacacttgcttcaaagggatgcatggcaaagcatggcaaacaggtcgttcgagtcccggccatcggggagagcaacgcggtggacacaactggagcgggcgacctgttcgcgagcgggttcctgtacgggctggtgaaggggctgccgctggaggagtgctgcaaggtcggggcgtgcagcggcgggtcggtgacgcgggcgctcggcggggaggtgcggccggagaactggcagtggatgtacaagcagatgcacgccaggggcttgctgctcccggagctcaagaactgaatgaaactattgctgctgtagctttagctagctaaatgcctgcatgctgcaccagctgttgtatctcccagctctcgaagactcgtagcatcacccagggccggtcgagtggccagtatccagccttccgttgttaattgctggcgttacctttcccctgctagtctgttaatgttactagaatattggtgtccatgaccatgcttgattgctggcatggtgaaggacgggcagatacattagttgatttgtagagccactcctaagactgaatcaatcagatggagtatattgattactgc

SEQ ID NO: 85 - DNA, 2320 bp, Zea mays
gccaccgctagggttttagcctcctccgatgcagccgcctcgccgcgcgcttgtcacatccctcctccgcctccgctccttctcctccattgcctatcctcatccctacccacccgcgcccctgcgacgccaccagttcgtcgccgaccccaccacctccacaaaccgtggtatcgtcgggggcatcggcggcgtcggttccgggaacgggaacctcttggacccgacgcagctcctccgcgatgacccggtggcaatcaccgcttccctttgggtatcctccttccgcgccgccgcctccacctccagctcttgtacccccacaccgccgcagccactcacccccttcctctctcgcctggagctgtgggtgctcgcctaccagaaggcgtacgctgacgagaccggctcctatctgccgcgctcctccatcccggcctccacgctcgcctccctcctaacgctccgcaacgccgtactcgacggccgcttccgcttcggcaaccgcctcacccccatcctccagtccccgcgcgccgccaacgcgccggaccctgccaccctctccaagcgcaagctccgcgccctccttacaacccccggcccatcgcccttccaggaccgcgtcgtgcaggagctgctcctactcctgctcgagcccgtctacgaagccaggttctcgccaaagtccttcgccttccgcccaggtcgatccccgcatgccgcgattcgcaccatccgccgcagctttgctccgtacctctggtatatcaagggcgacctctccccactcctgcactcgcctgatcctgctctcgtggtcggtgcgcttatccgtgatgtgcgtgataaaaaagtggttgatttgatccgttcggccctgctcacctcggtggtgaccgcaagcgatgatgctgcagtaaagaagaagaagaccaagaggaaataccagaagaagaaggtgctgccagagggggagccgaagcctgacccttactggctgcagacgttttttgggtttgcaccagaggaagcacagacacagcctgattggggccattgtggggtgctgagcccgttgcttgccaatgtgtgcctggatgagtttgataagtggatggaagagaggattaaggagttttacaagccatccaagtccgatgttgtgggaggggatgatggtattgagcagggcaatacatcatggccagagtttgttcccacgactggccctgacaagacaaggaaggtggactacattcgatacggcgggcatttcttgattggtgtgagggggccaagagcggatgtggcggtgctccggaagcagctagttgagttttgtgatcagcgattcaggatcaaacttgataacgagagcctccctattgagcacatcacaaaaggagtcatgttccttgaccatgtgctgtgccgtcgagttgtgtacccaacactgcgttacactgctacaggaggcaagatcattagtgagaagggagttggtacactgctctcagtgacagctagtctgaagcagtgcatcaaacaattccggaagcttgagtttttgaaaggagaccgcgaaccagatccacaaccatgcttccgtatgttccacgccacacaatctcacacaaattctcagatgaataagcttttgctgacgatggcagagtggtatcgctacgctgataaccgcaagaaggttgtcaacttctgctcttacattataagggggtcactggcaaagttatatgctgccaagtacaagttgcggtcaagggcaaaggtctataagatcgcgtcaagaaatcttagtcggccattgaaggataagaaaggccagtcgccagagtatcacaatttgctgagaatgggccttgttgattcaattgatggtcttcagtatacaaggatgtcgatggttcctgatcctgattacacgccgttaccatttggatggcggccagatcatgagaagattttgctggagtacataaagctcacagatcaacagacattgaaagagcagagaaactgcaccagggaggacgggcttataacaccacaggacaatatttcgatgcttgtatggggctacaagaaaaatgctgttttacttccttcaaaagtgagtgatgcccaaggatccacagaggaccttggttcagataccgatgaattgaatgaaaaagagctaggaaatgagggtaaccaaagtttccaaaagcttgctgaaatgtcatgagttttggcaaactctgtagtgttcccaaggggtatttgacttgttgactggatggttggtttgtgactt

SEQ ID NO: 86 - DNA, 1143 bp, Zea mays
aaacacacacaacaccagctcatcacatccatctcattctactactgcctcagagaccaagctgctgcaaccggagaaggagatctattctacaaagtgaagtacttagcttgggacatggaaaccgtcgtgggagacctcatggcgaccgagctgaggcttggcctgccgggcaccgtggacgactgcagccagcaccagcagcagacccagctgaaggtggccgcgccgccgtccaaccctactaggggcaagaagcgccccgccgccgaggaggaggaggcaaacaagcgcgacgcggaggcagcacccccggcggccaaggcgcccgtggtcggatggccaccggtgaggtcgtaccggaagagctgcttccagcaggcaaagcagcaggccgtcagcagcagcagcaaggcggccgacaaagaggatgctgcggcgccggcgcccagctgcacggcgtccgcagccgcctcaaacgccaccgccagcgccggggccggctcattcgtcaaggtgagcatggacggcgccccgtacctgcggaagctcgacctgaggatgtacaaggggtaccgggagctccgggaggccctggaggccatgttcgtctcctccggcagcgccaacaacaacaacaacctgtcggagttcgccgtcacctaccaggacaaggacggcgacctcatgctcgtcggagacgtgccgttcgagatgttcgctagcacctgcaggaagctgaggatcatgaagagatctgaagccacaggcctgggatcggcgagacaatgaagaaggtctgacgacgaccgagggcccgacaacgttcatgtcgatctcttctttttttttctttttgccccattattttattttgttcttcttgtccgagagaccccaagccaaaaggatgagcttggtgggtggcgcatcaatctacaaagcgcatgcatatacgcggatgtgtgtgcggctttggttctgtaagacgacgactagtagctaggtcttttttagcagcagcacagaagctaaggagatgcatgctgatgacgagcggttgtttcggcttagctctccgtatgctgtgtttgtacaaaccaaacaatacagttatcttcaccgtcgttgatcccttactaa

SEQ ID NO: 87 - DNA, 2261 bp, Physcomitrella patens
ccgggaggggatttcaaggtttgtctagactggcttcaccgacagaatatactatgggatccagcaagggtctcgcatcgcagggtcagcataacattttgccgttgtttctcgaggctcaattttatcgtttcgattgattgtccctgcagttcggagaccagagttggcaaggtgagcgcaggacctgacgatggaattggtacaaggtggatcagcctcctgttgttgttgttgtcacttttgatctcgatattaaaaaacaggaacgcggaggaggctatggcgacaaagcagagtggtggtgctcggcttagccccccggtctccacagagctatcgttgaggtcggaggaggaccggaacttgcttctggattcatcttctagcaaggagattgttgaacaggagttgccagtggcttggtataaacaatgtcaacatgggaggtggcactcttacgcaggtgcagctttctgcttggttgtagcactggtcatttgtgtgccattcttgagctatgaggtttttagtagatgggcatcgcgaggtttgcatccttggggtacatctcgcccgctgcagaagctggacaagccggttgtgattctcgtctcctcggatgggtttaggtttgggtataactggaaggcggccacgccaaacatcgataggttgaggatggaagggaccgaagctgacccggggatgattcctgtcttcccatcgaagacatttccgaatcactatagtattgctacggggctgtaccccgcgtaccatggcattgtagggaactacttccgagatcctaatcctgggagcaatgacacgttcaaacctggcgaattggacccgaagtggtggttgggagagccgatctgggagacggtggtgaatcagggattgcaagctgcgacctacttctggccgggatcgcaggttaagaaggggaattggacgtgcgaatcgaggttttgccaggattacaacagctcggttccttacgaagaccgcgtggacactgtactagggtatctggacttaccttcacgtgagcggccgagcctcattacgctgtacttcgaatctccagatgagccggggcatgaaactggcccggacgcgccgcaaatcacagctgctgtagtgcgcatcgatactatgatagggcggcttcttgcaggactggagaagaggggactggacaaagatgtcaccataatcctagttggggaccacggaatggttgggaaatccgaggacaagatgatttatttggaagatcttgcctccgaggttctgattcctcgagagtgggttatggattacacccctgtgctgcacattcgaccgccgcctaaccttgacgtcacaaccattcacagcagcatggcacgcgcgctcacgtcatccaacatgaacaacgccgagttcttagagatctacttaaaagagcaattgccgccccggttgcactactcgcacagcccccgcattgctcccattgtgggtttggtggcagaaggctacaccctcgcctacgctcgaactgacaagcccatcacctgcggaggtgaacacggctacgacaacgtactactctctatgcgaacaatcttcatagcccgtggccctcagtttgcgcaagggaggcgaattccatccttcgagaatgtggagctgtacgagatcatggctaacatcctcggcctcactccggcgcccaacaacgccagcctcaattttgctgcgtctgttcttcttcccctccgctcatagcactcccaattctttgtacctgatctttgctacctttggtctgtctgtccatcccttgtccaaaatccgacctttggtactgaacttgcggtgacgctttccgtaagtctcagatggttgattccggaagctggagcatatggtattatatcttattattgtgctccgcatttcagagctacatagttagttgtactaagattgcgattcattggtagcgttagtgcagtagtgtctgagttccggtagtggttctgtcaaattttggttgcaaatgctcggcattgtcgaatcctagtgcttgaaattgaggatcctaatgcactgatgtgatgggatttagtatcttattgccgtttatgttggtagttggtgatgatcttggtatctacagtttgaattcaggctttgtatggaattgctgcaaaaacaacacctaagttttgttcactgctcattgaattcctaaagaaagattt

SEQ ID NO: 88 - DNA, 1078 bp, Oryza sativa
cgttcacaccaccaccgtctcgtcgcctcgtcggcggcgtctcctccgcgcgagggtccccccccaaaccctagccgccgccattgccacgcgcgcgccccccaccccacgaatggaaggaggcggaggcggaggcggggcaccgtacgccacgcgcacggcggaggaggtcttccgcgacctccggggccgccgcgccggcatgatcaaggccctcaccaccgatgtggagaagttttacaagctctgcgaccctgaaaaggagaacttgtgcctttatggatatcctaatgaaacatgggaggtgaccttgccagctgaggaagtgcccccagagatccctgaaccagcattgggaatcaacttcgctagggatggcatgaatgagaaagactggttggcgttagtcgcagttcacagtgattcctggttactgtctgttgcattctactttggagcccgatttggttttgacagagaagcaaggaggcgactctttaatatgataaacaatttgccaacaatatttgaggtagtgacaggagccgctaagaagcaggcgaaagaaaagactcccaacagtagtagcaagagcaacaagcctagttcgaaagtgcagtcaaaagctgagtctcgttcgaaatctaagctgtcagcccccaaggatgaagagggaagtggtgatgatgagggagaggaagaggaggatgaccatgacaacactttgtgtgggacctgtggaaccaacgatggcaaggacgagttctggatctgttgcgataactgcgagaagtggtatcatgggaagtgcgtcaagatcacacccgctcgtgccgagcatatcaagcagtacaagtgcccggactgcaccaacaagagggcccgggcatgagtaacaagaagctgtgtcgaactgtgttagagtggagttgtcaatctccggatgtcatgatctcttagatattatcttgccctagcttttctagtttgtaagcttgtctctaatttaattttaaactgtaactgttgattaacctacctgtgtttaaagcttcatctttcctgtgttaattctagc

SEQ ID NO: 89 - DNA, 1043 bp, Oryza sativa
cccaacacaagctcagccagtttaccactcacactagctgagctagaactcaccactcactgcagttgcagcatggcgcctttgctgttcaaggacatgaagagcctctcgtgctcgtcgccggcgtccacggcgatatgcccgagcttggagcggcagccgatggtccggccacacaagggcggcgccattgctgcgagccctctctgccaggtccccggtgagccaagaacggttcacaggcaagactgcaggagagggcagcagcatcagcacaaggcggctgccgcgaatggcggcgagctcgtcagccccgccggctcatccaggtacctgctcagcagccgcgccgccgccgccgaggagatccaggaggtggaggcttcggctgctccggccgtcgatgccaaggtggtcagggaagagcaagctggtagtgatgtgaagaacactctgacgcaggagcaggtggttgtactgaaggtatcactgcactgcaaagcgtgcgcgggcaaagtgaagaagcacctcgccaagatggaaggagtgacatctttcaacatagacttcgcggcgaagaaggtgacggtggtcggcgacgtgacgccgctgggggtgctgaacagcgtgtccaaggtgaagaacgcccagttctgggcggcgccgccggcgatagccgcctgatgagagatgaaaacgcataggatcctctctggttaattaggtgcggaagcatgtgggtcactgatgctggaccagctcgctctgctgtctgtgtgatggtggtggtggtgtctcctagatcgatgagagcatgcgtgtgtgtgcgcgtcgtcctgactgatcctgaagcaaagcatgcagatgcagctttgcttcttactgtgatccttttggtttcttgtggttggcaccatgctgagctacatgcccgtcactgtgcttcttcttccgtagactgatgagagtgtttgtgactatatatctgctctaagtgtaagtggtggtgttgttcttttgcatgctcttactgtaatataaac

SEQ ID NO: 90 - DNA, 4784 bp, Oryza sativa
gagcgccaatctcaaatcgaaatcccgctctctctctctctctctctctccccccccattcctccgcctcaaatcgcaaaccctagccgtcgccgtcgacgagaggtcgacgagaagtcgacgagaagaggaggaggagaagctgctgctggtggtggtggtgctccgccatgaacaacttccacgtctacgaggccatcggccgcggcaagcactcgacggtgtacaaggggcggaagaagaagagcatcgagtacttcgccgtcaagagcgtcgacaagtcgcagcggtccaaggtcctcaatgaggtccgaatgcttcattccttagatcatccgaatgttctgaaattttactcatggtacgaaacctcagctcatttttggttaatactggagtactgcgttggtggagacctaaagggcttgcttgagcaggataagaagctgcctgaaaattctatacatgacttggcttatgatcttgtgaaagctcttcagttcttgcattcacaaggaattatatattgtgatctgaaaccatcaaatgttttacttgatgaatctgggtgcatgaagctgtgcgattttggattagcaaggcgtttgaaagacatagagaagaccaatcctggagatgtgccgcaacctttgaaggggactccatgttatatggctcctgagttgttccaagagggaggagtgcattcatatgcttcagatttctgggcacttggttgtgtattgtatgaatgctattcaggaaggcccccttttgtggctaatgaatttacccagctagtcaaatctataatttcagatcctacaccacctttgcctgataacccctcaagatcctttcaaaatctgatcaattgcttactcatgaaagatcctgctgaaagattacagtggtctgaactatgcgagcatcacttttggaggagcagaatgtcaattattcctttacctcctcagcctgcctttgacaacatggtcgacctttctgctacaccatatttagttgagagaaatggtgataaaccttctagacagtccacaccacccaagccccgtgatggcctacggaagaaggacgaaaattctgctaaggtgttcacccctgttaagaatatgctaagtggtaagaaaaacaatgcaaaaccttcctgtaaggctgatggattgaagggtgtaaatatcctcaggatgtctcgtgtagctaagaggaatttgcagagagaaaaagacaaggagaactacaggcgacaccctacagaagcttctgagaatgatacagaagttaagattgaaaacaatgatatggaacttgattttggtgaaaatccagaaggtgatgcacctgatgacaatgatggatcagacaatcctggatccgcagaagatgaaaaactttccactcaaggcactgatggtaatgaagagaactgcatgagtaatcagatggatatgctcacagatgaaggcccagttaaggctgaaaccatgataaaaactgaacataattgttcagaaaatcttgatgtggtggccactccaccaagtatttgtatgaggaaagcacaacgagcaaagacaacttcaggtgccgcagctggttccgagccatctgacatctctgcagcattctggcatccaacagatcttgctgttaaaccagttatgcctggtaggaaaggagataaagctgtagagacagtccctatgcttccgtttgaagctcttcctgctgttgattatattaagttgccacgggaacaaatgaatgcattcaatagtcagatacttcagagtttaagtggtacttttcaggtttcagagaaacagaatatcatcaaatacctggagatgttaagcatcaattctgatgctgcaaatataatcacaaatggtccaattatgctgttgcttataaaaatgctccgtctgtcaaaaacttcagtattgcgtgtccaaattgcttcacttatgggattgttgatacgctactccactatccttgatatagagctggcaagttcagggatttttaatgcactatcagatggtctaagggacaagcatgataaactcaggcgattctgtatggcaacactaggagaattactgttctacatttctactcaatctgatcaagataccaaagaaatcaatgcccaagaatcccctttgaaggataacagggccacagcttcttggcaggttccaagttctgtaattgcgctggtgtcatcaatcttgcgtaaaggtgaagatgatctagcccagctttatgctttacgaaccattgataacatctgtagccaagggacagattggacttcacgtttcgcttcccaagatgtaatcagtcacctgtgctacatctatagagcaactggtaagcaggagaatacaagacttattgcaggatcttgtttggcacgcttagctcgcttcagctcatcttgtattcatttaatactggagaggctggccttcaaggatatcgcatgcacactcattaaaggcaattcacgtgagcagcagatcagtttgaatcttctgaattcagcactagttaacagccaaatcataccaaccatgaaccgctacattcagtcgttaacagaagagaagcagttggttcctggactcatctctcttattgaacagggaactgatgttctgcgtggcaaaacccttctatttgttgctcttctttgcaagaacagtcgaagatggcttcctcatttcttttgcaatgcaaaactactatcagcagttgatagattgggaaaggagaaggaaggcttcattcatcaatgcacagaagcatttgtgcagttggttgcttcattggtcccaggcatccttgacactgtctctagtgatatacaacaggttatgggaggcaagcgtcatggagctgctactgctttaactggacgagctcatccaaagagcataattcatttgtttcctgttatccttcatcttcttgggagtgtttcattcaatcacagagttgtgacgagccatgtattgcttcagttggcaaatcttatgaaaattttggaagcaccatttcaggctcgggatgattttcaaatgacactattgagggttcttgaggcagccacggaggagccttctgttatacttaatgaacacaaaatattcacaagtcgaatccttccaagcttatccgtcttgtacaagggcaataaagatggtgatgccagattcctatgtttaaagatactgtccgatgtgatgattgtgatcttcagtgactcttcattgacgtctaatgagcaaacagtatctgacctggaaaagatctctcagaagtattttctccccatgtatccatcatttgcagaggatgaagatccaatacctatatatgcccagaaacttctggtaatgctgatggagcatgattatgttaaggtttctgatattctcaatgaagcaacagtatcccggtgctttgaatttttgctaggagatttgtctaatgcaaatgtaagtaatgtcaagctttgctttgcattggcatctgctcccgatatggacaccgacattctttctcagcttcaagttgtcagaagaatagggaacctgctggagtttgtgactgcaaaagatatggatgattttctagaaccaaccttggaactttgcagagcattcattatccggggcatcagcagtgacaaaattgtggccctttccaaagagcccgcactccttgttgatagtgccttcagcatgagcattgctgtcgatcaacaatcatgcgtcatggatatatgcgactttggtggcaacatgggcattttcctcgacctagttggaagttcagatccacatataagcgatttggcatcagactgcttggtgctgttactcaaagcagcacctcgggaggctacggtgggcttgctgaccaatcttcctaaactgagcgttgttctggacctgctgaagcatggcacctgcctaaggctgactcgcctgctgtattgcctggccttctcctgcaggcaatatctagcgcaaggaatgatcgtgtcgatatctttgtcagccttgatgcgagtagaagcactcgtgtcggcattcaagggttcacatgatggctgccttgctgacgccgcctcatatttgggcgctgaactgcagcgtttacctcgctgtggttgagccgaagtttggtcaggtgctggcttggttggcattgtgcaagtgatgttcatagggatcataagagagggcctcagccttgtatttcttcaccgtttcttgcaccaagctatgatcatgggttctcaccatccgaagtgatgactgatgaaccatccgattggctgtgtgatcatttatctatatgcaacgtggagctgctgttctttcagtataccatttctggccaaatctggagaggcagcttgtggccaaaacccttcctgtatttcccctgtgccaattttggttggcgtttcatcggttttcagtttctcaccatgtaatgctgtagagtttcatagcccttaaaatcatgtatatttgtacactcccttttactttaccaagcaacggggtggaaatttattgttatgaatgcctgtaaagctctgtgaatctgtgaaccaacaggactatattggagcatggtgctatcaacctagctgccgctgtctaatggtcccttttactagataattccagtgttctcggttaggaaaatctacggtgattatataatcatcactggcc

SEQ ID NO: 91 - DNA, 2333 bp, Oryza sativa
actcacgcagctcacaggctcacagctgcagctacttactactggtacgggctcagggccagcagccagagtgaaggggaggcgaggcgaggcgagccgtgtcaatgtccaagaaatgtgatggcgcgctccggtgaggcgactggttaggttagccgaggagggggaggaggcgaggcgaggcgagggcgagatgacactgcagatggagccgccgccgccgccgccgaggcggtcggtgtcgacgagctgcgacctgcacccgggggagacgttcacgggcttctgcgccgcgtgcctccgcgagcgcctcgcggggctcgaggcgtccaccgccgccgcggccgccgcgccgggccgcaggtccacctccgccatccgctcgctcttctccaggccattcgtcgccgccggcggtggcggcggcggcggcggcggcggcggcgcggtcccgtcgggctccagcgccgcggtcccggacctccgacgatgcaagtcgttctcctgcggccgcggcggcgacgtgctcgccggtggctgcggggacgagccgcagcggcggtcgtgcgacgtgcgcgggaggagcacgctctgggcgctgttccaccaggacgaccgcgagcgcgtccgcgacggcacggcgttcggggcgttcccggcctcgtcctcagccgcggcagcggcgctcgcctctgaagtacaacctcagccgccgccgccgccgccgccgtgcgttcctgaggtgttcctggaggaggagatagctatggctgaggagtctgacgagattactccagtggtggagccaatcttggtggtggacacctccggggagatggaaacggaagccaatggtggacgggaggccaaggccatgaaggaccacatagatctagagtgttcgcaggccaagaagccgcagcccaaggacctgaaggaaatcgccgggagcttctggctcgccgcctcggtgttcagcaagaagtggcagaagtggagacgaaagcagaagctcaagaagcaggacgccgctggcagcaaggcagcagccgcagcaatgccgccgccggagaagccctccaagccctcgttcctccggcggagtcgcctccgtggagaagcctgctcggagttcgccggaggtcggcgttcgtgcgacactgacccaaggttctccctcgatgccggccgaatgtccgtcgacgatgtaggcttctcctgggacgagccccgcgcgtcgtgggacggctacctgttcggcgccggcaccggcattggcctcggccgcgcgcccccgccgctctcccgcctgccgcccattctctccgcgatggaggactccccagccggcatcgtcgagcgttccgacggccaaatcccggtggaggacgactcccagccggagcccgatcccgacgccgacaccccgggcggctcggtgcagacccgagactattacgacacgtcgtcgtcaagccggaggcggcggagcctggagcggaccagctcggtgcggaggccgtcattcgaagtcaccgacgcaaagccagtgctgccggcggcggccgccataacaagcgtcaaagattcgccgctaattgggagctcagagttctaccacttccagcatgccgaggacctgctcgaacaccaccggttcagcaccagctccctcatcgaagacttccccatgagcctggacgccgcgttcccgggccccgacaagaagccccggaggtggcgcaaggcgtggagcctctggggcctgatacaccgccgcgccgccggccgcaggggcggcgcgtccgacgtcgcggacagggccttctcggagccgtggccggagctgcgcgtccgcgggtgcaacgccaggatgcagcggtgcaacagcaacgccagcgcgcggagctctttcagcagcaacagcggcggcctcggcagctcgaggcgcagctacgtcgacggcaacggcaacgtcgtcaagcggcggcgggaggagtgcgccctggagcgcaaccgcagcgcgcgctactcgccggggcacgctgacaacggcatgctgcggttctacctcacgccgatgcggagcgccagcggccggcgcgccccggggctaccggccaaaggcggccggcaactgaggtcgcaatcgttcgcgcgtagcatgctccggctgtactgagttgtgtttttcgttgcagcagtagtggaggctcaatggcaatggtataaccataaatctttttttacatccttgtgtagcgcagtgttaattccgttcatttggggggttggattggatagaatggaggtttatctcataatcacctctt

SEQ ID NO: 92 - DNA, 1396 bp, Oryza sativa
ttcatccgtgttcttgcctttcttggagcttgccaggcatggctgctgcggtagtggcgaggtgtggtggtgccaagaagcggaagggcgaggggctcggggagatgcacgacgacgtgctcgagcgcgtcctggcgaggctcccgccggcgagctacttccggctcaggggggtgtgccggcggtggagcgacgccgcgtcgtcgcccacgttcctcgccgcgtgcggccgcgtccccgcgcgcgacccgtggttcctcatgctgtcggagggggaggggcaggagcggcgtcttccggccgtcgcgttcgacgccggcgagggggaatgggcgcggtgcgggggcgcgccggggcacgtgatgccggtggtggccgcgtcggggggtcgagtgctgtaccgcgcgccggacaccggggagctcaccgtggccaacccgctcaccggcgcgtcccgcgtgctgcctgcgccgccgcccggcgccgcgctccacgccgttgccatgtacggctcctccccctaccgcgtcgtcctcatcacgggcgacctcccggacctctccatgacggtgttcgactcgtccaagaacgcgtgggacgacgcggtggcgctgtcccggaagccggatgcctcgtcgcccgagcgcgacgcggagggcggcgtcggcggcggcggcggcggcggcgacgacgagacggtctacttcctgagcaagtccggcgacgtgatggcgaccaacatgcagcggagcgcgtcgaggcagtactcgtccgccgtcacgtgcggcgacggcggcgaggccgtggcctacttcctgagcaactccggcgcggtggtggcctgcgaactgtcgcgccgcgccttcgccgagctcccccggatcctgcccgtgtacttcgagtactccatcgacgtcgtggcgtgcggcggccgcgcctacgtggtggtcctctcggagctcctcggcacggccagcctgcgcctgtgggagttcgccggcggcgcgtggcggcaggtggccgcgatgccgccggccatgtcgcacgcgttccacggcaagaaggccgacgtcaactgcgtcgggcacggcgaccgcgtcatggtctgcgtcagctccggcgaggccaacggctgcttcatgtgcgacgtgccgaccaaccgctgggaggagctcccgccgtgcgccggcgccggcggcgagcccatggacttcgtggccgccttctcgttcgagccaagaatggaggtcaccgtctaagcaccattgatgtgtacttgtagtatcttagtatgcagtgagatcgattgatttcagcttgtgtagttgtgtgtgcatgattttgttgggtgatttgaggattattttcatgggaatcaaagccacccgtctgtctc

SEQ ID NO: 93 - DNA, 1276 bp, Oryza sativa
tcggcttccccaccacgacaaaacctcgtcctcatcgagtcaaaacaacccatgaaaccctaaaaccccaatccccccagcccaatccgccattgcctccccgatgcaagcgtccgcgcgcctctacaccgccgccgcatccaagcgggtgattgcgggcgtctctagcacgatctcgcgctcgtgccaccggacttgccgatggaagtcacatgccgcgccgctgtccgctcaggaggcgcccaaagggccaaagaggatgaccaagcaggagaggagggttaaaatagagaaatttgttgaggagtataaggcatcgaatgatggtaaattccccacgatgacgactgttcgtcaacatgttggagggggtcactacacggtgagggagatagttcaggaacttgagtacaaccagagaatgttacaactggaccagtctaaggcagctgagctgcccgaaacagctgaacattctgagcatttaaagcccaaggatgtccatggaaatgctcaatttaattctgaaagcttcagtggaaaccaaaatacagatgaccttcacctctcccagaaagttgctgctaccagcactgaaatcatagataagactgaaacatggagattggaagaatcacagatgacatcaggcacttctcattacactggagaaacagaagctgtcaagcaagaccttcacactgcagatagtttacagggtgcaaatgaatcaatcaagtcatgtcaaacagaaagtgacagcataaagaatgaagattccatatctctgggactagatactaaatcagatccaactgacctagaactaggggaaagcaaatctgacaagatagagctgaatagtacagcaaggtttaagaatgtcagtgaaccacctgtatcagatccaattgaaggtgataagacggtcaaggcaaatgtactggacagagaagagaacccggaggttgagccgaagacaggtctttttgggagcctgaaatcttttgcttctgggatcagaaatttttggagaaaactgtgaatttcttgttatgtctggaagatgacacattcctcttgctgctacgactttgcgaggctggagcaaattatgacgttttctgaaagctgtagaattggttatcagcctttgaaatttgtgagcctgaagcaaattgtaaagtcgcctttaagctaccgaagtaatggtcaaattcatgctgtcacgttactgacaagctaggtatgagcattgtgtatccattgggcgatc

SEQ ID NO: 94 - DNA, 2957 bp, Oryza sativa
cacacaccaccgctccgctccatgtcgcaccactacccatgcctccctccccagcttcttccacctcctgctcccctcgcctacccacagctgttcacatcactcccgctcctcgagaacaccactccctcctactagtagcttctctctctctctcttcttcttcctcgctttgcttgggttgggttggagcggtgagacgagagattgaggggaggagaggagaggacagcagctgcccctcgattcgattcttgagtgatcatcttgggcttgggcgttggcgccaatgctcgcgcggtggctgctcgtgctgctcctcttgctgcctgtttcttggtgtcatcaagatcggcatggccgccgccattacccgcggcggtggaggagcagcggcagtaggagggagctgcacgagccgctgttccctctcgagaacgcgcccgcgctgccaccgccgccgccgccgccaccggcgccgttctttccgttcttgcctgactccgccccgccgcagctgccaccgccggtgaccacgcccgctcccgccggtggcgccggagatggtggtacggacgcaggcgccgccgccaccggggacgcgtcttcgtcttcgtcctcgtcggcgtcgccgcaccccacggcgccggcgaacatctcgtacatggccatgcccatctaccactccgcgccgctccgctccttcctgtcgtcgcaccgcctcctcaccgtcctcctcccggtcgccgccgtcctcgccgccgtgctagccgcggcgctcgtctacctcctcacgcgacgccgccgctgctccaagggggagccgcacgcggcgcatacgaaggccgtgctgctttccccggggaactccacggcgctctacgacggcgaccacgaccagcatggccgggggtccaccgccaccgcagcctccagcgccagctcgccggaactccggccgatgccgcctctaccccggcagttccagcagacgaggacgagcatgccgtcaacttcgcaaaccatccatgaagccggagcagaggacaagcgagcgccgccaccgcagagtgttcgaccgccgccgccaccaccaccacctcctcctccgccgccaatgccgccgagaacggacaacgcgagcacgcaagcagcgcccgcgcctcccccgccattgccgcgagccggcaacggcagcggctggctgccacggcggtacacggagcgcgccgcgccgacggtgatcagggcctcggcgggggcagtccacccggaggagtcgccggcgcgcgcctcgccggaggagaaggccgccgacgcggccgctcggccgaagctgaagccgctgcactgggacaaggtgcggccggcgagctccggccggccgacggtgtgggaccagctgaaggcgagctcattccgagtgaacgaagagatgatcgagacgctcttcgtctccaactcgacgaggagagcatccaagaatggagtcaaggaggcaaatgcagcttgctgcaaccaggagaacaaggtgctggacccgaagaaatcgcagaacatcgcgatcatgctgagggcgctcgacgcgacgaaggaggaagtctgcaaggctctcctggatggccaggcagagagccttggaactgagctgctggagacacttctaaagatggctcctagcagagaagaggaaatcaagctgaaggaattcagggaggatgccgtatctaagctcggccctgccgaaagcttcctcaaggcggtgcttgcgataccatttgcgttcaagagggtcgaagcaatgctctacatcgccaacttcgattcggaggttgactacctcaagacctccttcaaaactcttgaggcagcatgtgaagagctgaggggcagcaggttgttccacaagatcttagatgcagtgctgaagaccggtaaccgcatgaacactggcaccaaccgcggaaatgcaagcgccttcaagcttgatgccctcctcaagttagtcgacgtaaagggtgcagatggcaagacaacccttctgcattttgttatcgaagagattgtcaagtccgaaggtgccagcatcttggccactggccaaacatccaaccaggggagtgccattgcagatgatttccagtgcaagaaggttggcctcagaattgttgctagccttggtggtgagctcggcaatgtcaagaaggcagctggaatggactcagacacactggccagctgcgttgccaagctttctgctggtgttagcaagatcagtgaggccctgcagctgaaccagcagctcggttccgatgatcattgcaagagattccgcgcctcaatcggtgagttcctgcagaaggccgaagctgagatcaccgcagtgcaggctcaggagagcctcgccctctccctcgtcagggagacgaccgagttcttccacggtgactcggtgaaggaggaagggcaccctctgagaatcttcatggtggtgcgcgacttcctcaccgttcttgatcatgtctgcaaggatgtcggcaggatgaacgaaagaacagcgattggatcttcgctccggctggagaatgcacctgttcttgcgaggttcaacgcagtccaacccagtagctccgaggaggagagctcatcgtcctagccgttggagcctgcatgttattgtctgaagaaaagcaatgcaggctaggactttagaatcacataagtattttgtaactgtagcagataagtgtagatcaaagtctatatgtactagtacatgattcagcatgctaagcatcatcccagccaatggcctaccaaaggtgaaagtggcattgtacatgattcagcatgctaagaatcactagacaggagcttttgtgatcatgctgaatgcttgaatctcgtgataaaagtaaagtactcctagcaatagcccccttttaatcctctttcaa

SEQ ID NO: 95 - DNA, 1756 bp, Oryza sativa
ctcctcctcctcctccacacatgcatgcacaccaccctcgcatcgcattcaattcccgcttgcccccaccacctccctccatatcaacatcccgccactcccatctccccactgctgctcctcactccactctgctcgctctctcgctcgctagctatagcctatagctaggtacctagaagcctagaggataatatgagccgcgcgcagcctggcggggcggccgccggcggcggcggcgcggcgaggctcaagccgtccccaagggcgctcttctcgtgcgggatcttcagcacctgcacgcacccggcgctcagcccgacggccacgcccaacaacaatgtcgtggcggggatgggcggggccaagggcggatcgggcacgccgtgcggcggggatgcggccgcggcgtcgccggtcgtggaggcggcggcgccggcggtggagatgagtagtcatcatcagcatccgcagcagcagcagcagcagggtgcggcggtgcagaggagcgtcgggccgtcgtcgtcctcgtcgtcgtcctcgtcttcggcgtcgcagagcttcacgcagtggaggctgccggtgcatcacccgccgcaagcgtcggggtcggcgggaggaggaggaggtggtggaggtgggggtgggggtgcggtgatgatgagcgcggaggagaagttcgcggcgggggaggtggtggcggcgctgcggactgtggagagggagatggaggcggcggcgagggcggtgccggtcgccgtcgtggccggggtcgtggcggcggtgcgggagccggagacggcgaggctcgcggcgaaggtgctgttggtcgtgctgctggaagaagggaacagggaggcggccgtcgaggccggcgcggcgtcggcggccgtggaggcggtggcggcgtccgggccggcgggggccacggcggagcgcgcgctggcggcgctggagctcctctgcaccgccgccggcggcgccgcggccgtgcggagggagcccctggccgcgcccgtgctggcgcgcgccgtggagggcatggccggccgcggacgcgagtgcgccatcggcgtcctggcggccatctacggcaggaacggcgacgaggccgcctcgtcgccgccgtcgccgccgccgccggaggtggtgaaggcggtggtggcggcgatgcagggggagtgcagcgcgcgggggcggcgcaagggcgcgcagctgctgcgcgcgctgcaggagggcggccgcctcggcctcgcgtgggacggcgtcggcgagccctgacaatgtgggcccaggaagccagcctctcgcgatcctgggccccacccgcagtgagagagtgagacagggaaggggtgggcccagcgtgttgggggtgagcgattaaaacggtgctgtcccctttggcgactgagttgtggtcaccactgtaggtttgtgatgaatgtgtacgatctgttccctgaaatttgtccccacgctgcatgccgcatcttgctccattaccccaaattttccattcaattactcaaccatcaaaatttcaaaatttcatccgccaggcataattcaaactccctctacatgtaacatgaagattcaagccttgttaacttacacaccatcaaactcctgttccatttcatcagttggtaccgaaacaaagaggagcaggcaatgcatttttcgagtagtttcacgaaaacgagcaagcaaaaaagaaaaagaatccaaggtgatagcaaatgaacagtag

SEQ ID NO: 96 - DNA, 2189 bp, Sorghum bicolor
ctgcatcggaaccgatcccattatttgtttgttttcgttgtacgagcgatctcctggacggctccggcacgttgcaatattcggtcttctcggcgacttgttcttgtactctgcttctctgctgccgctctgagccgtttgccgttgctgctgtggacaagagtatgggatagcggtgctgtgctgcgcagttcttgcttcttacaagtggtggtggtgatagtggtctggtttctgtgcgagcatttggtggtcttagaggagcgggaagctagctgtgcggctcttctttcgtgttcaagatgaagttcatgaagcttggatcgaatccggatacctttcaggacgatgggaatgaagtcagtattgcggcatctgaattggtgagcgacatcactgttcgcatagggactacaaagttttaccttcacaagtttccgctcctatccaagtgtgctcgctttcagaaattgattccaactactggtgatgaaaatattgagatccacatccatgatattcctggtggtgcaaaggcttttgagatctgtgccaagttttgctatggcatgattgtcacactcaatgcctacaatgtgattgcagcccgctgtgctgcagagtacttggagatgaatgagactgttgacaagggaaatctgatctacaagattgatatcttcctcagctcaagcatattccgaagctggaaagactctattattgttcttggtacaacaaaggctcatttaccttgggcagaggatcttaagctggttagccactgcattgactctgttgcttcaaaagcctctattgatgtttcaaaagttgaatggtcatacacatacaatcgtaagaagctcccaactgagaatggtcatgattcaccatggaatggagtcaagcagcagcagtttgttccaaaggattggtgggttgaagatctgacagatctcgacattgatgcctacaagcaagtcataacagcaatcaaaaccaagggtatggtgcccaaggatgtgatcggtgaggcaattaaagcctacacttacaagaagctcccgtcactaagcaaggtctcaatgatccatggcgatgcaaaagttcgggctatgctagttaccatcacatgcctgttgccatctgagaaaggttcagtttcatgcagcttcctcttaaagctactgaaggcaacaaatttgctgaagtgcggagaaatgtgcaggaaagagcttatgaagcgcattgcacggcaattggaagaagcatcagtgtcagatcttctgatccctacagtggatggggataccactgtttacgacattgacctgattcttagcattgttgaagaatttgtcagacaagatagtaagaatgcccagagacataatggtggtgaagtgaatgaccatgtatcagctcctagtgcatcaatgattacagtggccaaaattgttgatggatatctcgcagaggttgcaaaggacccaaatataccggtctacaagttcttcagtctagctgagacagtttcagccaattcaaggccggttcatgatgggctgtatcgcgccattgatatgtatctgaaggagcacccaggcttgggcaaaagcgataagaagaggctttgtgccctcatggactgcaagaagttgtcgccagatgcatgtgctcatgctgtgcagaacgagcgcctgcctctgaggattgtggtgcaggtgctgtaccacgagcagacaagggcttctgcagcagccaccatccgagctgacagcatcggcatcggctcctacgagagctcaaggtcaggggccacaacaaacacagaagacgagtgggacggcgtcatggccgtggaagacctcagtctgtccaagaccacgaagctagacaaatgtcacacagccagcaccatcgtggagaagaaccacggtggcaacaagggtgccaacggcagggtgaaaggtggcgcaacgtcaaagaaggcgcttgggaagatcatgtcaagcaaagggcagactggggagcgcagcagctcggattcatccgacagcgccatcttgcccagccaggagcatcccaagaggacccccgcaaggagcaccaccaagtcagctgctgcgtagctgcagccctttgctgagtgaaatgcttaaggagcactaggttgtagcagtcgtctg

SEQ ID NO: 97 - DNA, 1516 bp, Glycine max
ggagaagaattaagcactcggttgcagaacagaacaaacttctttcactctttcgcttctgaatcttcaacaatggtgctcgaggcgacgatgatctgtatcgacaattctgaatggatgcgtaacggagattactctccttctcgatttcaagctcaagcagacgctgtcaatctcatatgcggtgctaaaacgcagtctaatccggaaaatacagtgggagttctcacaatggctgggaaaggcgttcgtgttttggttacccctaccagtgatctgggcaagatcttagcctgcatgcatggactagatataggtggtgagatgaacctagctgctggcattcaggtggcacaattggctcttaagcatcggcaaaataaaaagcaacagcagaggattattgtctttgctggaagtcctgtcaagcatgaaaagaagatgctggagatgatagggagaaagttgaaaaagaatagtgttgcacttgatattgttaattttggtgaagaagatgaggggaagacagagaagctggaagcactccttgcagctgttaacaataatgataccagccacattgttcatgttccatctggtccaaatgctctttctgatgtacttataagtacgcctatttttactggtgatggggaaggtggaagtggttttgctgctgctgccgccaccgctgcagctggtggtgtatccggatttgagtttggcgtggatccaaacttggatccagaattggctcttgctctaagagtttcaatggaagaggagagagccaggcaggaagcagctgcaaaaaaggctgcagaggatgctgccaacctagagaagggagatgagcagcaagcaagctcacaacatgcaacaatgactgagcgtgccggtgcagcaacatctgaagctgagaataagacaagtgatttgatggatgatgagaatgccctactacagcaggcacttgcaatgtcaatggatgattctgcaattagccatgatgtaaaagatacagatatgtctgaagcatctgcaagtgatcctgacttggctctggcacttcaattgtcaataacagatagtgcaaaggatcaatcaagccagtcagacatgagcaaattgttagctgatcaatcctttgtatcttctatccttgcatcgcttcctggggttgacccaaatgacccttctgtcaaggatttgctggcgtccatgcaaaatcagtctgagcctcaacagaagaatgacgacaagccatcaaacgaggaggagaagaagtaatctttaagagccacttttccctgtatgatttttattttgttggtagcattcttcgcggctgttgctaatcggggaactattccaatatgtctctctgcagtttaattggaacccaatgcatgtctctcgattgaatattggatgatttttaacttaaaaaatgctcttgattgtcatgccttattcttggttagtgcttatcatctgacgagggcttttaaatgac

SEQ ID NO: 98 - DNA, 685 bp, Arabidopsis thaliana
aaaggaagcaaaagagtttgatcccgtcgtcgagctttcgaactttcgatcttcagcttttctcaggtgacagacgtcgttgtgattcaaatctttttccggtgaacttaatttcggaggctattcgatggcatacgtcgaccatgcgttctcgatatcggacgaagacctaatgattgggacttcgtacaccgtcagtaatcgaccaccggtgaaggagatctcactcgcggtgggtctactcgtattcggaaccctaggaattgttttaggtttcttcatggcgtataaccgtgttggtggtgatcgaggtcacgggattttcttcattgtactgggatgtctactgtttatcccggggttttactatacacggattgcatattacgcttacaaaggatacaaaggtttctctttctcaaatataccatccgtttaagccttatgacttggtgtctcttctctcttactcaatgtataggttgtttacgtttttattacttgacttatgctctttagtgtgattttacatgacttgaatgagccatgtttgatacatatgtatctcttttggtttctccttctctatgttagatcattagtcttcgataaccatccttgtataatgtagaccaagctaatcacatgtgatgtatgtttgatatatatcctctgttggtttctc

SEQ ID NO: 99 - DNA, 1488 bp, Arabidopsis thaliana
ctttcttttgctcagaacacaacttgctttgaactcttttaccttcttcttcttctttagattctctgtagcttgaagtggattcatgaatctgtaatctcgtctctgtatctaaaaagcttctgcttttaacattatctctgtttcataagcttctagaagcttcaatggcggagtatatctgtttattcggcaaggacagtgcagcgattgttataaagcaaccaaagaaatcaccattattcttaaggatgattgttttagtgtttgctatggtttgtggtctctacatttgcgctgtttgcttaaaacagttaagtaatgtcagcttccaaacctcccaacttgtccaaactagtcctattgattctcactcgctacgctttgttactcggattcattatccaaagcctcagacttttaatagagctgaatgtggacataatccggtgaggtactttgcgatattgtcgatgcagagatcaggaagcggttggttcgaaacattgttgaatagtcataacaatgtgagttctaatggagagattttctctgttttggatcgaaggaaaaacatttcttcaatcattcagactcttgatagagtttataatcttgattggtttacgagtgcttcaaagaacgaatgttctgctgctattggtttcaaatggatgcttaaccagggtttgttggagaaccataaagacatagtagagtactttaaccgaagaggcgtctctgcgatatttctgtttagaaggaatcctttaagaagaatggtttctgtgttggcaaattcttatgaccgttatgctaagcttttgaatggaactcataagtctcatgttcattctcctgcagaggcagatgcactttctagatataagccggtaatcaactcgacatcgttgatccacgatttacaagaaacagagaattcagctgcaaaggctttagaatatttcaataccactcgtcatattgttgtcttctacgaagatctcataacaaatcaaacgacattgaaacaagttcaagagtttttgaacattccagtgaaggatttgtcaagcagacaggtgaaaatacatagaggagatttgtcagatcatataaagaattgggaagatataaacaagactttgaatgggactgagtacgagaaatttctacgagctgattattagtgttttaaactatcttagtgaaaaaaaggtcttctaagtttgaagcttttctacttcttaggttcttcggctcaactacttgttgatcttttcctttatcatcttctatttttgttatctttttagcacataaatgattttgttttcttctcattggatgtataggaggaactggaaaactgtattgcttatttttagaggtttgttttgtgattgttgatttgagttatgatctgttcttacattctgatgtacttttttcactatttcatagatgatgaaatgggccttgaaatta

SEQ ID NO: 100 - DNA, 3334 bp, Sorghum bicolor
ttcagcccgatgcaggcccggtaaaatagattcagcccgatgcaggcccgataacacagccatactgactcagccatccgcagctccccattacccaaactttggtcaattttttcccctactgattaaaaaaaaaatacgagttccgaactcccgatttcccagatcccctatgcgccgctcagcatcgcgagccgataggcgaacgaccgccgactgcctgctccctccttccctccggccgtggcgctccatccacgcggccgcgcgcgccgcctcctcggcctccccacgccgcgctgctccgagctccgtccgaccgtcccgcacggcgcacgcggtgacgcggccacgcctccgcttcctctacgccgcgccgccctcctcgacttggatctttcctccgcgctgctccgtctcccgcgcttccaacctcgctcctcgcgactcctcggcttccctcatgccatgctgcctctccatccccgcgccgtcggtgcagagtgcttccatccccgtcgctgtcggcgccgcctcctcggcttcctcctctctcctgttttcgggctgcgggctggcccgacccacgccacggaccgtgcttttcgggccagcccggcccgtcactgtagcccgtttggacatcacgtacgtaccatggccactgcagagcaccagcaccggcacggacgtggcgccgctcgaggtccagacaaaccaccaaaattaatccggaagctgtcagtcgagcgcatggtcacgcgacattcttgaagctcagttcacctcacctcaccgcaccccgtgtcagtctccctcctcgagatgccgttcccgttcctgcctccacgtcgcagtccgccccagcgacctctattaaacggcaacacctcatgctgcccccgttgccacacccgccgctcatcatgcgctggcgaaggcgattgagcgagttgagctcctaaaagatatttttttttcagtatttccgggagaatataatgcggggtggcggcggtgcttccgggcttgcgtttcggggcgtggtggaggaggaggaagaagaggcagtggtttcggcgccggagaggccaatgcagcggcggcggcagcggcggaggtggggagaggaggtggacgacggctactcgccgagctccacgggcggcggcgggagcagctgctgcgattccttcggctgcgactcgcctttggccgggttcgtgcgcccagatggtgacccagatacagatctggagacagatgggttggccacttcctcctccagtgcttctgcagcctttaccgagcggcaggacgacgaagcagaggaggtgctgtgcggggtgaaggaagaggagtgggctcaggtacaagaaccggccaagaatccggcggcaggccgtgccaccgcagaatgccataaccagcggtaccggacggaggctgctgttcttttgcatggtaggaaggggtcgaagcagcggccagcctcacttgaccttggtagccctggatttcatggagccacgttttctccaagtttcgtgattggtggtgtggggttgatgaacaaaggacttggagcatcactcatcaggtcagacgtgtttcatagtcctgggacgccgaactatccacgacaccgtgcatcagtgttggggtgccagaaagggtggagctctgagagagttccacatccttctaaaggaagtaggagatatccaggcagcagtatggcatttccctacagcaatgggaggacattgccctcgaaatgggaggatgcagagaggtggatcttcagtcccaattccagtgacgcgcttggaagaactacggttgctcatgctcggcgaccaaagtctaaaagtggtcccctggggcctccaggaagacttggtggacagtattcatctgtttcttcagtgtcattgcttgatagtgggagagctggacctattacagcaaattcacctttcatggcaggagtactaatgcccgaacatgtttgtggaggaaaaaatacaaatggaacctattcaggtagaccaattggtgacgaaatcagcattggaagaggagtcaaaatttgtccactgaatggtggatctcatcccattcgaacttccagagttcgccagcgattagattatgcactcgaatcatctgcttcattgcctagcacgcgagaatctatccaagacgagcaggttgaaattactgaagattcagcttctactattgcttctataatttctaggaaagatgctgcaacccagaccagcccagagctaagtaggtcctcttcgcccaacactagaccaacatttaatcgttccctgtcgacagaacaagtgaaagagagcgggagctgtttctcagatcttgatatcagggatgttcagatggatgaccgagtgactttgactaggtggtcaaagaaaaatgtaacacggtcgtctaacaagaattcaacaaacataatagaatggaaggaaaagacagtggagtcaaattcttcatcctggggctttgcggaagcgaagtgcatatctaagattgatagagaggacacaaaaattactgcatgggagaatattcaaaaagcaaaagctgaggcagcaattcagaagttagtgattaagctcgagaagaaaagatcatcttccctggataagattttgaacaccctcaagtctgctcaaagaaaagcccaggtgatgcgtgagcgtgagcgtgatgcagtaacagcaaaccaagatggaaaaggctctaggaaggcaaaaaagagagtgcagcttagcaagaatggtcaaatcagttcgctgagtggctgcttcacttgccatgctttctgatacatgtaattccaaaattgagaataaggatatgagaaattcctttgtatcccctacatcaccttcatgttctccacatcaaaatctggatgaaggtcagagatccatcacatgtcagtacataatatcgataatcattcagctggaaatcacagactcagatcttttgaagatgcttagctacaggcttcagctgctatgataggaaaaggaacaatgcaatatctacagtgcttctctttgttagtttcgattctgccaaggggacaaagaaaatggagcacgaaggaaaggaggaacggttctgcctacaccccatgtgcccagttgatgcctcctttatcattgttccattgcctggcctgccttgtagctaggcactgtgagcctgtgaggctctgatggcgatcttgttgccaaagctgtatcgaccatactatgtgcaattccgttccgagagacagcaaaatctt

SEQ ID NO: 101 - DNA, 1455 bp, Glycine max
gagggaaaaaagtagagtggtatgtgggttgctgcggcaacaaaaccattcatcaaattccaattccacagacacactacttctcttccgcttcttctgatggcaaaccaagcttcactctccttttcttcttccgtgtctcctgttcacgcgcctctcaagcgcgtgggcacgcacaacggaagctttcattgcgacgaggccctcggctgcttcatgattcgcctcacgaacaaattcaacagcgccgaaatcgttcgctcccgagaccctcaggtgttggaggttctcgatgctgttctcgatgttgggggagtgtatgaccctgcccgagatcggtatgatcatcatcaaaagggatttgaagaagtttttgggcatggtttttccactaaattgagtagtgctggtcttgtttataagcattttggaaaggagattatagccaaagaacttgaggtagatgaggaacaccgagatgtgcatcacatatatttggctgtttacaagagcttcatggaggcaattgatgctatagacaatgggatcaatcagtatgatacagaccagcctccaagatacgtgaataatactcatttatcctcaagagtaggaaggctaaatttggattggacagatcctgatcagtcacctgagaaagaaaatgaggcctttcaacgtgcaatggctcttgctggcagtgagtttctggatagtgttcgatttcatgtcaattcatggttaccagcaaggtcaattgtaatggagaccctagcggctagacatactgttgatcctagtggagaaattctagttttgactaaattttgtccttggaagcttcacttatttgagcttgagggagagttgaaaaatgaccctgctgtcaaatatgttctatatcaggatgaaagaagcaagcattggcgagtgcaggcagttgcagtatctcctgacagttttcagagccgaaaggctctaccctcacagtggcgggggttaagggatgaagaattgtcaaagaagtctggcattcctggatgtgtttttgtgcatatcagcggatttattggtggaaaccaaaactttgatggtgccttggccatggcaaaggctgctttgaagatgtagacgaggatcatatgaaccaagggctatcactgattttgcgcactcattcacagtacactttactgattgcgttgaagaatgcatatgaaccatggggactgggaacagtggcttaaagatggttctatatcaagttcattaactcatttgctgataggtggtctatcttatccaaattttctttcaatagtttaaccaatgtattagttaatgaatttcttgtgtctattatgttgataattgtcattgatcttattgttataagcatcttataacaaagaatttctcgtgtctatttggttcacttgagagagcattagaact

SEQ ID NO: 102 - DNA, 2170 bp, Glycine max
tttcaagtgtggccactctctctttctccgattcattgccgctccaccagcaatggccacgcacgtgagtcacgtgatagtagcggcagcatttcttctacttcttctccctttctctttctccttctccatctcccattctcaccgatccgctgcaatcaacctcttcgctgccactcccacaagcttagaagacgcgtacgaggcgcttagagtttttcagattctcggaatcgaagagaagaatactcctgtgaacgaggacacgtgtcagaaagtagttgaaagtctagcctcgtcttctcctctcaaggatttgttctatgccttgaaagttaacgccattttaaaatgcaatgtcaatgggaacgtttttaaggatattgcttcaagacttaaagccactgttcatgatgcgagtgctttgcttgacatctactattcaattggaggtttggttgttataaaggatcaggattctaatgttgatgtgcttcttgctgatgttgatggggttttccaatcaatcaaggttctcagtcaaagtgacggaagatggcgctatagttctgataatccagagtctagtacctatgctgctggattagctcttgaatcccttgctggattgatctcactagcttcttctgaatttgatcaatctaaggtcaacgtagtgaaaaatggcatagtaaagctttttgatggcattgagaaatatgaggatggaaccttttattttgatgagaaatatgttggtggacatgagcaacggggttctctttccacaacttcttcagttgttagaggggttactgcatttgctgctgtaacttctggaaaaataaatcttccaggggataaaatattgggtctggcaaaatttttcttgggcattggaatccctggagatgccaaggacttcttcaatcaagttgagtcattagcttttctagagagcaacaggatttccattccattgatattgtcactcccagaaacagcttattcattgaccaagaaaggccagcttaaggtcaaggtgaatacagtgcttggttcagctgcaccaccgttaacagtgaagcttgtccgtgcttttagcacaggtgcaaaagattcagctattattgacagcaaggagctccggtatgaccaagaaagtggatttcatgtcttggatgctttgccgaagaatgtggatgtggggacatatgtgtttgtttttgagattgtgcttcatgattttggcagtgaaaaagtttatgcaactggaggccaaattcatgtaccaatatatgtcactggaattattgaagttggtaatgcagaaatcacagttcttgacagtgatcttggaagtgctgaaacccagaaaaagctagatttggctggaaatgatgccgtttcactctcagctaaccacctgcagaagttgaggttttctttccaattgacaactcctcatggtcatgtttttaagcctcatcaggcgtttttcaagttgagacatgagacaaaggttgaacacatctttgtggttggaaataccggcaagaagtttgagaaagttctcgattttcttggcttggtggagaaacttttctatctctcgggaaaatatgaaattgagctgactgttggtgatgctgtcatggagaactctttcttacggctacttggccatgttgaattagatcttccagaagcacctgagaaagcaccccgtcctccaccaccacctgttgatccttactcaagatatgggcccaaagcagagattacccatatattcaggtctcctgaaaagagacctcaccaggaactctctcttgctttcttgggtttgatccttttgccattcattggctttttggttgggttattgcgcttgggggtgaacctaaagaatttccctggttcaacagtacctgccacatttgggatccttttccatgttggtattgcggcggttttgttactttatgtacttttctggttgaagctggacctgttcactacactcaaagcatttggtcttttgggagctatactgatgtttgtggggcacagaattctttctcatctcgcttttacatctgccaagttgaaatctgcatgagtgaaacaacaaataatttctatttataaagacaatgaaaatttgagt

SEQ ID NO: 103 - DNA, 1866 bp, Glycine max
gttcgtaacagctttaattcaaactttcaaaccccatttttattttttttatctctctttctcgtgtgcctttctagtgtcttggatttcctggttttctgtttctttctgggttgtggtgtgatgctttcagatccttcaacagtgttggttgattgacaccattgttctcttatgcaaaatattgtcatcaaaggctctcatcattgctaagcttctgattcaaaaaagaggtccatgaacaacaaactactttggactacaactcagaagccaaggtgagactattttagccaacaaatccttcatagtgttccattgtttgctatcttcaagcatatcagatgccaagatcaagggggtctgagttgcctcaaaggcagtctccacgaggtccacatcaacatcggacatcaagttctgattctgatccgttgcatcatcggctgattgctgaccgaagtccaaagctaggagaccggcgttccccaagaggtactcaatctgagggattaaatcagaagaagctaggaactcgtattgcagatttggaatctcagctcggtcaagcacaagtagagttgaaagttttaaaggaccagctagcttctgctgaagctgcaaagaaagaagctcaagatgagctagtgaagaaagctgtgcaatcagtattgccagtggtagagaagctccaagagaaatccacttccaagaatgctccagagtctaataaaactgaaatcaaaccccaagatgttatacctgatgacgaccaactagagactgatgtgtttgaagttccaattgagaagttgacaattgaattcagcaaaccagctgatcaatcagaaaaggaaactcaaccatttgaagacacaaatgcagcagcaatatcaaagccagaaaagctttctgtggatgaacatgaactgacactaaagaatgatgaaattgcattgttgaaaaccagtttggaagagaaaggtaaggagttagagtccatgagtaatgaaaaggagaatctgaagaaccaactgaatgaagcagtttcaaaagtgtctgctgctcaaaccaaggaagaaggaatgactttgcagttgaaccaactgagagaagagttggaaaccagtaaagccaatgcagacaagttggatgagaagttgaaatctgtggaagcagaaaaggaggggttggagtcagagatgaagaagctaagggtgcaaactgagcaatggagaaaagcagcagatgctgcagctgcagtgcttgctgggggtgtggatatgagtgcaaggattcctgaaaggtgtggctccatggataagcactttggtggcacatttgagacacctgctggtaggtacaatggctatgtggggtctcccggtatggctgatgacttggatgacagttttggaggtggaaagaggaagggttctgggattagaatgtttggtgatttatggaaaaagaagagccaaaagtgatgtctggcttatatattcagtgagtaaattagtagtactttaactaaggtcatgttttgatggtagcagaaactgcaaaagcagttgcttactgttttgcatctttctggtatctttagtcatttctggtattattaaggccattaagcgtgtagtgttactgttgcatgatctgtgcaaggtagtgaactttttgaaagatggattatatatttcacttctcctgaagctgcgatgagcacttttacttgtttttaggcatattctccggttttgcactgcttggagttaatgtcttaaagaacatgcttcattttctgttaactttggtatgactctaaaataacgttaatatctaaaatgttatattgtttgccag

SEQ ID NO: 104 - DNA, 1844 bp, Glycine max
tattgggcaagaaatagaaaattctgttcatcccaaaacactgatgactttggtaagtttggttacttccgtttccgttcgggaaaatcggttcaacaacacgaaaggaatattgtcgatttactatacttgattgaaatcgtatcatacgatgtcgtagctcttttctttttcaaattctgagttgttagtgagtgtgcccagcaatggcagctgttaggtcttcctctgtaagacggttggggagcacaattaagggttcttttagtatggaattagttcaccatagtatgtgtatgaatcttgcaaggtttccgagtgattcgtttaatgatccttattacaaaagagagttacagttttctaagaatcagtttagtaatttggcttctgaatcccttggaagtagtcatcactttggtactagagccaatgtattggttaaaccaacgttctctggttattgtttttggagttcccttccttttgcttccatgagcaaccacgttttgaatcgtcgaatgtattcatcgtcgtcggtgggtgacaaaggaagtagagatggtggtacagaagtttctgctggttctggtgcgagtgatatgaatactggtggtgattctgttgttgggggtgattgggctgagaggattaaagatgcttggaagagtgtggcagaggcagcatcatatgctggagataaggttaaagaaacttctgatgatctcactccatatgctcagcagttgcttgattcacacccgtatcttgacaaggtggttattccagttggtggtactttaactgctaccataatagcttggttcttgctgcctaggattttgaggaaatttcacaaatatgcaatgcaaggtcctgtttctctattgccagcaagcgtggctggggagccagttccttatgagaaaagcttttggggtgctatggaggatccagtgcgatatttagttaccttcattgcattctcacaaattggtgttatggtggctccaacaactataacctcacaatatcttgctcccgtttggaggggtgcagtgattgtttcatttgtatggtttttgcatagatggaaaacaaatgtttttgcacggtcattgtctagtcaaagtttacttgggcttgatagggagaaagtgtttgctctagacaaaatctcatctattggtctatttgtgattgggataatggctttggctgaggcttgtggtgtggccgtgcaatctattgtgactgttggtggtataggaggtgtggctactgcttttgctaccaaggacattcttggcaatgtgttcagtggtttatctatgcagttttcaaagcccttttcaattggagatacaataaaagctggctcgatagagggtcaagttgtggaaatgggtcttactagcacgtcattgctgagttcagagaagttcccagtcattgtgccaaactcatttttttctagccaggttattgtgaacaagtcccgtgctgaatatcgcgccattattactaaaattccactgcaaactgaggatttaagtaagattccccagatatcagatgatgtaaaaagcatgctcagatcaaatgcaaatgttttcttagggaaagatgttccctactgtttcttatcccgtatagaaagttcatatgcagaattgactcttggatacaacctcaaacatatgcgcaaagatgaattatactctgcagaacaagatattctcttgcaggcagttcaaatcattaagaatcatggggttgctcttggcagcacatggcaagacacgtcttctaaatgatgtgctctgcttgatgacaattttgga

SEQ ID NO: 105 - DNA, 2313 bp, Glycine max
gtcaactaaacctaaaaatataagcaaaacaatttttgcttccattctttataatctcttgcaaaaggaaattgatcctcaaggaagggaaaaatggagctacataaatggcctttcttgctttgagatttactcataattttctaacaactccttccaaatccattgccactcgaactaatcatcatatttaaccactacttgatctaaatttcctagtggggaattcatttttgtacttacatagttcaggtaccctctccatttcaggcattgttgttttttcctaacgttattactcaagggatatggatgtttggagtcttcaaaagttggtgaagacagcaccatctaaagcattggtcatcagaatcaacttggtctgtcttgccatctttctggtcgtctatgcaacctttcttctccgtccatcttcatccgtctatttcgagaatgcagcctcccttgtccggtgctccttgcgtgagtgccatcacaagggagaaaaaagcataaagatgaaagcagtgttggagaggaatgaagataggagggcaaagcagaacgcgagtaagatagaagtgcctagtttctttggcgaaatggggaaaggaatgaagataggaatggtgaacatgcaagaagatgatgtgagtgaatggagcacccttggagaaacaagccacgtttatttcgagaaagtgtcacagtttttcaattggacagatttatttcccgaatggatagatgaagaggaagagaccgatgttccatcgtgccccgagataccaatgccggaattcacagcatatgaaggcatggacgtgatcgtggccaagttgccttgcaattacccaaaggaagggtggggaagaaacgttttcaggttacaagttcatcttattgtggcaaatttggcagtgaagaaggggaagagggattggaattggaagacgaaagtggttttgtggagcaagtgtaggccaatgctggagctgtttcgatgcaacgatttggttaagcaggaaaatgagtggtggtattatgaggttgatgcaatgaggttggagcagaaagtttctttgcctgttgggtcctgcaatttggctctgcctctatgggaacaaggaatcgacaaggtgtacgacacgtggaacctggaacaaagcgttaaaagcgaagcgcgatcaaaacgtgaggcctatgcaacagtgctccactcctcagaaggctacgtgtgcggcgcaataacgctagcacaaaccctgctccaaaccggaaccaagcgtgacctaatcctcctcctggacacctccatctccgtcgcgaaacgccgctccctcgaactctccggctggaagatccgactcataacccggatccgaaatccgcgggccgagaatggcacctacaacgagtacaactacagcaagttccgactctggcagctcacggattatgagagagtgatcttcattgatgctgacatcatcgtcctccgcaaccttgatattctcttccacttcccacagatgtccgctactggtaacgaccagtccatcttcaactccggcatcatggtactcgagccctccaactgcacattccacgttctcatgtcgcgccgccacgatgtcatctcctacaacggtggcgaccagggtttcctgaatgagatcttcatgtggtggcacaggcttccgcgacgggtgaactacttaaagaacttttgggccaacacgacaatagaggcaggtaggaaaaatgcaatgttcggggcggagccgccgaagctctacgcgattcactatctagggctaaagccatggcattgttatagggactacgactgcaactgggatgtggaggatcagagagtgtacgcgagcgacgtggcacatcgacggtggtggaaggtgcacgatgctatggacgagaacttgcaaaagctgtgtaggttaacgaggcaacgaagaatggagttgaactgggaaaggagaaaggctgggaaattagggttgccagatatgcattggaagatcaatgtcacggatcccagaagagctggctcgatgttgattggctaggttaattaggttctagttgttgtacaattacaccacattcttttttctttttttttttggatttggggtatttgtttttgttttaattcatgattttacgtactgagacatttgtggaggggctttccatgcggtttatttatttctgtgaatagggtagagcattagatggttagtcaattaaggaaacgggaataataaaaagaaattcattacagtttttgtc

SEQ ID NO: 106 - DNA, 2419 bp, Glycine max
catttggaagaggaagtagggtcgagaggcacgtgggggaaacgaaaatcctgtgcgaaaggagagactcatcacttgtcccgccttcgcatactcactctctggatcaccaagttaactcattcacacaattctttctttctctcactataaaacatttgtcctcaaacttcgctgccatactcacctctctctccaccaccacccaccatggagctccgccgccgctcctccgccgcggccaaagcctccgacgccctccccctccctctccacgtcaccaacgccttcttcttcacccttttcttctccctcgcctactacctcctccagcggtggcgcgacaagatccgctcctcctcccctctccacctcctctccctctccgacatcgccgccatcttcgccctcctcgcctccgtcatctacctccttggcttcttcggcatccacttcgttcagtccttcgttgcacgtcccgccgacgaagaaccatcccaatgcgcctccattgacagagccgacgaggatatcgccaactccatcatagaaggagacgcacagccttctcccttgtgcagggtcgacaatgatatgaagggaaagaaagtcatacagcgtcctttcgaatgtaccaaaccaattcttaccgaactgatttcgtccattgacagagtggacagtgataatatcattgccgaccctgtcattaacggaaaagaagccgtgcaaccttctttccaatgtacgaaaccaattctcaccaaactgatttcgtccgacgatgatatcatcattgtcgactctgtcataaacgggaccgtcccatcgtattctctcgaatcgtgcctgggggattcccgccgggcggcagcgatccggcgggaggtggtgcagagagaaacggggcggtcgctggcgggtctacccctggaggattttgattacgatgcaattctggggcagtgctgcgagatgccggtggggtacgtgcagcttccggtgggggtggcggggccgctgctgctggacggggcggagtacacggtgccgatggcgacgacggaggggtgcctcgtggcgagtacaaacagagggtgcaaggcgatttacgcgtccggtggggcgagcagtgtggtgttcagagatgggatgagtagagcgccggttgtgagattcgcgaccgtgactagggctgcggagttgatgttctatttggaagatcctctcaattttgataccttggcggtcgttttcaacaggtcaagtagatttggcaggcttcaaagcattaagtgctctattgcagggaagaatgtttatattagatttacctgtagcacaggtgacgccatggggatgaacatggtttccaaaggggtccagaatgttcttgatttccttcaaagtgatttccctgatatggatgttattggcatctctggaaattactgttcagacaagaaacctgctgcagtaaattggattgagggacgtgggaagtcagtggtttgtgaagcaattatcaaagatgatgtggtgaagaaggtgctgaagaccagtgtggctgctttggtagagcttaacatgctcaaaaaccttgctggttctgctgttgctggtgctcttggtggattcaatgctcatgccagcaacattgtttctgccatttttatagccactggtcaagatccagctcagaatgtggagagttctcattgcataaccatgatggaagccgtgaatgatggcagagaccttcacatctcagtgaccatgccttccatagaggttggtacagtggggggtggaacacaactaccatctcaatctgcttgcttgaatctgctcggcgtaaagggtgcgagcaaggattcaccgggatcgaactcgagacttttggccaccattgttgctggatctgttctagcaggggagctgtcactgatgtctgctatagctgcagggcagctagtgaagagccacatgaaatataacagatcaagcaaagatatgtctaaagtgtcatcatcctgagaaggaaggagcatgtggttccagccttacttgatgccaaaagcagagaaaagcgtcgttttgatgggtcaggaattttgagagggaaaaggaagacatcactttgctggcaccccatgtgaggttttttggcttgtattgattgatgtctgggaatgtatcattagttgtaatgtgcaaaagcagaggtcttctttattggtgacccccctctggaccattcattcattatacaagtttggtagcatagatggtgatccattggttggatcttaaggttctccgaagcctgagatattttttatgggttgtattataaattctaggcttaattattatttctcattcaatttgtggtatgtatttttttagttcttaagat

SEQ ID NO: 107 - DNA, 1456 bp, Solanum lycopersicum
ataggaagacgtgtcatgtccttatatcttccatttcctaagaaaacagattgaccctacacaattcttcttttctccttcactcttttccattttcttttctggttcttcatagatgactcatttgattctaacccacctcgaatttagcccaatttggccctacaggcgtgcctatagttagagaaaaatggaggagaatgtattgtgccaatggagtgttgttagatccatttttgctattcttcaatggtggggtttcaatgttgctgttattatcatgaacaaatggatctttcagaaattggtgtttaaatttcctttgacagtatcttgcgtgcacttcatatgctcagctattggtgcatacctggtaattaaagtgctgaaacttaaaccactcatcgtggtcgaacccacagatcagtggagaagaatttttccgatgtcatttgtgttttgtatcaacatagtcttggggaatgtaagtttgcgatatattcctgtctcttttatgcagaccgtaaagtcatttactcctgctacaacagtgattttgcagtggctagtttggaggaagagctttgaatggaggatctggacttccttgattcccattgttggaggaattcttcttacttctattactgagctcagtttcaacactttaggattttgcgctgctttgtttggttgccttgctacttctacaaaaactattctagcagagtcgttgttgcatgggtacaaatttgacagtataaacacagtatactacatggctccctatgcaactatgatactggctctgccgtctttactctttgaaggagctggggttgtagaatggttatacactttcccttcagtcgttccatccatgcttcttatttttctctccggagtgctagctttctgccttaacttctctatcttctatgttatccactccacgactgctgtcactttcaatgttgctggaaaccttaaggttgccgtggctgttacattttcatggatgatattccaaaatccgatctcagctatgaatgccctgggatgtggagtgacgcttgttgggtgtacattttatggttatgtgaggcacatcctatcacaacatgctcgagagtctcctcgtacgccagagaacaagatggaatctgttcctctaatacatgagaaagaacaagaccaaagataacccctttaaaatcacagatgaagaggtttcatcaattttgcagaagatagattattcgacccctcacttctccccttatcagtgctttatttactcaaatttttgttctagttcctgcatataaggatgtcatttgataggtatttacaacaggttaacataacctcatttcattgaaaagattatttgatggtatttttaaagtataatagttacacttgtatgttgtaaatattgtagctatgtctactt

SEQ ID NO: 108 - DNA, 3185 bp, Phaseolus vulgaris
gcaagtggaatccaattcctcgcgctcactccttccaacgacgccgtttcagatctgaatcgccaccgtttcggagatccgcactacctgcattctccgttcaattctcgcaccgttcatgttcttcccctcgtgcgctcagatcttgaaaattggcgcctcaacgacgttcgcagcgccacgcgagtggccagatgccgcagggcaatgccgccgccgccgctgctctgttggacaacggcggcgatgctggagacgccgtcatggcgcggtggctccagtccgccggcttgcagcatctcgcctctcccctggcttctaccgccatcgatcatcgcctcctccccaaccttctcatgcagggttatggagcacagtctgccgaggagaagcagaggcttttgaagttaatgagaaacctcaattttaatggggaatctgcttcagagccatatacacccaccgcccaatctttaggtggagtggccgggtcggatgggtttttttctcctgagttcaggggggattttggagctgggcttttggatcttcatgcaatggatgataccgagcttttgtctgagcatgtagtttcagaaccgtttgagccatcacccttcatgcctggagatgctagagtatttgaagatgattttaatccaattaactgcaagctggaaagcggggaagcagatgctgatgcatcaatttctttaccaatgaatgaaaaagagtatagcacaagggaaaataatgttgctaaaattagagttgtggtacgcaaaagaccattaaacaagaaggaactagctaagaaggaggatgatattgtaaccgtatctgacaatgcatatctgacagtccatgaacccaaactaaaggttgatttgacagcttatgtggagaagcatgagttttgttttgatgctgtgcttgatgagcatgttaccaatgatgaagtatacagaactacagttgaaccaattattcctacaatttttgagcgaaccaaagctacctgttttgcttatggtcaaacaggaagtggcaaaacatacacaatgcaacctttaccactcagagctgcagaagaccttgtttggcagttgcatcagccagtttaccggaatcagagatttaaattgtggctcagctattttgagatatatggtggaaagctttatgatcttcttagtgacagaaagaaactttgcatgagagaagatggacgacagcaagtttgcattgtaggactgcaagaatttgaagtttgtgatgtggaaattgtcaaagaattcattgaaaggggaaatgctgcaagaagtacaggatccactggtgctaatgaggagtcttccaggtcacatgctatcttacagctggttgtaaagaaacacagtgaagtgaaagagagtaagcgaaacaatgatgggaatgaggcaagaagtgggaaggttgtggggaaaatttcttttattgatcttgctggaagtgaacgaggtgctgacactactgataatgatcgtcagacacggattgaaggagcggaaatcaacaagagtcttttggctctgaaggagtgcatccgtgccttagacaatgaccagatccatattccatttcgaggaagtaaacttacagaagtgcttcgtgactcctttgtgggtaattcaaagactgtaatgatctcttgtatatctccaggtgctggatcttgtgaacacacacttaataccttgagatatgcagatcgagttaaaagtctgtccaaaagtgggaatcctagaaaagaccaggtcccaaatcctgcaccacaaactaataaggagatttcatccacatcatccattcctactagtgctagtgcagaggattttaactatcaacgtcaagagaaaacaatggacataggcaggaaattcattgaaagggagaattcttcgtacagctctgctgctaccgctgctgacaaacagccattaagtttttcttcaaattatctatcaaatgggcgagaggaaaagggcttgccttctgcttcattggaccgggagaggtttgaaccaaagaactcgtatggtgacactaccagtcaaaagatgaactcttactcacaaattgatacaggtgagaagttgcaaaaagtgtctccaccacgcagaaaagggtctaaggatgaaaaatctgaaaggcctgcaaactggatgaaaagggatgcaaatggttctgataccttcactacaaactccaagcagcagagcactgggaactataacactgtgtctaaggatgaaaagtctgataggccatcaaactggatgaaaagggattccagcagttctgatcttttcactacaagctccaaacagcagagcacggggaattatgcgcctaaggatgaaaaatctgaaaggccagcaaactggatgaaaagggatgccagcaactctgatatcttctctacaagcttaaagcagccgagcacagggaactataacaatgttacaactggatccaggccttatgaagcagaatcctctcctaacgggaatatcaatgcagtactcgaggaggaagaagcactaattgctgctcataggaaggaaattgaggatacaatggagattgttcgtgaagaaatgaaactcctggccgaagtggaccaaccgggaagcctaattgacaactatgtaacccaattgagttttgtgctttctcggaaagcagcgagtctggtgggtcttcaagctcgtcttgcaagattccaacatcggctaaaagagcaggagattctaagtagaaaaagagttccgcgtcagtaagagtcttcttcgatctctctctctctctctcttatttgtattctcgtgtttgttagcaatatagttgaaaggttttgtttgatataagcaaatcttttggtgaatatgttctaattaaaatttacttacatgtatatgccctttgtgtgagtttgggccacctcatgccattgcaaatttggtgtaatctatgtagcttatctgcgccattgttataaaaaacacaaaaagcttgtctgcccctaaatttttagtttgagggcaaaggaaaataaaaatagaatttgatgctcactgtaaacggtaatgtgttgaatgcattcgctacatttggtatatataatgaaatctagctttacaact

SEQ ID NO: 109 - DNA, 2094 bp, Phaseolus vulgaris
agaatccatgatgtagcatcacataagttttggcttattatttttttgtgtttagttattggagtgtgtgtagagagtcctttccttagcgaggtaaaagtaaatttggaaaatgaaaccccacctattcgggttctggtcctagttttgatgggatggtgagggagcataaaaataaaatcactatattctctcacactctctctcctctctctgtggttatgagcagtaggaagagttgtttataatttgaaaacttgaacgcagccaacaaagtaggggattgattgttctttgtagttcttctgttttgtatggacatgaaggcatattcagtttcctggacaaaacataagaaagagccatattttgcagttcctcacacaagaagacaacaacagtgcatacaagcaaatcatgataccccagaagaaacaacttcactaaatcattccctgaaattggcgctttccacttcccaaaacactctactgcctacgctacctgcctttgttgttttgctactacttgttacttcaattggcacatcattttctcaccccattgcctccaattcacctttgccaccaccctctcaccccactgctaaccatactttcagaccagctccagtgtcgcaaaagttcaggacaatcagagctcacctcaagaagattaacaagccacctgttaaaacaattaagagtccagatggggatttgatagactgtgttttctctcatcaccagcctgcttttgaccatcctttgctcagagggcaaagaccattggatccaccagaaaggccaaagggccaccacaatggagaaacagtcacagagagctttcagctttggactgattctggtgaaatatgccctgaaggaactgttccgatcagaagaacaactgaacaagattttctacgagcaagctctatcagaagatttggaagaaaagtacggagggactcaactggcactggtcatgagcatgcagttgtttttgtaaacggagatcaatactatggagcaaaagcgaacataaatgtatggacacccagcgtaaccgatccatacgaattcagtttgtcacagatatgggttattgctggatcttttggcaatgatctgaataccatagaggctggatggcaggtaagtcctgagctatatggagacaactatcctaggttcttcacttattggacaacggatgcatatcaagcaactggatgctacaatttactatgttcaggatttgtccaaactaacaacaggatagcaataggggctgcaatctccccaagatccatctataataacagacaatttgatattggcttaatggtttggaaggacccaaagcatggacattggtggctggaatttgggtcggggctacttgttgggtactggccagcattcttgtttagccacttgagaaaccatgctagcatggtacaatttggaggagaaatagtgaattctcgttcaaggggctaccatactggcactcaaatgggtagtggccattttgcagaagaaggatttagaaaagcagcctactttagaaacttacaagttgttgattgggacaataacttgcttcctctttcaaatattcaccaactggctgaccattccaattgctatgacataagggtgggatcaaacaatgtctggggaacttacttttattatggaggtcctggaaggaatgtgagatgtccatgaagatcatacatatatccatatctatatagttcctattatacaggcttctctgttctaaatatataaatattcttttctttatcccacttttttttttcttttggggatttttggtttcattataagcttcacatggttcggctatatttgttaattttggttttgggttaacaggttagagacagtatgttccgttgttagagattatgtaaatccacgaaaaatatgctgtcaatttataacattaaattaggagttctgtattcttcaattcctatttctttcccctttgcaattcaaataaactcgaaccttgcgcaggtaatagttgattttcaattggtgaataaacatttaa

SEQ ID NO: 110 - DNA, 1911 bp, Glycine max
caacaatcgtcacagctcagcagcacaatcaaaaccaaaactccctccccttgcgacatttttacaaacaccttctgcctacaaataaaagatatttcagttttcatgtcctcgtagtggttgggtttgagtgcgtgtgtgtgagaatggaagagagtggtgatgcgagggatcttcagaaaccgttcctccacacagggagttggtacaagatgggttccaggcagtccagcatcatgggatcctccactcaggttatccgcgacggcgccgtttccgtcctcttctgcgtcctcatcgtcgccttgggtcccattcaattcggcttcacgtgtgggtattcttctccaacccaaggggctatagttcgcgatctaaacctctctatttcggagttttctttctttggatctttgtctaatgtgggagcaatggtgggagctatagctagtggtcagatagctgaatacatcgggcgcaaagggtcattgatgattgctgcgatccccaatataatagggtggcttgctatttcttttgccaaagattcctcgtttttgtatatggggaggttgttggaaggttttggcgttgggattatctcttatgtggtgcctgtttatatagctgagattgcacctcaaaacttgagaggtggccttgggtcagtgaaccagctctctgttacaattggcattatgctggcttatctgttgggtctttttgtcaactggagagtccttgcaattctaggaattttgccttgtacagtattaatacctggattatttttcatacctgaatcccccagatggttggccaagatggggatgatagatgagtttgagacttctttgcaagtgttacgaggatttgacactgatatatctgttgaagtacatgaaattaagagatctgtggcttcaacgggaaaaagagctgcaatccgatttgcagatctcaagaggaaaagatattggttcccgttaatggttggtattggattacttgttcttcagcaattatctggtatcaatggaattttgttctattcaactaccatctttgcaaatgcaggaatttcatccagcgaagctgctacagttggacttggagccgttcaggtcatagcaactggaatttccacatggttggtggacaaaagtggccggaggctgcttctaataatatcctcatctgtaatgacagttagccttctcattgtttctatagcattttatctggagggggttgtatcagaggattcacatttattcagcattttgggaatagtttctattgttggactcgtggctatggtgattgggttctctctaggtctgggacccatcccttggcttataatgtctgagatacttccagtgaatataaagggccttgctggcagcatagcgacaatgggaaattggctgatttcgtgggggatcacgatgactgctaacttgcttttgaattggagcagtggagggacatttacaatctacacagtcgtagctgcctttactatagcttttatagcaatgtgggttcctgagaccaagggaagaacattggaagaaattcagttttccttcagatagatatatgttttgggagagcacagaggtagtctattatgtttaaatttattatgtttaaatttaaatgacgagtccacctgtatcatgtatttttgtagtccattgtatttttattgtgtatcaaattttctgtaacaaatgaaaggagaagaatcagtgcatcgtgttttttcactgtacaagctattggtacaaagacaataaaacaaatatagtagcaaaaaaatgagaaagataaagaacaaaaaacttctagtcatagtgtagctgttaaagtcgagtttatttctattacgaattgtattctgtc

SEQ ID NO: 111 - DNA, 2664 bp, Medicago truncatula
gagagagaaaacgaaaatacaatggtgtgttgagagagatagatagagagttcgtgagtggagtttcattcatttcatgtctctccctacaaaacgttctagcggcgctacttcatcttcatcttctccttcaacctctatgaaaaaagctaaatcttcttcaaccttcgacgacgtcgttttcgactcttctatggacgacgatctcaaacctaccgaccttcctcgcggcggcgccgcctctaatatggctgctaatctcgctcgcaaaaaagctactcctcctcaacctgctaagaagcttctcatcaggctccacaaaggcaacccaacagtgcccagtaattttgaagacaagacatgggcaattttaaagtctgctatatgtgctatatttttgaagcaacccgactcctgcgacttggagaagctttatcaggccgtcaatgatctttgcattcataaaatgggtgggaatctttatcaacgaattgaaaaggagtgtgaagtacacatatctgcagcactgcagtctttggttggacaaagcccggatttgattgtatttctatctctagtcgagagatgttggcaggatctctgtgaccaaatgttgatgattcgtggtatagccttgtttctggataggacatatgtgaaacaatcaccaaatatacggtcaatatgggacatgggccttcaaattttccgaaaacatctttcactgtctcctgaagttcaacacaaaactgttactggtcttttacgaatgattgacagtgaaagattaggtgaagcagtggatagaactcttctcaaccatcttttaaagatgtttactgctctgggtatttatgcagaaagctttgagaagccattccttgaatgtacatctgaattttatgccgctgaaggtgtgaaatacatgcagcaatcagatgttccagattacttgaagcatgtggagacaagattgcaagaggaacatgaaagatgtttgatctacttggatgcaagtactaagaagccattaataacaacaacagaaaaacaacttcttgaacgtcatatacctgccattcttgataagggtttctctatgcttatggatggaaatcgtattgaagaccttcaaagaatgcacttgctcttttctagggtcaatgcccttgagtcattgaggcaggccattagttcatacatcaggagaactggacagggcattgttatggatgaggagaaagataaagacatggttcaatcccttcttgaatttaaggctgctcttgacacaacatgggaagaaagctttgcaaagaatgaagcattcagtaacaccattaaagacgcatttgagcatcttatcaatctccgtcagaaccgacctgcagagttgattgccaagtttttggatgataaacttcgtgcgggtaataagggtacttcagaagaggaattagagggcacgcttgataaagtcctggttttattcaggttcattcagggcaaggatgtgtttgaggcattttataagaaagatcttgctaaaagattactcttaggaaagagtgcttcaattgacgcggagaaatccatgatctccaagttgaagaccgagtgtggtagccagtttacaaacaagctggaaggaatgtttaaggacatcgaattatcaaaagaaattaacgaatccttcagacagtcatcccaggcgagaacaaaactcccatcaggcattgaaatgagcgttcatgtcttgacaacagggtactggccaacatatccacccatggatgtcagacttcctcatgaattgaatgtttaccaggatatttttaaagagttctatctgagcaaatacagtggaaggcgtctcatgtggcaaaattctttaggtcactgtgtcctaaaggcagattttcccaaagggaaaaaggagttggctgtctccctatttcagactgttgttttgatgcaattcaatgatgctgagaaactaagctttcaagatatcaaggattctactggtatcgaagacaaggaactgagaaggactctgcaatcacttgcatgtggaaaagttcgtgttctacaaaagatgccaaagggtagagatgtggaagattatgactcgtttgtttttaatgacacatttaccgcccctctctaccgtataaaggtgaatgcaattcagttgaaggagacagtagaggagaatacaaacaccacagaaagagttttccaagatcgtcaatatcaggtcgatgctgctattgtgaggataatgaagactaggaaagtgcttagtcacactcttcttattactgaactcttccaacagctcaaatttcctattaaaccagctgatttgaagaaaaggattgaaagcctgattgacagagaatatctggagagggacaagagcaatcctcaagtatacaattacttggcatagtatatttacctcactttacatttcaaagtttctttttctttttctttttttctttaaatgacatgggagaggcttaatgtttattcccagtcatatatgtacagtaaaaaggatcccacctccaccacctcctcttttttttatttaacttttcatttatcgacaactgtactgttgtaattgtaaagcatatttttcctcctttgaat

SEQ ID NO: 112 - DNA, 1374 bp, Glycine max
tgagtggtgagggcaagatcacagaattggtgtgagagagatgggttcgttcgtgaagctttcaaggagggccttggaaactgagatgcccgttatggttcagatgcaggaattgctccgaggagctaagaatgccgtgtctttggcccagggggtggtttattggcagcctcccaagcaagcattggaaaaagtgaaagaacttgtatctgagcctttaattagtcgttatggtaacgatgaaggtattcctgaactcagagcagcattagtcaaaaagttgcgtgatgaaaataatttgcacaaatcttcagtaatggttacatcaggtgccaatcaggcatttgtgaatctagttcttactctctgtgatccgggtgattccgtggttatgtttgctccttactacttcaatgcctacatgtccttccagatgactggcgttaccaatattctagttggtcctggtagctcagacacactccatcctgatgcagattggttggaaagaatattatcagaaactaaaccacctccaaagcttgttactgttgtaaatccaggcaatccatctggaacttacattccagagccccttctaaagaggatttcagatctctgcaagaatgctggctcttggcttgttgttgataatacatacgagtattttatgtatgatggcctgaaacactcttgtgttgagggaaatcatattgttaatgttttctcattctcaaaagcatttggaatgatgggatggcgggttggatatatagcatatccctctgaagtaaaagactttgctgaacaacttctcaaagttcaagacaacattcccatctgtgcttcaatattatcacagtatcttgccctgtattcattggaagtggggcctcaatgggttgtagatcaggtaaaaactcttgaaaagaacagagaaattgttttagaagccctctctcctcttggagagggttctgtgaaaggaggagaaggtgctatatacctgtgggcaaagctcccacacggaaacgctcacgatgattttgatgttgttcgctggctagctaacaagcatggggttgcagtaatcccaggaaaagcttgtggttgtcccggcaatcttagaatttcatttggaggcttgacggagaatgattgcagagctgccgcagaaagactgaagaaaggcttagaagaattggttagagacggactgcgggagtaactgaaacttaattatagaacattcccttcccaaacctccattggggaaaaaaaataatagatatcaatagaaacaaatttcacttgtcaatgtagcaagtttgcagcttttgcatttgaataaatggaggatttactttctaccca

SEQ ID NO: 113 - DNA, 2608 bp, Glycine max
ttctttagctgtttctcaaaaccctcatcatcacgttcacgttcccgttccttttaatgccttttcgtacaccataaccttctctcatccaaaacttccaatctctctctctctctctttctctaatatctttcacaacttgccggaaaattctcgccggcggcggcgatggccgactatttctccggctccgtcgaattcggactcaacctctcgaagcgaatatactacggtaaaggatcggctccgtcgccggcgccggcgatgtcgcggtccctgtcgaagtcgccggagggatacctcccgacggcgccgatgtgctacgcggtgatatcggatccggagaaggtggagaatccggacattcggagctaccagccgtatgtgctcggtcagtgcgagcctccggcgctgataccgctggagcttcacggcgtcgccatggaagttgagtgttctttggacacggcgttcgtaacggtcaccggaaagtggcgcgtgcattgcgtgaccgcaagtagtacgtgtgactgccaggttgccatacctataggtgaagagggttcacttctaggtctagaggttgatggttctggaagatcttatcatactgaattgatctctctgaaagatgaaaaggataagaataaagtggccaaagctaaagacggatactttttgaaaagccatatatacaccgttaagattccacagtttaggggaggctccgtcttctcaattaagatcagatggtcacagaaaatattatttcatgatggccagttatctctctgtgtccctttcagctttccctcatacgtcaaccctgctggaagaaatatttctaagaaagagaagatatttttgaaagttaattccggtgctacaacggaagtgttatgcaaaaccaccagccatccttttaaggaactactgcgccaagctggcaaattaaatttatcatatgaagcagaagtgctaacatggtcaagtacagacttaagtttttcgtactctgtttcttcaaatgacatatttggagctgttctcttgcaatctccattcctgcgtgattttgacgaaagagagatattttgcttgtatctttacccgggaaacagcccggatagaaaggtttttaaaaaggatgtggtgtttgtagtagatataagcgcaagtatgaagggaactcctcttgataacacaaagaattccctactgacatcactctctcaactaaatgcacaagatacatttaacattatagctttcaatggggcggtctacttattttcatcatcaatggaaagagctacagaggaagcaattttaaatgctaccacgtgggttgacaccaattttattgctaatggtgacactaatatcatgcttcccttaacacaggcaatgaagctacttgagaaatcaactgattcggttcctcttatttttctcgttaccgatggggctgttgaggatgagagagatatatgcaattttgtgaaaagctatgtctcaagtgggcaatcgtttcgaacacctcgcatatatacttttggcataggtttatattgtaatcactacttcctgcaaatgctagcacaaattgggaggggccactatgattctgctcatgatttagattcaattgactttagaatgcaaagactattcagttcagcttcatcagttatggtagctgatataacaatcaaaagtttagaaggtcttgattcacttgagttattcccaactcatatacaagacatatcatttgaaagtcccttgatcttatcaggaagatacagtggaacttttcctgaattagttaaagtcactggtactttggcagatatgactaacttcgtagtagaccttaaagtgaaaagagaaaaggatatgcagctcagtaatgtcctttcaaagagacatatagatcaggtcactgctcaagcctggttgttaaaaagtaaagagctggaggagaaggtcactaaaatgagcattcaaaataaagtcccgtcagagtatacctgcatgaacattgttcttgtacagagtgatgaagggaagaaggcacctgaacaatttctgttgcaaaaggcgtacaacaaacttagcttccagaagttggaactcaacaaccagaacttattccttggagggttgaatcttggatttggtgacttgaaagcaactgctgagaacttgccaccagctataaaagaagcaaaaccacctgaaggactactggggaaggctgcttccaattgttgtggtcgattggctgatacctgttgtggcatgtgtctgttgcagacttgcacttttgtgaatgaccagtgcaccatcgtttgcactcagatatgtgcagccctggcctgttttgagttaatcaaatgctgtgttgagctctgtgactgtgattgcttgcagtgaaataaagttgtatgtttgagttaaacatagaaaaactgtatgatgatacaaattgttaacaatgtatatattattgtataagctcttagtgctatgatgcttacagcttatacttgcttatattgcctctgttcctcgtctaaaataggagaaatggagaaaataattt

SEQ ID NO: 114 - DNA, 2790 bp, Glycine max
agagaagcaaatgaaaaaagcaagccatttgcttttttttcgctttctttttttctcttcttcccaaaacaaaaacagtcacttttacacaataccaccaaaatggtgtaaaattcttctggggtccaacaagaccaagtgatgcgaattctgagacccactgaggtacaaggacaatcatcatcaaaagcatggaaacacacctcatgagccatcatcatcatcatccattagtttcttcccttttttgcttttctttctcttttctggtgtttctgtttctaattctaattccctctactttacaaataaaagaggttgcaactgtatgctacactgcactacactaaactgtcctctttggctagaagaactacatgttctctggttccttcatgctttacactgtggctggctcctgttgttctgtcacttttttcactctctgggggttcagtttaagttagctcaagataaagacatggattttcagaggtttctcatgtgacaaaaattgtcttgtgtttctctgaggagaagaagtagatcaagttaagagattgcagatatgcttatttggcttgttttgatgttttcttagttatgagggaaacgcactcttttcaaggggagagctgaacttgcggaaagagtggaacagaatttgccgagcgagagattttctttcctttgacttgacttccaagtacaataatacaaccaatttggttgtttgttacataggaaaacgaggggcttgtttggtttttctcccttccactgcatcattttcagtttttcactacttgtgatgctctcataccttgttctacctcattagttttgtgtgtgtgaaacccttggtagatacatggcagaaattaggctcacaagggttgagcaaggccaaaccaagattaagaatgttccaatagctgtcaccccagaagggttttggtgctgcccttcccctgtggtgtttcagaaaagcctcaaaactcagaatactctcaataaacacaaaccctcttcaccacccccaccaaaaaccagtgttcagaaaaagcctgtgcctgtgtctgtgtctgtgccagtgtgtgagagaagaactactacacctgccccttcaggattggtgctttctgatgaaaaacaatgtgcaactgctccagaaaggcctccaccacctaccgccacatctgtggctgctgcagagagggcacccaggcaaaaaattgaatctttgccaaagaaggttgctattgagtttggtgaacctggaacttgtgatatgaaagtggttttgttgggaaagcagggattttgtgtcaagttgagtgtgcacagggatgttttgacccagaagagtggtttcttttctgaaaaactctccgaacaatcgggtttgtcgtgtctccaaatcggtgactgcgaggatgtggagatatatgttgaaactgttggtcttatgtactgtaaagagatgaagcagcggctaatgaagcaaagtgtttcccgcattcttcgaatacttaaggttgccgaattccttggcttcagctcatgtatccaatcatgtttggagtacttggaggcagtcccttgggttggagaagaagaggaagaaaaggtggtctcaactgtactacaactccaagcagaaggaattagagtcaaccctgtgctgaaacgaatttcatctgacatttctaatgtcccaaaagacactctttcccacatcatcgaccttgttctcaagagcaacgaggaaagaggccgccgagagatgaaatccattgttctaaagctcctcagggagaacaacagccttccaagctatgcgcgatcaaccgacatatgcaatgacacgatctacagatcatgccgaagctgcttggattcattactgtctctattcaagcaggctgcagaaccagacaaaccgagtgaggaccgtgatcctatagcaaagtgcatagctctcgaagctgataacttatcatggttgcttgagattttagttgacaaacaagccgctgatgagtttgcattgatgtgggcaaaccaacaggaactggcgttgctacacacgaagctgccaaccatgttgcgctaccatgttagctgcctttctgggaggctgtatgttggcatcggaagaggggagctgttgccgtcgaaggacacacgccggttgttgttacagacatggctgcagcctctgatgaatgactacaactggctgcagcatggatgcaggtcgtttgataggaaacttgtggaggaaggaattgggaggactattctgaccttgcctcttgagtatcaacagagcattttgctttcgtggttggggagtttcttgaaaactggtgatagctgtcccaatcttcagagggcatttgaggtatggtggaggagaaccttcattaggccatatgtggagaaccaaggtaatgttgctgtatcagatagtagtttaatgttgccaaagcagcatgagtgaaaaaaagggtcaaatggggttcataaatgtttcattggtactggagttcaagtttttatattaacgagtttgaggaattgtaaagatatgtattgattgcagaatgtggattaacctccagcagctaacaagtagtcaagtcctgagaagtgtcatgtgtcttgcatgagttgactctggattaatcccttgaggaagacctcattgaattgataactttcagtaattggtttttgtataatctcttcaaagaaaggaaaagaatggtgtttttagtatttttt

SEQ ID NO: 115 - DNA, 2722 bp, Phaseolus vulgaris
aacacttacctcaacattataaaaagccattcaagagagagaatcgaagcaccacagagagaagagaacctctaaaaacaaaaataaagacattctctcccattctcctccctcacttcttgtttcttcattttctgtctttttggttggttttgttccttttttttcacatctctttgctctctcattctgcatttcctacatgcggtgttctacttctctgctggtttgattgctgaagcaaaacaggatttgtcacaactcttgtggtctcccatttcaggagaatcactcattggtacatagagcttgtaaaagcgaaaaaagaaagaaaaaaaaagtgttttgagatctggcatgttatccttttctctctagctttctttgtggggagtgtttgtgctagagtgactgacattccagctctgcttcctttgttttgcgtggcccagaagcaaaacaaccatcacgaaaaggaaaatattccattgaagtgattcttttaaactcttttggatctaccactcacaccttgagcttggcctagctttgcttcccattactcatcgcactcttttgtttttctgacatcaaacttcaaaacggttccaatggatcgttttccttccagtaccattatccctgaatcgttcctaggggccaaagatgacctcaccacacagcttgcattggtttggaatcaaatcaaagcgccattgattgtcccgttgctgaggctagctgtgtttctgtgcttgatcatgtcggtgatgatgttcatagagagggtctacatgggcgttgtcataactctggtgaagttgttcgtgagaaagcccgagaaacgttacaaatgggagccaatgaaggacgacatagagttgggaaactcttcttaccctatggtcctcgttcaagtccccatgtacaacgaaagagaggtttatcagctctcaattggtgctgcgtgtgggctttcttggccttcagataggatcatcatacaggtccttgatgactccactgatccaacaatcaaggagttggtgcagcttgaatgtcaaagatgggcaagcaaaggggtgaacataaagtatgaggttagagacaacaggaatgggtacaaagcaggggctctcaaagaaggcatgaagcgtagctacgtgaaacaatgtgactgtgttgcaatctttgacgctgattttcaaccagagcccgatttcttgtggcgcaccgtcccattcttagtgcacaatcccgaactagctctcattcaagcacggtggaaatttgtgaatgccgatgaatgtttgatgaccagaatgcaagagatgtcactggattaccattttactgtggaacaagaagtggggtcttccacttacgccttctttggattcaatgggactgcgggagtatggagaatttcggcgttgaatgaggctggtggatggaaggataggaccacagtggaagatatggacttggctgtgcgagccagtctcaaaggatggaaattcttatacttgtccgacttgaaggttaaaaatgaattgccaagcactctcaaggcctaccgttaccagcagcaccgttggtcttgtggtccagccaatctttttagaaaaatggtcttggagatcataaacaacaagaaagtgtcattgtggaagaaaatacatgtgatatacagcttcttctttgttcggaaggtcgtagcacacatcaacacctttgtgttctactgcattgtattgcctgcaacagttttggtgcctgaggttgtggtcccaaagtggggagctgtctacatcccttctgtcatcacaattctaaatgcagttggaactccaaggtcactccatttgctggtcttctggattctctttgagaatgtcatgtctctgcaccgaacaaaggcaacgattattggcctactggaggctagtcgagtgaacgaatgggttgtgacagaaaaacttggtgatgctttgaaggctaaagcaggaggtaaagcacctaaaaagcctcgattcaagattggagacaggattcacttgttagaacttggtgtcgcattctacctcttcttttgtggctgctatgatgttatgttcgggaaaaaccactacttcatattcctctttatccaagctcttgccttcttcattatggcatttggatatgtcggcaccattgttccccagtcctagaaggacatggcatttcttcattcggctacttcagcttccatgccttcatatcaaagtgtattatactgttttcaacaaagttctggcgaattacaaacttgttagtgtaaaagaaagggtggtcattctttaaggtgtcgcataatcagagtcagtgactctaaagagatagttttcttgtgaatatactgcaaagatatataaggaaattacggaagttcttcacatgaaaagggaagcatgcagaacaagaacgcaccaatcatgtggcattcctcaggagcaaacatctttgattggatggattgtttataagattttgtagtttttctttttcttcttttaacctttctttacactgtatttgtttgaagaaataagcaacttcaagaaatgggataaattacagactttcattttgtatttctaccgacatattaacctaggaaacctcaaacacttttattttaaagagtgtctcgataccaacacatatatgagacttatag

SEQ ID NO: 116 - DNA, 1250 bp, Glycine max
gaaaacagtgttccaaaatccaaacacactctctctccccatggcgttgaacaatggcgtccccgccaccggcaccggcctcatcgtcagcttcggtgagatgctcatcgacttcgtccccaccgtctctggcgtgtccctggccgaggcccctggcttcctcaaggcccccggcggcgcccccgctaacgtcgccatcgccgtgtcgcgcctcggcggcaaagccgccttcgtcggcaagctcggcgacgacgagttcggccacatgctcgccggaatcctcaaggaaaacggcgttcgcgccgacggcatcaactttgaccagggcgcacgcaccgccctggccttcgtgaccctacgcgccgacggggagcgtgagttcatgttctacagaaaccccagcgccgacatgctcctcaagcccgaagaactcaatctcgaactcatcagatctgcaaaagttttccattacggatcaatcagtttgatcgtggagccatgcagatcagcacacttgaaggcaatggaagtagccaaggaatctgggtgcttgctctcctatgaccccaaccttcgtctacctttgtggccttcggctgaggaagctcgtaagcaaatactgagcatttgggagaaggctgatttgatcaaggtcagtgatgcggagcttgagttcctcacaggaagtgacaagattgatgatgaatctgctttgtcattgtggcaccccaatttgaagttgctccttgtcactcttggggaacatggttccagatactacaccaagagtttcaaaggatcggtagatgctttccatgtcaatacagttgatacaactggtgccggtgattcctttgttggtgctttattggccaagattgtcgatgatcagtccatacttgaagatgaaccaaggttaagagaagtactaaagtttgcaaatgcatgtggagctattacaactacccaaaagggagcaattccggcccttcccaaagaggaggctgcactgaaactgatcaaaggggggtcatagaatcttttggcaaaatgcaaaagtgctagcatgatttcgttttcttcccctaatgtttaaattttccgttggatttgcttgctataagtttaggagggaacttttgttttttctcctatgcactgttttcaggttttgccaaataacgctttctttcaaattttgagattagcgattgaatgaaaatttgaatcataagctcggcccatagttg

SEQ ID NO: 117 - DNA, 2464 bp, Phaseolus vulgaris
attctgttcaaattcgatactttgtttcctgtggttgcagagaacgaggagcctcttctctctctctctctctctctctctctctcttttctctctctttctccccctctctctatatgcttgctgcattgtcttgttctaatacttcagaatctcttttcacttccacgcattaaagtgttgtctctctcttgagttggtggcgcttgctttcatatttatgggagtttgtttccatgttcttacactttctagtagtagtgttgcaagagcacgtacatagcgcaccagaagaggaaagcaaggaaaacacacaaggcattttaccctcttttgttgagcttctcgtgttgattaatttagttcttttctttggaattgagaaacagaacaacaacgagcctggtcttgttcctccgctctaaaacatatatagatagtgtggaggttggagaaggggcttccaaagcaatgatactttgctatttgaaattctaagaagttttggatctatagacatacttctaagcggcacagaaatatcagagagcttcaagagctgcatgaagtagaagtttgcaaaaatgagagatgaaaattccaagaaaagcaagctctcatggtcaaagaaaatggtccgaaagttctttaatatcaaatgcaagactgaggattccctagcagacgttactgcttatggaggaggtgacgtggaatgcagaagtaggaatagcttctctgagagagagccatgcacaatcaaaaagagcaaaacagagaagtttagcagaagcacagatcaggtgaggcgagcaagaatgaatcttgaccaccctcgaattatagatgtgcagaattatagcatttttgtagctacgtggaatgtagccggaagatcccctccaagtactttgaatttagatgattggcttcattcttcatcgcccgctgatatttatgttcttggatttcaggagatagttcccttgaatgctggtaatatcttaggggcagaagacaatggccctgctaaaaaatggttggctctcatcagaaagactctaaacaatcttcctggcaccagtggaagcagtgggtgctatactccatctcccatacctcagccggttgtggagctgaatgcagattttgagggatcagctaggcagaagaactcatctttcttccataggcgatcattccagacaacttctagtggctggggaatggacaatgatccttcagttgtgcagccgcggctagatcgaagatacagcgtttgtgatcgtgtaatttttggtcacaggccaagtgactttgatcccagttttagatggggctacaggcccagtgactattccagggcaagtgactactcaagaccaagtgactactcaagatggggttcatctgatgatgataatggccttggggattcaccaagtacagtcttattttccccaatgtcccgtggtggaggaggaccttcctttaatgaagagggatatgccatgccaggtcactcaaggtactgccttgttgctagtaagcaaatggtgggaatatatctcacaatatgggtgagaagtgaactgaaagatcatgttcaaaatatgaaagtgtcttgtgttggcagaggattgatgggctatctgggaaacaagggatccatctcaattagtatgtctttgcatgaaacaagcttttgctttatctgtagccatttaacctcaggacagaaagagggtgatgaactaagaagaaattctgatgtgatggagattcttaaaaagacaaggtttcctcgtgttcaaggagtggacaatgataaatctccacaaacaatcctcgatcatgatcgaattatatggcttggagatttgaactaccggattgccctatcctaccgttcagctaaggcacttgttgagatgcaaaactggagagcattgttagagaatgatcaattgagaatagagcagaaaagaggtcgtgtgtttctggggtggaatgaagggaagatatattttcctccaacgtacaagtattcaactaattcagatagatatgctggagacgatatgcaccccaaagagaaaaggagaacccctgcttggtgtgaccgtattttgtggtatggagaaggtctacatcagttgtcgtatgttcgaggggaatcaaagttttcagatcacagacctgtctatggcatattttgggctgaggttgagtcagctcatggaagattgaagaaaactatgagttgttctcgttccagaattgaagtggaggaacttctgccatattccggtggatatactgaactaagttttttctaaaggagtttggtatatgagacgtgtccttccacattcagaagcaattggtcccccattaccatgctggaattactttgaagaaaactcattcatggagggagatagggacaacccatttcccacat

SEQ ID NO: 118 - DNA, 2035 bp, Sorghum bicolor
cccctcccgacgacttgctccgcctccatctccttctcctccctccctccctcctcagctgctgtcacctgacctccctccctctccgcgtcgctccccatcccgtcccatcttggcctggacacctgggctgcccccccttcgtttccgcgcgcgcggacacgctgagtcgccgcccgaatcctcccgcctccccgccgctgccaacgtcgatctgcgaccgcgactccgcgcgagattcagaaggtaggaggaggggagacgagttcctgtcggtttcattcttggccgccgacttcacatgccaacaaccccaagaagcagaagccaggctaggaccactaggccttggatcttgtcagggatggactttgctgattcgcgacggaagcctaatttcacggggaagattgccgtggcagctgcactcacggtgatgtgcataatcgtgttgaaacagtcccccagtttcagcggtaccagcgtgttctctcgccgtgaaactggggtgacccatgtgttagtaacagggggagctgggtatattggctcacatgctactcttcgtctccttagtgacaactaccgagttaccattgtggataacttatcaagagggaacatgggagctgttagagttcttcaacggctatttccagaacctggaaggcttcaatttatttatgctgatttgggcgatgccaaagctgtgaacaaaatattttcggagaatgcatttgatgctgttatgcactttgctgctgttgcttatgttggtgagagcacaatggagccactcaggtactaccacaacataacatcaaacacattgacagttcttgaggcaatggcagcacacaatgtaaatactctgatttactcgagtacatgtgcaacctacggtgaacctgatacgatgcctattgtagaaacaactcctcagaatcctatcaatccatatggtaaggcaaagaagatggcagaggacatcatcttagattttacaaaatcaaagaaacaatcaaacatggctgtcatgattttaagatacttcaatgtgattggatcagacccagagggacgtctaggagaagctccaaggccagagcttcgtgagcatggacggatatctggtgcttgctttgatgcagctctgggaatcattccagggctaaaggttcgtggaactgattaccccactgcagatggaacttgcattagggactacatcgatgtcacagatcttgtagatgcccatgtcaaagctcttggtaaagctgagccaggcaaagttggaatctacaatgtcggaacaggacaaggtagatcagtgaatgagtttgtgaaagcttgcatgaaggcaacaggagcttccatcaaggttgaatatcttgcccgtagacccggagattatgctgaggtatacagtgatccatcgaaaatctacaaggacctcaactggacagcccaatacactgatcttggccaaagccttgcccaggcatggaaatggcagaaagcgcacccaaacggatatggatcagcctgattcagagttcaaaggttgagagactcatcacgcagatccaaggggtctatgtgcagtgatatagccttcagataattggttcttcaacatagaaacatagcaaacagcaacacaaaagtcgtgattcttttattgcagtgctggaagaagacaaaagtatcacagagagaatgcactacctgttccttgattagtttcatatatataggtcctctttttgttgttgacattttaatatattttgatgtgtgctgaggcactatataataacacaaatgaaattgtgttgtagacagggttagatcaatctcgtgtatcaaccttcgttgtggtagaatgaaaggatataaataagttgatgtatgtttttgtttcccaacttgtttcaagtctacacaaggcctgattgtgccaggttcagcgagctgagctccttgtgttttgagatacattgagtcagtgacacaagcatttctttgaaaggtg

SEQ ID NO: 119 - DNA, 2150 bp, Arachis hypogaea
aaacactctcattcagacaaaaaaagggcaagaaagtggataatagaaacagaatagaaaagaatagaatgtatgtgtgaagtgtgaaccgaacaacaagaattgagagtgtctcattgtttcataaacggtttccattttctttttctgttagctgttactgtttttggtgttgcatactgtgcgagtcaaatgtaggttacttacttagatctgagtgagaatccggtttgttattttgttttttgggaggaatggggagcgtttcttctgaagatggttccgaccagcaaagtgaccgttgcggcagttacagtctcagtgctgacgtcagcgagtccgagagttgcagcagcttctgtggacgtcattttgacgccgacggtggagcttccagctccgccaacttgtctccgcgtcctgtcggtggagctgctgttcccgccggcggccactttcactttccgtcgcaggtcatgcttcccgtcataggaggaaaagacgtggtggtttgggatcacaagccagagaaaagagaccttgatttgtcagaagtggaaatgatgaaggagaggtttgctaaactgcttcttggagaggacatgtctggtggaggaaaaggagtatgcacggcccttgcaatctctaatgcaataaccaatctctctgcaactgtgtttggcgagttatggaggttagagccgctggcacctcagaagaaggccatgtggcgtagggaaatggagtggcttctatgtgtgagtgattccattgtggagcttgtgccttctgtgcagcagttccccggtggcggaacctatgaggtcatggcgacgcggcctcgatccgatttgtacatcaatctaccggctctgaagaagctagatggaatgctgcttggtatgcttgatggatttcaggatacaaagttttggtatgttgataggggaatactattgggtgattccaaggaatgtgatgatgcatattcgcccggaaggggtaggacttccgttaggcaagaggagaaatggtggcttccatctcctaagcttccaccaaatggattgtgcgaggatgataggaaaaggctgcagcagtgcagggattgtacaaatcagatattaaaggctgccatggcaatcaacagttccgttcttgctgaaatggaaattcctggtgcatacattgaatcattaccaaagaatggaaaagcttgtctgggggagataatctatagatacattactgctgatcaattctctcctgaatgtcttcttgattgcctggatctatcttcagagcatcacactctggatgtagctaatagaattgaggctgccgttcatgtatggaggttgaaggaccacaagaaacatctaaatacagttaaagccagacgctcctggggtggaaaggtgaagggccttgttgctgatggtggtggtgataagaaccattctttagcccaacgagctgatacccttctgcaaagcttgaaacacagatttccggggctccctcaaactgcactagacatggccaagatacaatataataaggatgtaggacagtctattcttgagagttattccagggtcatggaaagcttggcgttcaacataatggcaaggattgatgatgtcctttatgttgatgattccataaagcgatgcgcagctgcagagtctatctctcttttcaaccggggaggtttcggtggtcttccaatccagaaaagaatgactccaagtcccttctcaattcaacacaccccatatgcctctcctccatttgcaaccccatcattttgttcatcctcacccattaccggtagcccttgcagtccaagaaggatgcatactgcgaagaggaatggactaaaggacacaacagattctactaagtccgaaaaggcagcctcggccgaatttgagagggtctggtcatacacagggaaccttagtgcaagaagaatgtctagtgatgctccagaaagagactgagttaaaaaatcaactgtctttaaaaactggatctggctaaaggctttaggtcccattcccttgtatatgagggtctaatttttgtatattcttagttcttaggtagtatttgtaggattatgatggatcatattattatgccaa

SEQ ID NO: 120 - DNA, 1044 bp, Zea mays
aattccaaccccagctttgactgccctcgcttggtgctcagttctttcctctgctcctccgcctcttctcgcacctcggcgccttcttcggcaactgcgagcgagatggaggcgcaagacgactgcaagtggcggcagatcccggcgttcggcgactggaacgtgtgggacggcgacatgcccgtcacccagtacttccaggcaggggccttcttcttcgcggcgccggcggagaagggcgacgcggatctcttcaaggtgccccagttgcctgccaagccctacggctacaagaagtgcgttgttcgagtgaagggggagaaagaaaccgctgtgccgccggcggcgaggaagggacgcaggaggcgctgcgtgagcgagcagcacaagtggaagcccaagggagctgtggacgaggacctgtacaagatctccccgcagcttctctgcaaggtgaagaaggcaagtgccctgtaatcaaatcctccctagctagtttgctctcagatcagtgcgtctctcgctgcatgcacccaacgtgtagctaagtggggttttaccttttgtctagttctcgtcatgtgactgtcctttatctagcctaagctgacccctttgcaagtagcttttgtttggatagcattagatagaacatctacatttgccaaagatgtgacctttttttcaaaaagaaagaagcttaagcgcttcatttttttcacagcatttggacggccttttgtcaaaggccatgagcgataaagctggactgtaaattcaagcgagattttaggcgaggattttattctcatgacctgttcttcgttctgcagaagaagctgctgaggaatttgcttggagggtgcctgggcttgggctgcatcgcctgagagtgagagatgcagagcttaataagtttcttgaaagttcgcttgcttggtgctctggagagagttgtatagttgtctacgctaatatgagattaatggaaacttactactgcttctgcactcgtttgaatgtaacactagcttgcattccatc

SEQ ID NO: 121 - DNA, 445 bp, Zea mays
cgccgaaccacctcctatcgctaccaaactagaagcgccaatggggtcagggtgagaccgccgacgccgttcctcaacttcgccatcggtcggagtctgccaggcggccgggtttaggaacgccaatgccgggagagaaattaagatcgacctgtgtggatcttcctcaagcgcgagatgtagggatggatggcctcggccatggtgttcccttgccggtgcgggtctcgccgcggtgccgcaaccccgacgtggacagatctcgtctcaaccttgtcgctgacgagcaagctacagaggattctgaggttcagctggtagagactgctgagcaggagctcgttgaaggagaagaataggtggttcaagtggagccaagtatcgaggagttcgattcgatctaggtggcgtctcccagtcagctttctggcgccaaggatagatt

SEQ ID NO: 122 - DNA, 1339 bp, Triticum aestivum
gctagctttggcgtggctaggaggagaggtagcggctagctagctgttgtgcattgccgggctcgctctcgagcgtaatggcgcagctcccgcccaagatcccgacggcggcgacgggggcgcaccactggcccggcgccggcgtggagcaccacggccacgggcccgccgcggtgtgggcggacgagttcgccgagttcgcggcggcgcgccggggcgcgcaccgcaggtcgctcagcgactcggtggccttcgtggagatggcgccgggaggctgcggcggggccggcgacttcgacaggctggacgacgaccagctcatgtccatgttccccgacgagggagggtcgacggccccggggtccgagaacggcaccagcgacagcgacggcgacaagcacggcaaggaccggtacgacgacgggcacaacgacgatgctaacccggaggagccggggccggggcaagccacgccgacctcgtccacggagacgatccgcgaccccaagagggtcaagaggatactggctaatcgtcagtcggctcagagatctcgggtgaggaagctgcagtacatctccgagctcgagcggtgcgtcacaacgctgcagaacgaggtgtccgtgctgtctccccgggtggcatttctggatcagcagcggacgatcctcaccgtcggcaacagccacctcaagcagcggatcgcagctctggcgcaggacaagcttttcaaggacgctcatcaggaggcgctgaaggaggagatcgagaggctgcggcaggtgtaccagcagcagaacctcaggatgtcgtccggcgcgggcgcggcctccgaccacggcgggccgccccctgtgcgcgcggagaaggagctcatgagctgaagcgatcatcgcatgtcccttccgcgcagcccgccgccgcatcattgacctgggagggaacacatggcatcatgaaatgcatgaatgaaaccgtccatgctttttttctcttgttcttctttttcttgtccattgacctgtgtatcattctttgcatatcgatttcagttttgggttttttactgtgaagaaaaaactgaagtgtgcctccgttgtaaattccgtgtgtagcattgcatcttgtgtacgtagatccgttttcagtttagttttggagccatcatcttttaggaaagttttttgggaaaccacctaagcacaactcttgctttgtatcctcgtactgatttagcagaactgttgtatgtattcttctgaatcctttgtttctcagtaaatgtatatgtgggcttatgcttctttttgtactagctttatccttttgtcacgatgct

SEQ ID NO: 123 - DNA, 1117 bp, Oryza sativa
cgttcacaccaccaccgtctcgtcgcctcgtcggcggcgtctcctccgcgcgagggtccccccccaaaccctagccgccgccattgccacgcgcgcgccccccaccccacgaatggaaggaggcggaggcggaggcggaggcggtggcggaggtggaggtggaggaggcggaggcggggcaccgtacgccacgcgcacggcggaggaggtcttccgcgacctccggggccgccgcgccggcatgatcaaggccctcaccaccgatgtggagaagttttacaagctctgcgaccctgaaaaggagaacttgtgcctttatggatatcctaatgaaacatgggaggtgaccttgccagctgaggaagtgcccccagagatccctgaaccagcattgggaatcaacttcgctagggatggcatgaatgagaaagactggttggcgttagtcgcagttcacagtgattcctggttactgtctgttgcattctactttggagcccgatttggttttgacagagaagcaaggaggcgactctttaatatgataaacaatttgccaacaatatttgaggtagtgacaggagccgctaagaagcaggcgaaagaaaagactcccaacagtagtagcaagagcaacaagcctagttcgaaagtgcagtcaaaagctgagtctcgttcgaaatctaagctgtcagcccccaaggatgaagagggaagtggtgatgatgagggagaggaagaggaggatgaccatgacaacactttgtgtgggacctgtggaaccaacgatggcaaggacgagttctggatctgttgcgataactgcgagaagtggtatcatgggaagtgcgtcaagatcacacccgctcgtgccgagcatatcaagcagtacaagtgcccggactgcaccaacaagagggcccgggcatgagtaacaagaagctgtgtcgaactgtgttagagtggagttgtcaatctccggatgtcatgatctcttagatattatcttgccctagcttttctagtttgtaagcttgtctctaatttaattttaaactgtaactgttgattaacctacctgtgtttaaagcttcatctttcctgtgttaattctagc

SEQ ID NO: 124 - DNA, 3220 bp, Phaseolus vulgaris
attctgttcaaattcgatactttgtttcctgtggttgcagagaacgaggagcctcttctctctctctctctctctctctctctctcttttctctctctttctccccctctctctatatgcttgctgcattgtcttgttctaatacttcagaatctcttttcacttccacgcattaaagtgttgtctctctcttgagttggtggcgcttgctttcatatttatgggagtttgtttccatgttcttacactttctagtagtagtgttgcaagagcacgtacatagcgcaccagaagaggaaagcaaggaaaacacacaaggcattttaccctcttttgttgagcttctcgtgttgattaatttagttcttttctttggaattgagaaacagaacaacaacgagcctggtcttgttcctccgctctaaaacatatatagatagtgtggaggttggagaaggggcttccaaagcaatgatactttgctatttgaaattctaagaagttttggatctatagacatacttctaagcggcacagaaatatcagagagcttcaagagctgcatgaagtagaagtttgcaaaaatgagagatgaaaattccaagaaaagcaagctctcatggtcaaagaaaatggtccgaaagttctttaatatcaaatgcaagactgaggattccctagcagacgttactgcttatggaggaggtgacgtggaatgcagaagtaggaatagcttctctgagagagagccatgcacaatcaaaaagagcaaaacagagaagtttagcagaagcacagatcaggtgaggcgagcaagaatgaatcttgaccaccctcgaattatagatgtgcagaattatagcatttttgtagctacgtggaatgtagccggaagatcccctccaagtactttgaatttagatgattggcttcattcttcatcgcccgctgatatttatgttcttggatttcaggagatagttcccttgaatgctggtaatatcttaggggcagaagacaatggccctgctaaaaaatggttggctctcatcagaaagactctaaacaatcttcctggcaccagtggaagcagtgggtgctatactccatctcccatacctcagccggttgtggagctgaatgcagattttgagggatcagctaggcagaagaactcatctttcttccataggcgatcattccagacaacttctagtggctggggaatggacaatgatccttcagttgtgcagccgcggctagatcgaagatacagcgtttgtgatcgtgtaatttttggtcacaggccaagtgactttgatcccagttttagatggggctacaggcccagtgactattccagggcaagtgactactcaagaccaagtgactactcaagatggggttcatctgatgatgataatggccttggggattcaccaagtacagtcttattttccccaatgtcccgtggtggaggaggaccttcctttaatgaagagggatatgccatgccaggtcactcaaggtactgccttgttgctagtaagcaaatggtgggaatatatctcacaatatgggtgagaagtgaactgaaagatcatgttcaaaatatgaaagtgtcttgtgttggcagaggattgatgggctatctgggaaacaagggatccatctcaattagtatgtctttgcatgaaacaagcttttgctttatctgtagccatttaacctcaggacagaaagagggtgatgaactaagaagaaattctgatgtgatggagattcttaaaaagacaaggtttcctcgtgttcaaggagtggacaatgataaatctccacaaacaatcctcgatcatgatcgaattatatggcttggagatttgaactaccggattgccctatcctaccgttcagctaaggcacttgttgagatgcaaaactggagagcattgttagagaatgatcaattgagaatagagcagaaaagaggtcgtgtgtttctggggtggaatgaagggaagatatattttcctccaacgtacaagtattcaactaattcagatagatatgctggagacgatatgcaccccaaagagaaaaggagaacccctgcttggtgtgaccgtattttgtggtatggagaaggtctacatcagttgtcgtatgttcgaggggaatcaaagttttcagatcacagacctgtctatggcatattttgggctgaggttgagtcagctcatggaagattgaagaaaactatgagttgttctcgttccagaattgaagtggaggaacttctgccatattccggtggatatactgaactaagttttttctaaaggagtttggtatatgagacgtgtccttccacattcagaagcaattggtcccccattaccatgctggaattactttgaagaaaactcattcatggagggagatagggacaacccatttcccacataccgaaaaaggttagttttcttctctttcatgcttttctttgtgctgcttttggcctgcttctttgtctaattttacctttactttatctttgtcagtttataatctgtagttttggtgctacagtcatgctttgcctaacacatgaccagtacagtacgtcatcataatcttggtagctactcatacaccagcttcagtaatgtgcatattttgatacccaactaacaaacactcgaccttccagtgtctcaccaactttgatcgttaacagtccttcacagtcatcaggtactacattgtggctttttgttccatttgatgtttataagaattaacaccaatgcaatctgcttatcataaaaagatttacgcacaaaaaaattataagcatcgatgttaatccttataatgacatgcttattaataatcaccaacttatgcttatttataataatcaatgctttttttcctggtgcaggaagttgatttttttattcaagattttttaattgtttttggagaatatatatgatgactgaatgaaggtggaagcttgtcagaataatcaattgggcactaacatttttttaatgcgaagaaaagaaactgagtttattttttctttttctttttgatcctgagaagatgagagtttgatgtatattgattaccgaagtacttgaggaaaaatacgaacaaacaaaaaatgattgatgttcataatagaattcgagagcctctcttgctcagtcca

SEQ ID NO: 125 - DNA, 1760 bp, Arachis hypogaea
gaggaatggggagcgtttcttctgaagatggttccgaccagcaaagtgaccgttgcggcagttacagtctcagtgctgacgtcagcgagtccgaaagctgcagcagcttctgtggacgtcgttttgatgccgacggtggagcttccagctccgccaacttgtctccgcgtcctgtcggtggagctgctgttcccgccggcggtcactttcactttccgtcgcaggtcatgcttcccgtcataggaggaaaagacgtggtggtttgggatcacaagccagagaaaagagaccttgatttgtcagaagtggaaatgatgaaggagaggtttgctaaattgcttcttggagaggacatgtctggtggaggaaaaggagtatgcacggcccttgcaatctctaatgcaataaccaatctctctgcaactgtgtttggcgagttatggaggttagaaccgctggcacctcagaagaaggccatgtggcgtagggaaatggagtggcttctatgtgtgagtgattccattgtggagcttgtgccttctgtgcagcagttccccggtggcggaacgtatgaggtcatggcgacgcggcctcgatccgatttgtacatcaatctaccggctctgaagaagctagatggaatgctgcttggtatgcttgatggatttcaggatacaaagttttggtatgttgataggggaatactattgggtgattccaaggaatgtgatgatgcatattcgcccggaaggggtaggacttctgttaggcaagaggagaaatggtggcttccatctcctaagcttccaccaaatggattgtgcgaggatgataggaaaaggctgcagcagtgcagggattgtacaaatcagatattaaaggctgccatggcaatcaacagttccgttcttgctgaaatggaaattcctggtgcatatattgaatcattaccaaagaatggaaaagcttgtctgggggagataatctatagatacattactgctgatcaattctcgcctgaatgtctccttgattgcctggatctatcttcggagcatcacactctggatgtagctaatagaattgaggctgccgttcatgtatggaggttgaaggaccacaaaaaacatctaaatacagttaaagccagacgctcctggggtggaaaggtgaagggccttgttgctgatggtggtggtgataagaaccattctttagcccaacgagctgatacccttctgcaaagcttgaaacacagatttccggggctccctcaaactgcgctagacatggccaagatacaatataataaggatgtaggacagtctattcttgagagttattccagggtcatggaaagcttggcgttcaacataatggcaaggattgatgatgtcctttatgttgatgattccataaagcgatgcgcagccgcagagtctatctctcttttcaaccggggaggtttcggtggtcttccaatccagaaaagaatgactccaagtcccttctcaattcaacacaccccatatgcctctcctccatttgcaaccccatcattttgttcatcctcacccattaccggtagcccttgcagtccaagaaggatgcatactgcgaagaggaatggaccaaaggacacaacagattctactaagtccgaaaaggcagcctcggccgaatttgagagggtctggtcatacacagggaaccttagtgcaagaagaatgtctagtgatgctccagaaagagactgatag

SEQ ID NO: 126 - DNA, 1601 bp, Hordeum vulgare
gagagatggccgggggtttcgccggcgtcgaggccggcgccgggagggcggagcagtacgaggggaggatcacgccctacttcatcctcgcctgcatcgtcggctccttcggcggctccctcttcggctacgacctcggggtatccagtggtgtgacctccatggacgacttcttgatcaagttcttccccgacgtgtacaaccggaagcacgcgcacctgcacgagacggactactgcaagtacgacaaccaggtgctgacgctcttcacgtcgtcgctctacttcgccggcctggtgtccaccttcggggcctcctacgtgaccaagcgccacggccggcgcggcagcatcatggtgggcgccgtcagcttcttcctgggcggcgccgtgaacgcggccgcgatgaacgtggccatgctcatcgtcggccgcgtcctcctgggcatcggcatcggcttcggcaaccaggcggtgccgctctacctgtcggagatcgcgccctgcaagatccgcggcgccgtgaaccagctcttccagctcaccacctgcctcggcatcctggtggccaacgtcatcaactacttcaccgaccggatccacccgtgggggtggcgcctctcgctgggcctcgccatgggccccgccaccgccatcttcgtgggcgcgctcttcctgccggagacgcccaacagcctggtggagcgcgggcggctggacgaggcccggcgcgtgctggagaaggtgcgcgggacgcacaaggtggacgccgagttcgaggacctcaaggaggcgagcgaggcggcgcgggcggtgcgcggcacgttccggaacctgctggccgtgcgtaaccggccgcagctgatcctgggcgcgctgggcatcccggcgttccagcagctgtcggggatgaactccatcctcttctactcgccggtgatcttccagagcctggggttcgggtcctcggcggcgctctactcgtccatcatcaccgggtcgatgctggtggtgggcgcgctggtgtccatggtggtggtggaccggctggggcggcgggtgctgttcatggaggccggggtgcagatgatcgtgtcgatggtggtggtggcgacgatcctggcgctcaagttcgggcacggggaggagctgtccaagggcgtgagcacggtgctagtggtggccatctgcatgttcgtggtggcgtacgggtggtcgtgggggccgctggggtggctggtgcccagcgagctcttcccgctggagatgcggtcggcggggcagagcgtggtggtgtgcgtcaacctcttctggacggccgccgtggcgcagtgcttcctggcggccatgtgccacctccggtggggggtcttcatcctcttcgccgcgctcatagtcgtcatgtccatcttcgtcatcctcctgctgccggagaccaagcaggtgcccatcgaggagatatggctgctcttcgacaagcactggtactggaagcggatcgtcaccaaggacccaaagtaccagggacaccaccaacgccaggaaatcgccgccgccgccgccgtcaagcccgtcgccacatcagaatcagatgcttaatag

SEQ ID NO: 127 - DNA, 784 bp, Phaseolus vulgaris
cctttgctcagtagcgttatcctttgctcagtagccatggctgcagctaccatcacatgcaagctttcactgcttctgagtctcttctcagtttggtttctgggtgtaacttctgcttcacttccccccacttgccagcgcatagaatgtcccagctatgacctcatacaacttggaaatggctacgaaatccgccgctataattcatccgtttggattgccaacacccccattcaagacatttctcttgttgaagccacaagaactggcttcagaaggctatttgattatattcagggtaagaacaacctcaagcagaaaattgagatgacagcacctgtgatctctgaagtattacccagtgatggacctttctgtgagtcctcatttgttgtgggcttctatgtgccgaaagtgaaccaagcaaacccgcctacgcctactgaaaaggaccttaagattaaaagatggaagactgtgcatgtagcagttagacaatttggtggatttgtcaaagatactagtgttggggaggaagctgcagccttgcaggctagtattgctggaaccaagtggggtgctgcagttgagaagagcaagagagccggttattctgtttacactgttgcacagtacaatgccccttttgaatatgataatagggtgaatgagatatggttcttctttgacattgaagatgcacttcgaagcatgtgaaaatatataccagacaaataagctctcaacatgaaatcaatatgcagagtgcagactgagctgtcag

SEQ ID NO: 128 - DNA, 686 bp, Brachypodium distachyon
tcgagatggagagcgactgccagttcttgctggcgccgcccatgtacggcgacggccagtttctgcagcagcagctgatgggcggctcaggggagatcaggaagcggcggttcacggacgagcaggtgcggtcgctggagagcacgttccactcgcggcgggccaagctggagccccgggagaaggcggagctggcgcgggagctggggctgcagccgcggcaggtggccatctggttccagaacaagcgcgcccggtggaggtccaagcagctggagcacgactttgccgacctgcgcgcccactacgacgacctccacgcccgcgtcgagtcgctcaagcaagagaagctcaccctcgccgcgcaattggaagagctgaaggagaagctgagcgagcggcaagaccagagcggtagcagtgacgacggcgccgagcacgaggtggatcacgacaaggacgtcagggacaacaaagttagctgcgtcgtggaggaggaggaggccgaaggcgcggcgccggtggtggacgtcgtctcggatgaatcggccgtgggctggtacgagtacgaacgcctggcgtacgggggtggtgctgcggctgccctccccgagccgttctgcgccaccccggagctgtgggagacgacatggccgctggtggagtggaacgcggtcgcatgatag

SEQ ID NO: 129 - DNA, 1515 bp, Gossypium hirsutum
tttcagttttcggatgaagatgaatcgagttgtggttttattattgttattatggtttctctgtttctcgagtgttttctggatgacgtctgccagtgtggttttgattggtaacaacgttaccctctctttcgatgatattgaagctaattttgctccggcaattaaagggtcaggggaatgcggagtattatatttggcaaatcctcttgatgcctgttcagacttgagtattaaagttgatgaactttcaaatggttcgtccccatttgcattggttattcgaggagggtgtagttttgaagagaaagtaaggagagtgcaaaaggcaggatttgaagccgctattgtctatgacaatgatgatgatggtgtcttggttgcaatggcagggaatgcagctggcattaagatacatgctgtctttgtttccaaagcttctggtgaaatactcaaaaagtttgctgggtctactgatatggaactgtggctaatccctagctttgaaaactcagcatggtcgatcatggcgatctcctttatttctctacttgccatgtcagcagtgctggcaacttgtttctttgtacgtagacatcgcattaggcgagaactcccacagtcttctcgagttcgtgaattccatggaatgagccggcgtttagtaaaagcaatgcctagcttgatattcactgctgtcttggaagataattgtacttcaataacctgtgcgatatgtcttgaagattatactgtgggtgagaagctcaggattcttccatgtcgccacaagtttcatgctttttgtgttgattcctggcttacaacttggagaactttttgccctgtttgtaagcgtgatgcaagaactagcacaggtgatccacctgcatcagaaagtacaccattgctttcatccaccctgagcaccatgtcctcctctgcattgtcatctgttcgatcttcattagcatcatcatcagccatacaaattgccccagcattgtcacggtctccatcaattgctcatactctttctcttgccagcaatccatatattcagcaatcacttaggtcctatcgtcaatctcctatgagcttcagccgaagctcggtagaccttaggaacgcatcttctcaaagatctcgtgcttctcatctggtttcgccggcatcattgaattacccttctatatcgcctcttaatgcaagatacatctccccatatttcccaagcccaagcaacgcatcaccaagtatagtcagttcttcgggtcacctactgcatccgctgcattatagcgagtctgctactagtttttctccttttgcatctgctcaatctcttccagactgttaattagatgagtgataacaaggtgagtttcatggagtcataggttgtgatagcattattgagttccttcggatgtgattgtgtagaatgttaacatgctgctgctaccagatgtgtacattgtaacataagattcgtgtgagttactttgattcccc

SEQ ID NO: 130 - DNA, 1245 bp, Gossypium hirsutum
gcactctcactgttgaatttcccggtggtggcttgttgtaacttgacttgctttttgttgtttttatggagttttagcaactctctgtcaaataacattgttaatttatatattctttcaaagcaaagatgggagaaatgtcaagcttccaattgggagttataggggccctgtttctttctgttgcatcatctgtctctattgtcatatgcaacaaagctttgatgagcaatcttggcttcccctttgctaccacactcactagttggcatctcatggtaacattttgcacccttcatgctgcccaaagattcaatctgtttgagaataaatcaattgacatcaagactgtgatgctttttggcatcctcaatggtgtttctattggatttcttaacttgagccttggatttaactccattggtttctatcagatgaccaaacttgcaattataccattcactgtattattggaaactgtcttcctcaaaaagcaattcagtcaaaagataaagctatccctcttccttttgcttgttggagttggcattgcctccattactgatctccaactcaattttgttgggacaatcctttctctccttgccattgcaaccacctgtgttggccaaattctgacaaacaccatacaaaagaggctcaatgtgtcttcaacccagcttctgtaccaatcagctccatttcaagcagctattctttttgtgtcaggccctttggtagatcagttcctcaccaatcaaaatgtgtttgcttacaaatattcccctatagtcctggcatttatcgtactctcctgtattatttctgtatctgtcaactttagtacgtttctggttattggaaaaacatccccagttacatatcaagtacttggtcacctcaagacttgcctggttcttgccttcggctatacactgctgcatgacccttttacagacaggaacatccttggaatcctgatagccatttttggcatgggtttatattcatatttttgcacccaagagaacaaaaagaaacaagctgatccattggagtgtcagatgaaagataaggaagacaaaccatttctggctcacgagaaagaaggccatgaagttaaaagttcagacaagaattccattgtctaaagcaaaacaggattttgttataaagattttgtctattaagttaaggtgttgtttcaaacgttttgtaccttccagcacaaatgactttgattct

SEQ ID NO: 131 - DNA, 2867 bp, Setaria italica
taaaccctaaaccgcctcactccccacccaatttcgccatggacgcggaggaggcctcgccgccgccgcagcccccgccgtgggcgcagaacaagtcggccgcggccatcgattcctcgtcggcccctctcgccgccgcggccgcccgcctctcggcccgctcccgcgcgctcccctcgtcccgcgacttccacttctacaacaacttcccggccttcaaatcccccgtcggcgccgcggccgccaaggccgacgcctccctcggcgtgctgggcgcggccccgctcctcccggcgcggcagcagccgttcccggggggcggcgacctcgacgacgcgcacgactggctcgtcgccgtcaacgacgacctgctcgagcggttcggcgcctccgtggacgagttcaaggcgctgagggagaaggaggaggcgtcagggcggagggcggcctcggaggccggggacggggacgggttccaggtggtgtatgggaagaagaagaagaaggtgggcgatggggaggaaggcgttgaaagagcggaggccttcggggcctccagctcagtgaagatggccaaggacaaggcggctgcgccggggatgaaggcgaaggtgcccttccacatccgcaccatcccgcggccgcagggggtgtaccgcattgtggtggacaactcgaccaagccttttgagcatgctttgcttgagcggagcgaggatggcacccgacccgtgcacccattggaaaaactcccaattgaacaactaatcaacagaaatgttcctgatagtgagcctgtaaagccacctgctttagatgataccccttttacatttgttgaagacctgaaaaccttggaggtgctagccacaaagctgaagagtgcaactgagtttgctgttgatctggaacacaaccattataggacatttcagggtctgacatgcttgatgcagatttcaacaagaacagaggactttattgtggacactcttaagcttcgtagatatcttggtgattacttgagagaatttttcagagatccaaccaagagaaaggtaatgcatggcgcaggtcgtgatataatatggcttcaacgagacttcagcatatatgtgtgcaacctttttgacacaggccaggcttcaaaggtcttacagatggaccgcaacagcctggagcatcttttgcaccatttctgtggagtgaccgcaaataaagagtaccaggctgcagattggaggttgagaccccttcctgatgaaatgatcaaatatgctagagaagatacacactatctgttatatatatatgacctgatgagattgagactagtgaaggagtcatcagctgacagtgatatgcttttagaggtttgcaagcgcagcaatgaaatttgcttgcaactatatgagaaggagcagctgactgattcatcgtatctacatttacatggattgaaagaaaatgagctggatgcaagacagctgtcagttctttctagtctatatcgatggagagatggcattgcccgtgctgaggatgagagcactggctatatattaccgaataagagtctacttgagatagcaaaggaaatgcctgtgacaagtgggaagttaaaaagaattgttaaatcaaaaaactttgagcgccatctcagcactgtcattaacactataagggatgccatatcagcttctggtgcttttgagagtgtagcggaacaactaaagaagggaaagctggaagagttaacaatggcaaatgtgaagaacagcagtgaagacactgaaatgatccctgctgttgatgttgataacaatgaagatccgagtgatgaatctgctgtagtttccacagtgattacaaatgttggtactgcttctccctgtatgggaactgttacaagcgaagcttcattcggtaatatgcatttagaggacttcacaccagaaaagaactcggggacttcgtcagggtttactggactggcagataaggaaatattgagcaatggccagcagcaagtagcaaaggccactgttcaagtatcgaagaggactacagcctttggtgctctgtttggaaaaccagctgctggaagaaggccgaatcttttcccagggctttcaagtgatcagggtaagagtaaggtggacaagataacgtcttctgtggtacttcctttccataacttctctggcagtgtgaaacctccatcaggtagcattccattgaaagaacaagtgcattctgaaccagaaagcgtccaacacagtgatccagcctgtcaaatggaagacgtgatacagttggacactgaaacagatgatccgcaaccaccagaaagtcgtaatgatgatgagcatcaggaacccaaagtcatggaaatgtccaagtccccttcagatgccccctctgatactgagcaacggttccggtcactcaatgaagagagaaacgttcatcagaatcaaaagatacctcaagaacctgaattcagattcccagtggtgccttttgattatgccgaagccagagagaatcttgtgtgtggcgagcctaaagctgagacaaaaaaagacaatgcagttgccaggcccataaatacggattccggagataagcggcgaacttcgaacaaaccaggtgctggagaggaggggaatttccagcatccacgaagacggcaggctttcccaccttctggcaatagaaattttacttatcactaatagtcaagatgtataactgatcaactgtgatgttccaagattataggtaaaagagttaagacaaagggaacacacattgtatgtgggaatattgtgggggtagagacaattcttgaacttccattcacg

SEQ ID NO: 132 - DNA, 743 bp, Setaria italica
gcccgatgcagggagaccccgggtatggtggctacggctacggctatggctacggcgccggcggctacgacaacgacatggccggctacggcgcgtactacacggcaaacgaccggtatcccgccgcgccggccgcctacgaggacccgctcgccggtcggaggcagcacgacttcccggcgccgctcacggggctggagttccaggcgtcggacacctgccccaagaactacgtcatcttcgaccagacgtacgaccggagccgggtcatgttccacccctcccttgccaacaacttcggcggcgggtacgactacgaccaccgctgctacggctacgatcaggcctacgccagcaagaccgcctacgacgaggacgccggcggcggcgccgcctcggttcggcagaaggaggacacggaggagatcgacgcgctgatgagcacggaggacggcgaggacgaggacgacgtgctgagcacgggccgcaccccggggtgccgcgccgggggctcgccggactccacgtgctcgtccgggtacggcggcggcgggaggaagcaggagaccggcggcgagaagaagaaggagcggatgaagaagatggtgcggacgctcaaggggatcatccccggcggcgaccggatggacacgccggcggtgctggacgaggccgtcaggtatctcaagtccctcaaggtggaggtgaagaagctcggcgcgcgcgggtcgagcagttagtag

SEQ ID NO: 133 - DNA, 1301 bp, Setaria italica
gatagatggatccccacggcagctcaatcattgcctcgtttgtttccttcctcttcctcctcgtcgtctcctcctccgccgtcatcccggcgtcggctggagctggaggcagcagcagcaatggcacggcggtgccgttccggtcggccgacgagctgctccggttccagaggatcaaggcccagctcgccaggaccagggatgcctccgtcaagacgatccagagccctgatggcgacgtcatcgactgcgtgccgacgcacctgcagcccgcgttcgagcatcccaagctgcgggggcacaagccagagaaagagcctgcggagaggccgaggagcagtgggcgtgccgatgctgatggcgatcaagacgacgaggaggccttgccgcaggcgtggcggcgctccggtgagtcgtgcccggaggggacgataccggtgcggcggaccacggaggccgacatgctccgggccagctcggtcagccggttcgggatgaaggcccggggtggcggcttcacgcggcgcgactccactgccggaggccatgagcacgcggtggggtacgtgtcgggtggccagttctacggcgccaaggcgagcctgaacgtgtggccggcgcaggtggcgtcgccggcggagttcagcctctcgcagatctgggtcatctccggcgccttcggcaacgacctcaacaccatcgaggccggctggcaggtaagccctcagctgtacggtgacaacaacccaaggttcttcacgtactggacagacgacgcgtaccaggagacgggctgctacaacctgcactgctcggggttcgtgcagacaagcagccgcgtggccataggtgccgccatctcgcccatctcgtcctccggcggccgccagttcgacatcacgctgctcatctggaaggacccgcggcggggccactggtggctgcagctcggctccggcgcgctcgtcggctactggccctcctcgctgttcacgcacctgggcacccgcgccggcatggtgcagttcggcggcgaggtcgtcaacgcgcggccggccggcgcgccgcacacggccacgcagatgggctccgggcgcttccccggggaggggtacgcgcgcgccgcctacttccgcagcgtgcaggtcgtcgactgggacaacagcctcgtgcccgccgccgggctccggctcctcgccgaccggccggggtgctacgacatcgccggcggcagcggcggcgcgtggggcacctacttctactatggcgggcccgggaggaacgcacggtgcccgtagtag

SEQ ID NO: 134 - DNA, 2153 bp, Setaria italica
ctctccctccgtctcacaaccccacccagacgcggacacccgaggcgcgcgcgcgcgtgcggaggcagacaccatgtcgggccaccgtatccccgccgccgcgcgcctcggcggcatcacctcccgccgccacgcggagctcctcctccacagcggcgttggcgacgtctccgtcaaggatctccgcctccgccgcgtcgtcccgcccgcctccggctccctcgactcctcccccgtgtgcgctgcgcccgtgaagcccggatctgtcgagagcacgccaccggaggccgcatcggccgtggcggtggccgaagacctcgaccggaagccggtgctcccgcggtccaagctcgtgcgcgaccccggctcgttcggctaccggcggctgctgcctttcctcaacgagatggctaagaacgacagctccatcggcagatctgactctccgttggttgatgcgcctttgggtgagattcgctgcgaatctgatgccatggattctgtagagccggtggtggcgaagactggaggagaccccgaggtgaaggatggctgcaacaatgtcaccgaagaggccaacactgtccctcatgaccttgcaagcagcaagccgtggcttgcccggtgcacgaggtcgagattttttcgtcatccgagctcgttcagctacaaaaggatgctgccatttctcatggagaatgaaatctcttctcaggaaggggaaagggtcaaaattcgaagagtcgcagatgaaaggatactagcgtcagatgagaatggcgtctcagccagtgggcagcagcatcttgtcgtctctgatgactcttctcaggaatgcaacagagctcaagttgacagaatggaggaagaagagacaccaaaagctgatgaaaatcatgttcttgatgacaggcagcctcaacctgctgttacaaaagcctctcctccagagtgcaatgcagcagaagggcaaaatgtcatgcagcaagaggctttgactacaagtcaagacccactaacttcttctgagggtgatttaacatcagatggggatgttgtccaggcaagtggtcatcatcatattgttgtatcagaggattctccagaggaatgccaaagagatgaagtcaaaagaagtgtacaagatgaagcagtaaaatccgattggagccatgttctggatagcagagaatttcagcctgctgtatcagaagtctttccttcgaagaacagcgtggctgaagtgcaaaaggccacacaagaagaatcattaccttcagatggagatgaggaaaattcaaacaagggtgaccatcttgccaaagagcagcctcagccctgtgtcacaaaggagtccttgactgcacaaccgcatgatagtgctgaaatcactgaagtaccgcagtgccaaaacaaagacgcaggatctcatgatgctggttttgttagccctaccaagactgtgataccattgttgcatcggcattgtgcacagcctgaggattctgtaacttctgttgatgatcagcttcgtgacagtgatgtacaaatgatctgcaggccttctgatccttgtgctgttgacagatcattgtcagtagaggaaatgtctggatgtattccgctcactgaatcaggatgcaaagcaggcatatcccggccaagaggtctccattctacggaaaaaagaggtttttctcctaagaagctttctccaaagaaaggaatacttaagaggcacactagggggtgcaagggcatctgcatgtgcttagactgctgtacgtttcgtctacgtgctgaccgagcttttgagttctctaggaagcagatgcaagaagcagatgatataatatgtaacttattgaaggaggtagcaagccttaggagtctggtggagaagcctgctggccaacaggagtcgacacaagcagcttgcaaacgggcttctcaggtggaagaggtggccagagaacgttgccagcagatgttcgtggatctaaactcccactgcaggatccctggaccgagggtaagattcgcccaatatgttgaggaaaagaaggccttgccatctcctcgtgaaaagaaggcctcgccgtcccctcgcagcagcagctggaggtgaccaaacgtctgaaggtggacgggtc

SEQ ID NO: 135 - DNA, 422 bp, Zea mays
gcgagatggaggcgcaagacgactgcaagtggcggcagatcccggcgttcggcgactggaacgtgtgggacggcgacatgcccgtcacccagtacttccaggcaggggccttcttcttcgcggcgccggcggagaagggcgacgcggatctcttcaaggtgccccagttgcctgccaagccctacggctacaagaagtgcgttgttcgagtgaagggggagaaagaaaccgctgtgccgccggcggcgaggaagggacgcaggaggcgctgcgtgagcgagcagcacaagtggaagcccaagggagctgtggacgaggacctgtacaagatctccccgcagcttctctgcaaggtgaagaagaagaagctgctgaggaatttgcttggagggtgcctcggcttgggctgcatcgcctgatag

SEQ ID NO: 136 - DNA, 257 bp, Zea mays
aaggaatggcgccgtcgtaccggccctaccacgtcgccggcgaggatcagcagcgtaaggtgaaggcgggtgggaagtggttggccgcgtggagcgtgctgggtgttggcggcgacccggcggagatgaagcggcggaggcgggtggccagctacaaggcgtacgcggtggaaggcaaggtgaaggcgtccatccgccggggcatccgatgggtcaaggccaagtgcgaccgcatcgccgccattcacaactagtag

SEQ ID NO: 137 - DNA, 241 bp, Zea mays
cgccaatgccgggagagaaattaagatcgacctgtgtggatcttcctcaagcgcgagatgtagggatggatggcctcggccatggtgttcccttgccggtgcgggtctcgccgcggtgccgcaaccccgacgtggacagatctcgtctcaaccttgtcgctgacgagcaagctacagaggattctgaggttcagctggtagagactgctgagcaggagctcgttgaaggagaagaatagta

SEQ ID NO: 138 - DNA, 1034 bp, Zea mays
gaccaatggcgccgccggacgcgggtgcggcagcagcgtgcggcgcgcggtgggtgaggcgggacacgctgctgggcctcgcgctgggccagttcgtctcgctgctcatcaccgccaccggcttcgcctcctccgaactcgcccgccgagggatcaacgcgcccacctcgcagtcgctcctgaactacgtcctcctcgccgtggcctacggcggcgtcctcctctaccggcggcagccactcacgataaaatggtactactacttaatacttggaattatcgacgtggaagccaactacatcgtggtcaagtcgtaccagtacacgtcgttgacgagcgtgatgctgctggactgctggtcgatcccgtgcgtcatcctgctcacctgggtgttcctcaagaccaagtacggggcgaggaagttcctgggcgtcggggtctgcgtgcttggcctcatcctggtcgtgttctcggacgtccacgcctccgaccgagccaaagggcctaacccgctgaagggcgacctgttcgtgatccttggttcgatgctctacgcctgcagcaatgtcaccgaggagttcgtcatcaagaaaagcaacagggtggagctgatggcgatgctggggcttttcggagcgcttatcagcgccatacaaattagtgtacttgagcgagaagagcttcactccattacatggactagtggtgctgtgctcccttttctcgggttcgcggtagcaatgttcctgttctactcggctgtgccagtaatattgaagttatgcggcgcgaccatgctgaacctctcgctcctgacctcggacatgtgggctgtcctcatccgcatcttcgcttaccatgagaaggtcgactggatctacttcgttgctttcgccgccactgcgggcggcatcgtcttgtactcgtacaagggctccaatgaagtggaggagacggcacaggtggccggggccagcgacgagcacggcaagggccgggacgaggaggctgggacgcggaacccagcgtgatag

SEQ ID NO: 139 - DNA, 587 bp, Zea mays
cggcgatggccaaggcgcgcaggtcgccgttcgccgccgctgagcggttcctcggcttcccccgcggcgggccgtcgccgggggccgtggcgccggcgcccgccgccttcgacgacctgccggacctcgccgaggccgacgtctggtactcggccgccgccgccgccgccaccaacgacccggggagcccacgcgccacggcgtccaggcaggtggaggcggcggagggcaggcgcggcccgcggcagggcggcctgagccgggcgttcggcgacgggcccgggcggcaggcggcggcgtcggctcccgtcgaggtgcccgcgtggcccgcccgcttcgcgttcccggacgcggacccgtcgctgctgttcgagatggagatggggggcgacgaccacgacgaagggcgggagggggacgacggcaggcaggggcagggcgccgggtgggtgccgccgcacgtgtacctggcgcggcggcaggcgcgggcgtccgtggtggagggcgccggccggacgctcaagggccgggacatgtcgcgggtgcgcgacgccgtctggagccggacgggcttcgacgggtagtag

SEQ ID NO: 140 - DNA, 1646 bp, Oryza sativa
cagcaatggcgcctcctccggctgcagctgcggcgttggcggcgtgcattctcgccgtcgccgccaccctcgccggcgccgacgacccctaccgcttcttcacctggaacgtcacctacggcagcatcaaccctctcggctccaccccgcagcagggcatcttgatcaatggccagtttcctgggccgcgaatcgactgcgtgacgaacgacaacatcatcgtgaacgtgttcaacaacctggacgagccgttcctcctgacatggaatggcatcaagcagcgcaagaactcgtggcaggacggcgtgctgggcaccaactgcccaatcccccctggcgccaactacacctacaagttccaggccaaggaccagatcggcaccttcgtctacttcccctccgtcgccatgcaccgcgccgccggcggcttcggcgcgctcaacgtctaccagcgcccggccatccccgtcccgtacccgccgcccgccggcgacttcacgctcctcgtcggcgactggtacaaggccgggcataagcagctgaggcaggcgctcgacgccggcggcggtggcgcgctcccgccgcccgacgcgctgctcatcaatggcatgccgtcggcggcggcgttcgtcggcgaccaggggaggacgtacctgttcagggtgtccaatgtcggggtgaagacgtccgtcaatgtcaggatccaggggcactcgctgaggttggtggaggtggaggggacgcacccggtgcagaacgtgtacgactcgctcgacgtccatgtcggccagtcggtggcgttcctcgtcacgctcgacaaggcggcgcaggactacgccgtcgtggcgtccgcgcggttcagcccgggcgcgtcgccgctgatggcgacggggacgctgcactacagcagcgccgtgtccagggcgcccggcccgctcccggcgccgccgccggagcaggcggagtggtcgatgaaccaggcgaggtcgttccggtggaacctgacggcgagcgcggcgaggcccaacccgcaggggtcgttccactacggcaccatcgcgacgtcgaggacgctggtgctcgccaactccgcgccggtgctcgccgggcagcgccggtacgccgtcaacggcgtgtcgttcgtcgtccccgacacgccgctcaagctcgtggacaactacaacatcgccaatgtcatcggctgggacagcgtcccggcgaggcccgacggcgcggcgccgcggtcggggacgccggtggtgaggctcaacctgcacgagttcatcgaggtggtgttccagaacacggagaacgagctgcagtcttggcatctcgatggatatgacttctgggttgttgggtatggcaatggtcagtggactgagaatcagcggacaacctacaacttggttgatgcgcaagcgaggcatacagttcaggtttacccgaatggatggtcggcaatcttggtgtcattggacaaccaggggatgtggaacctgaggtcggcgaactgggaccggcaatacctcggccagcagctgtacatgagagtgtggacgccgcagcagagcttctccaatgagtacagtatcccgaccaacgccatactctgcggtagagctgccggccttggacactgatag

SEQ ID NO: 141 - DNA, 2763 bp, Oryza sativa
gcaaagagaatcggtgagagagtgagagcggcaaagacaaaaggcggcgagggcgaaacccccaagaatcaaggcaagaggagaagctttgcatttgcccggccgactctcttcttggttcttggttgtggcgtcggcgtctccgtgttgtttgggctggccaccgttgctcgccgttcttgggggcaggcaaacggcaccggcggtatggaggcattgggagatatggagggggaggaggggcagcggcggcagcagcagatacgggtggtgcggtgccccaagtgcgagaagttcttgccggagctccccaactactccgtctacgtctgcggcggatgcggcgccactctccaagcaaagaagaactcagcatctgagaattcctcagagaaatctgatggtggacatgtgaagtaccttgaagtgctggagagttcaccagataacaaaggagctgcatctaaagacacttgtgaggctgcccaagaaggagaagccaaaaatggagaagctaaagcagaagagagacaggtacttcttgacagaatggcagcttgtgatgatagccgaattccaagagaaccaaatgccttgaagcttgaggcttcacttagagatgacagcagggaaattcgggaggccaagtaccggcgcatccgcagtgaggacaaaggagaagcaaaacacacagtgagagccagagacagatcgccaagatcagttgttgatgccatccctccgaatgcatatcctgcagaaggcccgtctgactaccatattaagtcaagattcagacataccaatggtgagcaagctgatatgagaaatttggagggcctaaacagagtcaatggtcttgaaaaagaccgtgctgatctgttacggatgcttgatgagctgagggatcaggtgcagagatcctgtgagatcaccaacaagccaagtggaagtacttctacagataaagcggtggatgcctcagggttatataatcctcgtgagcggttgagtcggttacgacatggttcacctcagttgcagcggagtggttctcagcagtcaccatccttgaatgggcaagctccttgcattccgcaagcttatgctccaggaactgctcagcaagatcttcatggatacggggagccaatggcacacatgggggctccaagctatcctgttggcacatatccatggagaaattttgataattatttttatggacagtatgatcctgaccctctgatctcttaccaccatgatggcttctaccatcagcctgcctgttcttgtctacattgctaccaccgtgagttcttacctgttcaggggcctcctctgggtttcaaccatcgcagggtaccaccgtatgttatgaataatcctagagtttacccggttgatggtcctgcaatgtttggcacacagaattacaattcaagagtcaacgcttcaatgcagcgcaatcacatgagggccgctatgagtaaaaaacctgcacagacttgtgaaccgattgcatgtggtgccccattcactatatgctacaactgctatgaagtactgcaacttccgaagaaatcccccgtgccagggaaggatgagtacaaattacgttgcgggtcatgctcacatgcgcttgtggtcaagcttgatggaagcaggcttgatgtttcagcaccttcacctatttcacacatatctggcggcagcaaaattagttccaatgatggccaaggaagcaatgcgaattctgctccacatgagagggtgcttccactttatagtttttctgcagcaagtcatggttctcaagacctaccctcgaactcaagtgaagctgaaaaaatgcaaggggtatcgtcttcttgcagcatttctgaagatgagaacagccctgcgagatctaattcccagagggacacccctgggtctagggatcttcatcctgaagctgaggtgtctacccgtgttccaagtttacatcttcgtgatcattttggatactcgccatctgagaaggtagttgatggatcagggaaaggaagcagaagtactcgatctgaacatgagaaggctgtgttgacagaaagtttcaagcagaacactgtaaaagatgtatcagtagtgaacataatggacttgtcggatgatgagtatgatgatcctgactacatgcaagatcgaggtgatgtggcacaacctgtagatcaccctcgggccgtgaaaacgggtgattcatttttcaccaatctcataaagaagagcttcaaaattaacaacggaatgggcaatggcagagcaaaggttttcattaatggctatcccatctctgatcgggcggtcaggaaggctgagaagatagctggaccaatctatcctggtgaatactggtatgattaccgtgctggtttctggggtgtaatgggacagtcttgccttggcatgataccgccatatattccagaactcaattatcctatgcccaagaaatgcgctgctggaaatacaggtgtatttgttaatgggagagaacttcaccagaaggatttggatttacttgtgggtcgaggactcccagattctcccggtagatcatacagagttgagatgtccggtaaagtgtcggatgaagtctctggtgaggagctgtattgtctcggcaaacttgcaccaaccgtcgagaaaatgaagcgcggatttggcatgagagtccccagaatcatcccttgagatcagtgattcttcggcacaactgta

SEQ ID NO: 142 - DNA, 779 bp, Sorghum bicolor
cagccatggacgagtgggttcgccaagctgaggtgtgggtgcgccaagccgagagctggatccggcagcagcccccggagcagatctatatcgcggccgtggtggttgccctcacaatcctgctgcttatcctagcatcttgtctgaaatcctcaaagctaaatactatagtgctatccggacttagtggcagtggcaaaactactattttctaccagcttcgggatggatcatcacatcaaggaactgtgacttcaatggaagaaaacaatgacacatttgtactacattcggagcaagaaaggaaaggcaaagtaaaacctgtgcatgttgttgatgtccctggccattcaaggctcaagcccaagcttgatgaagtcctgcctaaagcagctggggttgttttcgttgttgatgctcaagatttcttgtctagcatgcaagctgccgcagagtacctgtatgacattctgacaaaggcaactgtagtgaagaaaaaggttcctgtgcttatattctgcaacaagacagataaagttacagcccactcaaaggagttcataaagaaacaattggagaaagaaataaacaagcttcgggaatcaaggaatgccatatcatcagctgacatctctgatgaagttcagctcggggtccctggagaggtattcaacttcagccattgccagaacaaggtggctgttgctgagggtgccggttcgaccggtaatgtttcagctgttgagcaattcatccgtgaacatgtgaaggcgtagtag

SEQ ID NO: 143 - DNA, 995 bp, Sorghum bicolor
ctctcatggcttccaaggcgccgccggatctactgaatgctactagttctatccatatgattgtgcgccagctgttctcccggatggtcttttcccttcagatggagtgttccctctccatggagataatttccttttggttgtggcttgaagggaatggtcatcctgatttccttgcaagcgtagaatcctttgataactataatctcaggggaattgccgttgctggaaaaatgtttattgaagctctacgtcgtaagtctagtcacttcaatcatagatctgaggaagaaggctatttccagaaagaagctacggaaggtatccttttctacctcaacaatttctgctacaaggctttagaagatattctagaaatagcagaggcaaaggaacgtatctaccgaaacaatcatcaacaagttcagcaacagaacatgaagggtaaagctcctatcatgagcacgaaggatcttttgtctaagatcagggcatccttcactggtaatccgagtcatgaagaaggctcaagttctagaagcatgccatcccccaaaaatcagatcctcagagatattgaaaatccaatcgatcagtgcctatcaacataccctttggcgaccctttttgatagcctgaacttaagggatgatccacaagctgatgcaatccagctacagatccaggtgcagcgacagcccagtattccccgtgatgagagaactctcttcgtgactttctccaatggctacccatttactgcagatgaactattcgaattttttgaggggaactttggaggtgttgaaatcataagcgtggaggagccagttgaacctaggccaccactctatgcacacatctgttttttcacacaggagacaatcctccacatccttcgtggcaacccaagggtcaagttcgtgatacgagggaagcatctatgggctcggcagtttgttccgaagcggaagaaagtccggaactagctatag

SEQ ID NO: 144 - DNA, 1058 bp, Glycine max
ccggtatgtggtccacccaagctaggtcaatcaattaccccgaaatggggatgttcgtcgtggcgccagcttcttccttccaccaccaccaccaccaccagccgccgcaacacgatccctctgtcatggcggattcccttaaccccgccactgcactcggcgtcggcgtcggcgtcattcctctcctcgcagccacgccgtgcctcgaatccgacaacaacatcctcggaagtaggacacgtggcggcgggggaattcagctatggcaagaccaacaacaacaccatcaaagccactacatgaagaagcagctgcagcagggtcttctcgaccataatagtaacaccagttcggggaatttgattcagaacagtggcgaggtaactgcttctggaactagtagcggcggaacaacgtgccaagattgtggaaaccaggcaaagaaagattgtaccaacagaaggtgtagaacctgttgcaaaagccgaggctttgattgtcctacccacgttaagagcacttgggtccccgccgcacgccggagagagcgccagctaatgacgtcggccaccgcagctgtcgccggttctagtggctccacttcgggcactaaaaaacctaggctcattgcttcacaaaccacaacaacttcccacacttccacttccaacaccacccctcctagaagctttgacactagctctagccatcaagatgcggggttcaaagagtcattacctgggcaagtacgtgcaccagcggttttcaagtgtgtaagagtgacggcggtggaggatgggcaagatgagtatgcatatcaagctgtggtgaagattggtggccacgtgttcaaagggtttctctatgatcaaggggtggagaatagggatgtgtatcctaacctatctgagttgcatttgggtggtggaagtggtggtgcaggaagaaatggggtttcatcttcatctccaatgatggatcctaatgatgtttatgcagcttctggtggagggttattagggggttcttcagcatatggtaatccaatgaattgatag

SEQ ID NO: 145 - DNA, 1325 bp, Glycine max
gaacaatgagcgggaagcaggccgcgagacctcgtacccgcgtgggaaagtacgagctgggaaaaaccattggcgagggaagctttgctaaggtcaagttcgctaagaacgttgagaatggtaaccatgttgccatcaaaatccttgatcgtaatcatgtcctccgccacaagatgatggaacagctgaagaaagaaatttctgcgatgaagatgatcaatcatccaaacgttgtcaaaatttacgaggtgatggcaagcaaaacaaagatctatattgtcctagagttggttaatggaggagaactatttaacaaaatagctaaaaatgggaaacttaaagaggatgaagcaagaagatatttccatcaattaatcaatgccgttgattattgccacagcagaggcgtgtaccacagagatttgaagccagagaatcttcttctggactcaaatggtgttctgaaagttacagattttggattgagtacatatgcacaacaggaggatgaacttctccgaactgcttgtggaactccaaattatgttgctcctgaggtgcttaatgatagaggttatgttggttctacatctgatatctggtcatgtggagtcatcctctttgtgcttatggccgggtatttgccctttgatgagccaaatcatgcggcactgtacaaaaaaattggcagggcccaatttacatgtccatcatggttttctcctgaggcaaagaaactattgaagcttattcttgatccaaaccctttaacaaggataaaagttcctgaactcttagaagatgaatggttcaaaaaaggatacaaacaagcaacttttataatggaagaggatatcaatgtagatgatgttgctgctgctttcaatgattctaaggaaaatcttgtgacagagagaaaagagaaacccgtgtcaatgaatgcttttgagctcatatctaggtcacaaagcttcaaccttgaaaatttgtttgagaagcagcaagggtctgttaagagagaaacacattttacctcacagcgccctgcaaatgaaatcatgtcaaaaattgaggaagctgccaagcctctgggatttaatgttcacaagcgaaattataagatgaagctgcaaggtgataagagtggaaggaagggtcacctttcagttgctacagaggtttttgaagtggctccctccttgcacatggtggagctgcgaaagaccgggggtgacacactagagtttcacaagttctacaaaaacttttcatcatcatcagggttgcaagacgttgtgtggcattctgaagaaaaacaatgatag

SEQ ID NO: 146 - DNA, 1796 bp, Solanum lycopersicum
tgctccatttacaatacaatgtgacctttctgtaacactttctctctctctcctaattttctctctcatctctgcaaactccatgaccttcatgattattttacattgggaaaacaaaactcaaccaaaccccattacaaaattagtattttcttgaagaatcagcaaaaaattaggtgttaaaacgaaatcttaacaaacacaagtctttatcattcatccatcccctgtttctttgttattttttcaccaacaaacgaaaaccccatttcatcttctttggggttttaagaagatgatagaacccaaaaaacagagcaaaaacagaggtttttatgtaagaatgaagcttttaaatcacaacaatggcggaagtagaaacagaggattgttttgttacagatatttcaaatgggttctttggttttcactttctttttatttttttgcttcgtttctattcaatcataaacctaataccatttctaaaactaccgttcctcaatattctaaagcttctcgtgctcttattgaataccctgaaactcaacaccatcgagattcgttgaatggattgaagatttacgtttacgatttgccgagtaaatacaatatcgattggttatcaaatgaaagatgtagtaatcatttatttgcatcagaagtagccatacataaagctctgttaaacagcgatgttcgaacactaaatccatatgaagctgattttttcttcgtccctgtttacgtatcgtgtaatttcagcactgttaatggattccctgctattggacatgctcgttctttaatttcttcagctattaaactcatatcatcggaatttaatttttggaatcgaagttcaggctctgaccatatcttcgttgcttctcatgattttgggtcttgttttcacacattagaagatgtagctatggcagatggagtaccggagtttttgagaaaatcgattattttacaaacatttggtgttaaatacgatcatccatgtcaaaaagcagagcatatagtgattccgccgtatatttcgccggaaagtgtacggaaaacactagctacgtcggacgttaatggccgccgtgatattttcgcgtttttcaggggtaaaatggaagttcacccaaaaaatgtcagcggacgtttttacagcaagaaagtccgtactgttatattgaaaaaatacggtagcgatcggagattttacctaaaacgtaatcggtttatcggttatcaatcggagattttacgatcaacgttttgtttatgtccattaggatgggcaccgtggagtccgagattagttgaatcagttgttttaggctgcgtgccggtaattatcgccgatggcattgatcttccgttttcctccgccgtgccgtggtcggaaatatccgtcacggtggcggagaaagacgtcggaaaactcggcacgattctcgagaacgtggcagcaaccaatctgagtacaatacaacagaagctgtgggacccaagaatttcaagggccctactttttcatgatcggacggtggagggtgacgccacgtggcaggttctgcatgccttgacggagaaattaagtaggtcccaccataggtcaagagtatcgaacgaatgagatcatgacacgtggttatttggttaaatagattccagtgccagctaagaaaaaacaacagctagacaatgtatacgcggagatagatcaatcgactatctgaactttcactttattatcgagtcttattatcgagtgatgaggatagtaagcgagg

SEQ ID NO: 147 - DNA, 1250 bp, Solanum lycopersicum
tcacccatttctccctcttatttaccactggggaaaaatagtagtactaataatgaagagctcaataaaagtactattgctgctcgtgctattgtgcgccatttccagcatttccattgctgttattgatggattgttaaagaatggaaacttcgaaatgcccccatcgaaagcggacttaaacggcacggaggttctaaagcacaacgccataccggaatggtcaatttccgggttcgtagagtacataaaagctggccaaaaacaaggtgatatgcttctagtcgtacccgagggctacgccgcggtacgtctaggtaacgaagcatcgatcaagcaaatactcaacgttacaaaaggaatgtactattccttaacgttcagtgctgctagaacttgtgctcaagaagaacgtatcaacgtatctgttacacctgatttcggagtcctgcctatccaaacattgtatagtagcagtggttgggactcatatgcttgggcatttcaagctgaatttccccaagttgagatcttgcttcataatccaggtgttgaggaagatcctgcttgtggtcctctcatcgattcgatcgccattcgtactttatatcctcctagggccactaatcagaatttgttgaaaaatggagattttgaagagggtccatacgtattcccaaacacaagttggggagtacttgtaccaccaaacattgaagatgaccattccccattgccagcatggatggttgagtccctaaaggcagtaaaatacttagactctgaccatttttcagtaccacatggcaagagagccatagagttagttgctggtaaagaaagtgccattgctcaagttgcaagaaccacaattggcaaaatgtaccaacttagtttcaaagttggagatgcaagtaatgcttgtgaaggttctatgattgttgaggcctttgctggaagggatacacttaaagtcccatatgagtctatgggaaaaggtggatataagcgtgctatcctccgtttcaaggccactgctagccggactaggatcatgttccttagcacctactatcacacgaggagtgatgattttgtttccctgtgtggccctgtggtcgatgatgtgactctcttgagtgtaaggacccatcgtcgagtcctctaagacatgtattttgatgaaatacggtggattttatgagttaaatttggttgtattaatgaagcaaagaaggtgggagctctat

SEQ ID NO: 148 - DNA, 2045 bp, Solanum lycopersicum
ctaacatgggttttcctcctttattcctctgttttctcttcatactcttttcactctctgtaagtggaaatgctgagttacaagctctaatggacttaaaagctagtcttgaccctgcaaatgctttgctcacttcatggactgtttctggtaatccatgtgatggttcttttgaaggtattgcttgtaatgaaaagggtcaagttgctaacatttctctacaaggtaaaggccttaaagggaagttgtcacctgccattgctgggctaactcacttgactggactctacttgcattataattcattgtatggagagataccaagagaaatttctaatttggttgagctatctgatttgtatttgaatgttaatgatctctctggtgagatccctcaagaacttggaaacatgtcaaacttgcaagttctgcaactatgctataaccattttactggtagcatacccactcaactagggactttaacaaagctcaatgtcctggctctgcaatccaatcagttaactggtgcgatccccgctagcttgggtgacttgggagtgttgatgagggtggacttgagttataatagtcttttcggttcaattccttcaaaacttgcggatgctcccctacttgaagtcttggatatccgaaataacaagatttctggcaatgtgcctcttgctttgaagagattagttggaggtttccagtatgagaataatccaggactatgcggtgtgggtttcccatccttgcgagtatgtacatctttcgatcgctcgaatccgaacagaccagagccctatggagttggctcaagtggtttatctactagagatattccagaaacagctaatctcaatttaaattgcagtggaaatgcctgcacaacgtcgtctaaaacctcacaggcatctgttgttgtaggggttattgtggttactattattgcatctgctataggaattctttccttcacgcactatagaagacgaaagcagaaacttggaggtggactggaaatgtgtgatagccgtctcagtatcgaccaggccaaggaagttaataggaagaatggttctcccctagtcagtcttgagtactcgattggttgggatccgttggctgagggccggcgttatggtggagtttcccaagaaattctgcagagatacagattcaatttggaagaggtggagtcagctacacagtactttgctgataagaatctattggctaagagcaacttttcaactacatatagagggactctaagagatggatcacttgttgctgttacgagaattgccaaaattagctgcaagtcagaagaagccgagtttttaagaggactaaatgttttgacatctctgagacatgataatttagttaggctgagaggtttctgttgctctaaaagtaggggagaatgttttcttgtttatgattttgtgccaagaggaaacttgttgcactacctagatttgaaggaggacgaagctcgtgctcttgaatggtccacaagggtatctatcattagtggaactgcaaaaggcgttgagtatttgcacgggtgcaaggtgaataagccagctctagtgcatcagaatatctgtgctgaaaacgtgctccttgaccagcgattcaaaccattgctttcaaattcaggccttcataagctcctcacaaatgataccgtcttttcagcgctcaaggctagtgctgccatgggatatttagctccagagtactccactacaggccgatttactgagaggagtgatatttatgcctttggagtgctcattttccaaattttatctggcaagcgaaaattcaccagttcaatgcgttctgctgctgaatcgtccaaattccatgacttgatggacgtgaatctccatggaaggttctctgagtctgaagcaacaaaactagcgaaaatcgctttgttatgtacacatgaatgcccagaggagagaccaaccatggaaacaatcgtacgagaaattggtaatttagctagtccctcctaatag

SEQ ID NO: 149 - DNA, 1017 bp, Triticum aestivum
cgactccagagctcacacagtgctggacgcgccgcgacgagtcggaggggaaagatcaagatggaggcggccgcctcgaatccgtcgagcaagaggatcgccctggtcaccggggggaacaaaggggtcgggctggagacgtgcaggcagctcgcgtccaaggggctcaaggtcgtgctaacggcgaggaacgcggcgagggggctggaggcggtggaagacgtcaggcgctccggtgctgacgctgttttccatcagttggatgtcaccgaccctaacagcgtcgcccggctggcagatttcgtcagggatcagttcgggaagctcgatatcctgataaacaatgcaggcatttcaggcgttgatcgagatccagttctggttgcgaaagttaaagaacaggttgaaagcatggatgtagatcagagagttcaatggatgaaagaaaattccaaggagacatatgaggaagcaaaagaatgcatgagaacaaactactatggggcaaagcttgtcacagaggcactacttcctcttcttcagttgtcctcctctgggagaattgtcaatgtctcatcaggtttttcactgctaagaaacttcaacagtgaagaactgaagaatgagtttaacgacgtcgacaaccttactgaaaagagactagaggagctgttggattcattcctagaagatttcaaggccaatttgatagaggcacatgggtggccgaccggtggctcgtcagcgtacaaagtcgccaaagctgccctcaatgcttacacaaggattctcgccaagaagtaccctaggatgcgcatcaactgtttgacgcctggttatgtcaagagcgacatgtcgatgcacatgggagttttgacgcctgaggagggcgctagcaacccggtgaaggtcgctctcttgcccgacgatggcccgacgggtgcttattttgatagggatggcgtggcctcgtttgtgtgactctgtcgtacgtgtaatggtttcgtccggttttag

SEQ ID NO: 150 - DNA, 1490 bp, Triticum aestivum
agcgagctctgcaatggcggcatcctcggcccccctcgcgttctccgcctccgcctccgccctgtccgcgcgcctgcgcctcgccgctccggcggcgtcgtgcgcggccacgacgcggcgccgccgcccggtggtggtccgcgccaagatccgcgagatcttcatgccggcgctcagctccacgatgacggagggcaagatcgtgtcctgggccgccgcggagggcgaccgcgtcgccaagggcgacgccgtcgtggtcgtcgagtccgacaaggccgacatggacgtcgagacgttctacgacggcatcgtcgcggtcgtcctcgtccccgcgggcgagtccgcccccgtcggcgcccccatcgccctgctcgccgagtctgaggaggacgtcgcgctcgccgtcgcccaggcccaggcgctctccagcggacagccccagcaggaggcccctgctctctcggacgccgccgcttcaccgcccccaccggcggctccggtggctgctgctcccgcgcctgtggctgcggggacgaagggcgttgccacgccgcaggctaagaagctagccaagcagcatagggtggaccttgccaaggtgaccggcaccgggcagttcggccgaattacgccggctgatgttgaggcagccgctggcatccagccaaaaccaaaggtggctcctactcctgctgctgctgcgcctgtcgctgcagcttcgtcagtaagggctgtgccgcaggcggccgtgcttccgccggtgcccggtgccacggtggttccattcactgcgatgcaggctgcagtgagcaagaacatggtggagagcctgtcagtgccagcattccgtgttggttaccccattctcactgataagctcgatgcgctgtatgagaaggtcaagccaaagggggtgacgatgaccgtgttgcttgcaaaggccgctgccatggcacttgcacagcaccctgtggtgaacgctagctgcagggacgggacgagcttcacttacaacagttccatcaatattgctgtggctgtatctattgatggtggactcatcacacccgtcctggagcaagctgataagctggatatatatttactctcacaaaagtggaaggaactagtcaagaaggcacgcgcaaaacagcttcaaccgaatgagtacaactctgggacatttacactgtccaacttgggcatgtttggtgtagatagatttgatgcaattcttccacctggccagggagctataatggctgttggagcctcaaaatctacagtggcggctgataaagatggtttctttagtgttaagagcaaaatgatggtcaatgtcacagctgatcacaggattgtttatggtgctgatttggcagcattcctgcaaacttttgcgaaaattattgaggatcctgagagcctaactttgtaggattttcttggaagtggtctatgagttgttcaaccgtcagttcatttccagt

SEQ ID NO: 151 - DNA, 1092 bp, Triticum aestivum
gctagctgttgtgcattgccgggttcgccctcgagcgtaatggcgcagctcccgcccaagatcccgacggcggcgacgggggcgcaccactggcccggcgccggcgtggagcaccacggccacgggcccgtcgcggtgtgggcggacgagttcgccgagttcgcggcggcgcgccggggcgcgcaccgcaggtcactgagcgactcggtggccttcgtggagatggcgccggggggctgcggcggggcaggcgacttcgacaggctggacgacgaccagctcatgtccatgttccccgacgagggcgggtcgacggccccggggtccgagaacggcaccagcgacagcgacggcgacaagcacggcaaggaccggtacgacgacgggcacaacgacgatgctaacccggaggagccggggccggggcatgccacgccgacctcgtccacggagacgatccgcgaccccaagagggtcaagaggatactggctaatcgtcagtcggctcagagatctcgggtgaggaagctgcagtacatctccgagctcgagcggtgcgtcacaacgctgcagaacgaggtgtccgtgctgtctccccgggtggcgtttctggatcagcagcggacgatcctcaccgtcggcaacagccacctcaagcagcggatcgcagctctggcgcaggacaagcttttcaaggacgctcatcaagaggcgctgaaggaggagatcgagaggctgcggcaggtgtaccagcagcagaacctcaggatgtcgtccggtgcgggcgcggcctccgaccacggcgggccgcccccggtgcgcgcggagaaggagctcatgagctgagcgatcatcgcatgtcccttccgcgcagcccgccgctgcatcattgacctggaagggaaacatggcatcatgaaatgcatgaatgaaaccgtccatgccttttttttttctcttgttcttcttttttcttgtccattgacctgtgtatcattctttgcatatcgatttcagttttgggttttttactgtgaagaaaaaactgaagtgtgcctccgttgtaaattccgtgtgtagcattgcatcttg

SEQ ID NO: 152 - DNA, 1103 bp, Arabidopsis thaliana
ttgtaatggcaacagatgaaatgaaatcagaaactaaaaaaacagaacataagcaaaaacaatctacacaaatcaaacaagaccttcctcctccgaccataccacctcttccacttccttacaagtcatgcaccttgaaagtttctattcactgcgaaggctgcaaaagaaaagtcaaaaaaatacttaccagcattgaaggtgtttttaaagtggacattgatgtgaaacagcataaagtaacggtgataggaatcatctcgccggagattctgttaaagaagcttaacaaagctggtaaaaacgctgaacaactgccggagatacccgacccggttgacaacaaacccaaacccgtcgacccgaaagagaagaacaagaagaagaagaaagaagagaaagtgcaaataaccaatgaagctacttcttccggtatagataatccggaaaaacccggttctggagagtgtgataaaccggaatctgaaaaacccgtcgacgaaaagtgtctttccggtgacggcggtgaaacttccggtcctgtgaaagaggaaaaaaaggacgttcttaaggagaaagattctgggaaggaagaatctccgtcaccaccggcggattcttcggctccggcggcggagaagaaagctgaagacaccggtggagctgtccctgataatggcaaagttggtaaaaagaagaaaaagaaagggcaaagtttggctactactaacaatcctaccgatggacctgcccgtactcaatcacttcctccgcccactgcaacagattatgaccgtccaattaatcagatcaacgaccaccatataacaaccactaataatccgccacgtcacgatctgtatccttatcctgcacaaggctattatgcgccgcaagtcatgtatggcgtaagttataacgttgctcaacctccggtgagtgtagacgctgcgtcgtattatacacctccaccaccgtattcgtatgcgtacatgcacaacggttatcaaccgtccgatcaaaacccttgtcaacctcggccgtcagattcgtttgagttattcagcgatgagaatccaaacggttgtgcgataatgtgatag

SEQ ID NO: 153 - DNA, 1572 bp, Hordeum vulgare
ctgtctctgtttcgattcgacccgatcctccttcccgccgtcgcgctgcagctgggctcgtcggtctgaccgaggatggaccagccgccgaatggcttcgccgcaggaggtctcttcgttcaacacattgatgggcaaaatgcttctcccccttctgtaattgtgattggtggagggatttcaggcattgcatctgctcgtgcattgtcaaatgcttcatttaaggtcacactgttagagtcgcgggagcgacttggtggccgtgtgcatactgactattcttttggctgcccaattgacatgggagcatcttggttgcatggtgtttgcaatgagaattctttggcgccattgattaggcttcttgggcttagattatatcgcaccagtggtgataactctgtgctttatgaccatgatttggagagctacgcgctctttgataaagatggtcgtcaaattccccaggagatagtaaccaaagttggggaaatatttgagcagattctgaaggagacggtgaaagttagagatgaatatgcaaacgacatgcctcttgttcaagccatctcaatggtgcttgacagaaatccacatctaaagcttgagggtttgcaatatgaagtactgcagtggtgcatttgtcgattggaagcatggtttgccacagacgtggataatatatctttgaaaaattgggatcaggaacatgttcttactggtggacatgggcttatggtgaatggctatgaccctgttatcaaagctctctctcgagatcttgatgtccacctgaaccacagggttaccaaaatcatccagcggtataataaagtcattgtatgcgtggaagacgggacaagctttgttgcagatgctgctataataactgtccctctcggtgtactcaaggcaaacatcatcaagtttgaacctgagctcccagactggaaactatctgcaatctctgatcttggcgttggtctcgagaacaagatagcccttcggttcaacacaatattctggcccaatgtagaggtactgggcagggttgcccaaacatcaaatgcatgcggctactttcttaaccttcacaaagccacaggacatccagtccttgtatgcatggtggcgggcagatttgcatacgaaatggagaagctatcagacgaagaatccgtaaactttgtcatgtcacagctcaggagaatgctaccaggggccaccgaaccggtccagtatctggtttcacggtggggaactgaccccaactccctcggctcctactcgtgtgacttggtcggaaaaccagctgacttgtacgaaagattctgcgctccggtgggcaacatgttcttcgccggggaggccgcctgcatagaccactctgggtctgtgcacggggcgtattcgtcaggtatcgacgctgcagaggactgccgaaggcgcctctcgacgcagctcggtatctccgacctgttccaggtcgggaagattgtgatgagggaggacatgactgaagtcatggtccccctccagatatccaggctgtgaaaggaaggaagaacataa

SEQ ID NO: 154 - DNA, 929 bp, Setaria italica
cttcaatggcgaacttctcatcgcaccactctgctctcctcctcaagatgcctgcggccttgaccaatggccactcccccaacctctcaagcctcttgttctacggccaaaaccatggccaaggagcaccggcgaatgccaacgcggcatcaggaacggcagcagccatggcggaggacgcttcgcttgagagctcctctgcagtggttgacacctccccgcagggtagtgcgtctccaatggacaggaagaggaaggccaccgaggacagtgccacacttagctctgctcactccaaggattgcaagcaggagggcaagagcaagagggggaagaggccccacaaggaggctgaggagaagagcaccactgatgatgaggcccccaaggggtacatccatgtgagggcaaggaggggtcaggcaacagacagccacagccttgcagagagggtgaggagagagaggatcagtgagaggatgagaatgctgcaagcactggtccctggttgtgacaaggttactggaaaggccttgattttggatgagatcatcaactatgtgcagtccttgcagaaccaagttgagttcctttccatgaggattgcctccatgagcccagttttgtatgggtttggactggacagtgatggcctccatgaccatgcacaaaagatgggaggcatgatccaagaagcccttgcaatgcctggtccagtcctgagccaagctagtccaactccatctcaaaccatcatggacaccaccaccacctcctccacaccctattcactgcagggccagggtgccatctctttctctcaggacaatggcagcaattacctgatgcaacaagcagtgggggaaccaacaaggcaggagctgctcaaccagttggtgttcaacaacatgtgctctttccagtagtag

SEQ ID NO: 155 - DNA, 179 bp, Setaria italica
cggagatgggccactccaacgtgtggaactcgcaccccaagaactacgggcccggctcccgcgtctgccgggtctgcgcgaaccctcatggactgatcaggaagtacgggctcatgtgctgcaggcagtgcttccgcagcaatgccaaggacattggcttcatcaagtaccgctgatag

SEQ ID NO: 156 - DNA, 1958 bp, Setaria italica
acaccatgccgcggcgcccgccgctccgcgtggcggcggcggcgctcctgctctgctgcatcctctgcctccgcctcgcgtcggccgagcccgacgccgacaaggcggcgctgctcgccttcctcgcgggggtgggccgcggcggcgccgcccgcgcgcgcatcaactggcccaccaccccgctcgcctgcgcaggccccggctggacgggagtcacctgcagcgccgacgccacccgcgtcgtggcgctgcacctcccggggctgggcctctccggcgccgtcccctccggcaccctcggccgcctcgacgcgctgcagctgctcagcctccgcgccaacaacctctccggccggttcccgacggacctcctcagcctccccgcgctcaccgggctccacctccagcgcaacgccttctccggcgcgctccccgcggggctcgccgcgctgcagaacctccaggtgctcgacctctcctacaaccgcttcgaggggggactccccggcgcgctctccaacctcacccacctcgtcgcgctcaacctctccaacaactcgctcgccggccgcgtcccggacctcggcctcccagcgctacagttcctcaacctctcaaacaaccaccttgacggccccttgcccggctccctcctcaggttcgccgacgccgcgttcgcgggcaacaacgtcacgcgcccggcggcgccggtgccgccgccggcgctcctgccgccctcaacgctggccccgccttccactaagaggcgggtgcggctcagcgaggcggccatcctcgccatcgccgtcggcggctgcgtcctcgtgttcgccgtcgtcgcggtgtccctcatcgcgttctgcaaccgggacggcggcgaggagatgggcggcggtgcggtgtctgggaagggcggggacaagatggggagggagtcgcccgagtccaaggccgtcattggcaaggccggggacggcaaccggatggtgttcttcgagggcccgtcgctggcgttcgacctagaggacctgctccgcgcttctgccgaggtcctcgggaagggcgcgttcgggacggcgtaccgggcggtgctcgaggatgccaccacggtcgtcgtcaagaggctcaaggaggtcaatgccggccgccgcgagttcgagcagcagatggagctggtcggccggattcggcatgacaacgtcgtcgagctccgtgcttactactactccaaggacgagaagctgctcgtgtacgattactacagcaggggaagcgtatccaacatgcttcatgggaagaggggagaggacagaacgccattggactgggaaaccagattaaagattgccctgggagcagcaagaggaatcgcacacattcacacggagaacaatgggaagtttgttcacggcaacatcaaggcctccaatgtgttcatcaacaggcacgacttcggctgcatctcagacctcggcttggcacaactgatgaacccaatcaccgcaaggtcccgttctctaggctactgcgcgccagaggtcaccgacacgaggaaagcatcacaggcttcagacgtgtacagcttcggcgtcttcatcctcgagctcctcacggggaagtcgcctgtccagataaccggcggcggcaacgagttcgtccacctggtgaggtgggtgcagtccgtcgtccgggaggagtggaccgccgaggtgtttgacggcgagctgctgcggtaccccaacatcgaggaggagatggtggagatgctccagatcgccatggcgtgcgtgtcgaggaccccggagcggcggcccaggatggcggacgtggtgaggacgatcgaggaggtgcggcggggcgacaccgggacgcggccgtcgacggaggcgtccaccccggccgtggaagccgccgcccagaccagggcggagagctcatcatccgcagcacagtgatag

SEQ ID NO: 157 - DNA, 3071 bp, Zea mays
ccgctatgtcctcccgcctcaaggatcgcggcggcggcagggccacggccgcggccacccgcccgctcaccccgaagcccttctccatttcgtcatccgcccggcagacgaccgccgccgccgggaaggagaacacggcgtccaagccgtccaagcccacctccgccgtgcggtggtccacgtcgtcgctcccgcgggccagcaggatccaaagctcggtggactcctccaagctcgcctccaccctcagggctcccgtgctgccggggaggacttccatcagtaaggatcccgtggtggaggcaggcttgcggcggagcgtcagtggtgggatcagggcttcttctgtagagaaagggaggaggtcgattagtgttgttggatccagggcctccgaggctaggagagggagtgctggcgctggtagtgatgacactggtagaagggcgaggtttgatgcgaaggcgaaggggtcggatgagatcagcaggaaaagaggtgaccttgatgccaaggggaagcagactgatgagattggcaggaaaagggagagctttgatgcaaaggccaagcagatcggtgggaaaagagatagcttttgtgtgaatgtgttgaagcaatgtgatgagaacaaagggaaaacaaatgcattcgtgactaatatgaagaagcaatgtgaagatgttggtgggcaaataaagggctctgattcaaaggtaaaggcagctgaagaaatcaatatgaagaaagaggggcccaataaattgatgaaggagatgaataccaaaaaggctgatccaggagaggctgcttccaaatctgtggaatgttgtgccatccagaaggatgacgatataggcaagacttctgtcatccctgttttcactgtccatgtggtgaattcaaatgatgtccctgatccaataaggaaacagcaaaagaataatgaagagggcaggaagcaggaagaaaaggtaaaattggcagacaggataggagtttttgagaaagtggctgcaggtggggagggagggtcagcaaaacccgtgtctgctatgaacaggtacccaagcaaattacatgagaaactagccgcgctggaagggagggttcagaagattgctaccgatatcaagaaaaccaaagaaatgcttgatgagaacaacccgaatgagccaaaacagatcttgtcaaatatccagaaggaaatcactgccattgagaaggcaatttctcatgtaaaggatgataataagatacagctgggtactgcagatagcagtgaatgtgagagctctcaccctgaaacagctgaaaaatgtaccataacaaagccaggtaacctgaagcaagctggaaaaggcttgaatgctgatgagctggaggcaaggttctttccacaccacaaattgttgaggggtcgcatatcttcaacttctactcaacaggagttatctgtggatgcaaaaaaagattgtagtggaaaaacaagacctgccgcatctgatcctggcgatgatgagaacagtatagccatggagtttctggcttctttagatggggaagaaaatgatttcttcaaggatcgtcgagctaagaaattggaaaagaataaaatatgtgaagtagcagatgctaccagcaagacatcaagtcaaggtagcacaaagaatccagttgctcccaatcataaggatgaagttgaattgcttgctacagaggagctagaagaatttgatgatcaggaaaacaagtcatccatgatgttacaggaagaaactgaggagtcatgcaatagtcagttatcgggtataggaaacaagtcttcaactggtggatggtttgtttcagagggggaagctgtgcttcttgctcatggagatggcacatgctcctattatgacattgcaaaccatgagttcaaatctgagtacaagcctcccagcttggtatcaaataatacgtggggcgattgctggttgattcgtgccccaggcgtagatggatgttctggtagatttgttgttgctgcatcggctgggaatgcattggagcctgggttttgcagctgggattactataccagagaagtaaaatcatttcatgtcgaggaggaagcttctcaaacttttgctccaacatccagggctattcttggtgctctctctaatgtaggctcatcaagatccagctctgcgctgtcaaatacagagaggcagcaatggtggtataaaccatgcggacctctcctgctatctactgctagcaagcaaaagatggtcacagcttatgatatacgtgacggtgatgttgtgatgaaatgggaagttagcaatctagtaatgggaatggaatactccagcccactacaatggcgtagcagggggaaagtagtaattgctgggagtgaatcaatagggctgtgggatgtgaattcacttaacccacaacccttgttgtctgttgcttctggtaagaaagtgtactgccttcacgtgaataacactgatgctgaggtgggcggcggagtgcgtcaaagggttagttcatctgaggtggaaggaaatgatggtgttttcagcacacaggaaagtgtcaatgtatttgattttcgtgtacctgctggcattgggcttaaaatagcaagacatggcggcacagcaaactcaatcttttcacgtggggactcggtatttattggtagcacagaaggaaggctgcaaataaaaggagggtcaagatcacgagttcagcaatactcgttgagaaaggggaaacttgtcgccacctatgagttacccgaattcaacgctcatatccatcactctgcgataacccaagtatggggcgactcaaaccttgtcttggctgcatgtggtatggggctgttcgcctttgacacgtttaaggaagacacgcagccaacctacagctttgaccgtggaaacaccattgcagcgagagaagctattggccctgatgatctgtactgtcctacatttgactactcatcatcaagggttcttctcgtctcaagagaccgcccggcacattggaggtacttgtagtag

SEQ ID NO: 158 - DNA, 1136 bp, Zea mays
accatatgggcgcggaggcagcgcatgggcatccgcagcagcagcctccctcgtccctccgacccggcagggaggccgcggcgccgcccgcggtggtggggctgcagctctcggcgctgatcgaccacgtcgcgcgcgtcgactggtccctcctcgaccgcgtccctggcgaccgcggcggctcgcagcaggtatccattgatgagctgaatcatattcttgatgaagtgaatgcccacatccttccttcccgcaatgatctcactccggtaactacaatagccggtggaagtgttgccaacacaatccgtgggctctcagctggttttgggatatcaactggaataattggagcttgtggagatgacaaccagggacttctgtttgtcaacaatatgagctttagtggtgtagatctcacaagattaagggcgaaaaaagggcacaccgctcagtgtgtgtgcttggtcgatgcaagcggcaatcgcaccatgcggccatgcctatctagtgcagtcaagatacaggccaatgaatttagaaaggaggatttcaaaggctccaagtggctcattgtgagatatgcacaacagaacatggaacagattgtcgaagctattaggattgcgaaacaggaaggcctttcagtatcattagatttggccagtttcgagatggttcgtgactctaggtctaaacttgttaaccttttggagactggtaacattgacctttgcttcgccaacgaagatgaagctagggaggttatagggggaagcctggaatcagatccagaggaggcgcttgcattcttgggcaagtactgcaaatgggccgtggtgacacttgcttcaaagggatgcatggcaaagcatggcaaacaggtcgttcgagtcccggccatcggggagagcaacgcggtggacacaactggagcgggcgacctgttcgcgagcgggttcctgtacgggctggtgaaggggctgccgctggaggagtgctgcaaggtcggggcgtgcagcggcgggtcggtgacgcgggcgctcggcggggaggtgcggccggagaactggcagtggatgtacaagcagatgcacgccaggggcttgctgctcccggagctcaagaactgatag

SEQ ID NO: 159 - DNA, 2231 bp, Zea mays
ctccgatgcagccgcctcgccgcgcgcttgtcacatccctcctccgcctccgctccttctcctccattgcctatcctcatccctacccacccgcgcccctgcgacgccaccagttcgtcgccgaccccaccacctccacaaaccgtggtatcgtcgggggcatcggcggcgtcggttccgggaacgggaacctcttggacccgacgcagctcctccgcgatgacccggtggcaatcaccgcttccctttgggtatcctccttccgcgccgccgcctccacctccagctcttgtacccccacaccgccgcagccactcacccccttcctctctcgcctggagctgtgggtgctcgcctaccagaaggcgtacgctgacgagaccggctcctatctgccgcgctcctccatcccggcctccacgctcgcctccctcctaacgctccgcaacgccgtactcgacggccgcttccgcttcggcaaccgcctcacccccatcctccagtccccgcgcgccgccaacgcgccggaccctgccaccctctccaagcgcaagctccgcgccctccttacaacccccggcccatcgcccttccaggaccgcgtcgtgcaggagctgctcctactcctgctcgagcccgtctacgaagccaggttctcgccaaagtccttcgccttccgcccaggtcgatccccgcatgccgcgattcgcaccatccgccgcagctttgctccgtacctctggtatatcaagggcgacctctccccactcctgcactcgcctgatcctgctctcgtggtcggtgcgcttatccgtgatgtgcgtgataaaaaagtggttgatttgatccgttcggccctgctcacctcggtggtgaccgcaagcgatgatgctgcagtaaagaagaagaagaccaagaggaaataccagaagaagaaggtgctgccagagggggagccgaagcctgacccttactggctgcagacgttttttgggtttgcaccagaggaagcacagacacagcctgattggggccattgtggggtgctgagcccgttgcttgccaatgtgtgcctggatgagtttgataagtggatggaagagaggattaaggagttttacaagccatccaagtccgatgttgtgggaggggatgatggtattgagcagggcaatacatcatggccagagtttgttcccacgactggccctgacaagacaaggaaggtggactacattcgatacggcgggcatttcttgattggtgtgagggggccaagagcggatgtggcggtgctccggaagcagctagttgagttttgtgatcagcgattcaggatcaaacttgataacgagagcctccctattgagcacatcacaaaaggagtcatgttccttgaccatgtgctgtgccgtcgagttgtgtacccaacactgcgttacactgctacaggaggcaagatcattagtgagaagggagttggtacactgctctcagtgacagctagtctgaagcagtgcatcaaacaattccggaagcttgagtttttgaaaggagaccgcgaaccagatccacaaccatgcttccgtatgttccacgccacacaatctcacacaaattctcagatgaataagcttttgctgacgatggcagagtggtatcgctacgctgataaccgcaagaaggttgtcaacttctgctcttacattataagggggtcactggcaaagttatatgctgccaagtacaagttgcggtcaagggcaaaggtctataagatcgcgtcaagaaatcttagtcggccattgaaggataagaaaggccagtcgccagagtatcacaatttgctgagaatgggccttgttgattcaattgatggtcttcagtatacaaggatgtcgatggttcctgatcctgattacacgccgttaccatttggatggcggccagatcatgagaagattttgctggagtacataaagctcacagatcaacagacattgaaagagcagagaaactgcaccagggaggacgggcttataacaccacaggacaatatttcgatgcttgtatggggctacaagaaaaatgctgttttacttccttcaaaagtgagtgatgcccaaggatccacagaggaccttggttcagataccgatgaattgaatgaaaaagagctaggaaatgagggtaaccaaagtttccaaaagcttgctgaaatgtcatgatag

SEQ ID NO: 160 - DNA, 683 bp, Zea mays
gggacatggaaaccgtcgtgggagacctcatggcgaccgagctgaggcttggcctgccgggcaccgtggacgactgcagccagcaccagcagcagacccagctgaaggtggccgcgccgccgtccaaccctactaggggcaagaagcgccccgccgccgaggaggaggaggcaaacaagcgcgacgcggaggcagcacccccggcggccaaggcgcccgtggtcggatggccaccggtgaggtcgtaccggaagagctgcttccagcaggcaaagcagcaggccgtcagcagcagcagcaaggcggccgacaaagaggatgctgcggcgccggcgcccagctgcacggcgtccgcagccgcctcaaacgccaccgccagcgccggggccggctcattcgtcaaggtgagcatggacggcgccccgtacctgcggaagctcgacctgaggatgtacaaggggtaccgggagctccgggaggccctggaggccatgttcgtctcctccggcagcgccaacaacaacaacaacctgtcggagttcgccgtcacctaccaggacaaggacggcgacctcatgctcgtcggagacgtgccgttcgagatgttcgctagcacctgcaggaagctgaggatcatgaagagatctgaagccacaggcctgggatcggcgagacaatgatag

SEQ ID NO: 161 - DNA, 1822 bp, Physcomitrella patens
atcagcctcctgttgttgttgttgtcacttttgatctcgatattaaaaaacaggaacgcggaggaggctatggcgacaaagcagagtggtggtgctcggcttagccccccggtctccacagagctatcgttgaggtcggaggaggaccggaacttgcttctggattcatcttctagcaaggagattgttgaacaggagttgccagtggcttggtataaacaatgtcaacatgggaggtggcactcttacgcaggtgcagctttctgcttggttgtagcactggtcatttgtgtgccattcttgagctatgaggtttttagtagatgggcatcgcgaggtttgcatccttggggtacatctcgcccgctgcagaagctggacaagccggttgtgattctcgtctcctcggatgggtttaggtttgggtataactggaaggcggccacgccaaacatcgataggttgaggatggaagggaccgaagctgacccggggatgattcctgtcttcccatcgaagacatttccgaatcactatagtattgctacggggctgtaccccgcgtaccatggcattgtagggaactacttccgagatcctaatcctgggagcaatgacacgttcaaacctggcgaattggacccgaagtggtggttgggagagccgatctgggagacggtggtgaatcagggattgcaagctgcgacctacttctggccgggatcgcaggttaagaaggggaattggacgtgcgaatcgaggttttgccaggattacaacagctcggttccttacgaagaccgcgtggacactgtactagggtatctggacttaccttcacgtgagcggccgagcctcattacgctgtacttcgaatctccagatgagccggggcatgaaactggcccggacgcgccgcaaatcacagctgctgtagtgcgcatcgatactatgatagggcggcttcttgcaggactggagaagaggggactggacaaagatgtcaccataatcctagttggggaccacggaatggttgggaaatccgaggacaagatgatttatttggaagatcttgcctccgaggttctgattcctcgagagtgggttatggattacacccctgtgctgcacattcgaccgccgcctaaccttgacgtcacaaccattcacagcagcatggcacgcgcgctcacgtcatccaacatgaacaacgccgagttcttagagatctacttaaaagagcaattgccgccccggttgcactactcgcacagcccccgcattgctcccattgtgggtttggtggcagaaggctacaccctcgcctacgctcgaactgacaagcccatcacctgcggaggtgaacacggctacgacaacgtactactctctatgcgaacaatcttcatagcccgtggccctcagtttgcgcaagggaggcgaattccatccttcgagaatgtggagctgtacgagatcatggctaacatcctcggcctcactccggcgcccaacaacgccagcctcaattttgctgcgtctgttcttcttcccctccgctcatagcactcccaattctttgtacctgatctttgctacctttggtctgtctgtccatcccttgtccaaaatccgacctttggtactgaacttgcggtgacgctttccgtaagtctcagatggttgattccggaagctggagcatatggtattatatcttattattgtgctccgcatttcagagctacatagttagttgtactaagattgcgattcattggtagcgttagtgcagtagtgtctgagttccggtagtggt

SEQ ID NO: 162 - DNA, 917 bp, Oryza sativa
caccaccaccgtctcgtcgcctcgtcggcggcgtctcctccgcgcgagggtccccccccaaaccctagccgccgccattgccacgcgcgcgccccccaccccacgaatggaaggaggcggaggcggaggcggggcaccgtacgccacgcgcacggcggaggaggtcttccgcgacctccggggccgccgcgccggcatgatcaaggccctcaccaccgatgtggagaagttttacaagctctgcgaccctgaaaaggagaacttgtgcctttatggatatcctaatgaaacatgggaggtgaccttgccagctgaggaagtgcccccagagatccctgaaccagcattgggaatcaacttcgctagggatggcatgaatgagaaagactggttggcgttagtcgcagttcacagtgattcctggttactgtctgttgcattctactttggagcccgatttggttttgacagagaagcaaggaggcgactctttaatatgataaacaatttgccaacaatatttgaggtagtgacaggagccgctaagaagcaggcgaaagaaaagactcccaacagtagtagcaagagcaacaagcctagttcgaaagtgcagtcaaaagctgagtctcgttcgaaatctaagctgtcagcccccaaggatgaagagggaagtggtgatgatgagggagaggaagaggaggatgaccatgacaacactttgtgtgggacctgtggaaccaacgatggcaaggacgagttctggatctgttgcgataactgcgagaagtggtatcatgggaagtgcgtcaagatcacacccgctcgtgccgagcatatcaagcagtacaagtgcccggactgcaccaacaagaggacccgggcatgagtaacaagaagctgtgtcgaactgtgttaga

SEQ ID NO: 163 - DNA, 620 bp, Oryza sativa
gcagcatggcgcctttgctgttcaaggacatgaagagcctctcgtgctcgtcgccggcgtccacggcgatatgcccgagcttggagcggcagccgatggtccggccacacaagggcggcgccattgctgcgagccctctctgccaggtccccggtgagccaagaacggttcacaggcaagactgcaggagagggcagcagcatcagcacaaggcggctgccgcgaatggcggcgagctcgtcagccccgccggctcatccaggtacctgctcagcagccgcgccgccgccgccgaggagatccaggaggtggaggcttcggctgctccggccgtcgatgccaaggtggtcagggaagagcaagctggtagtgatgtgaagaacactctgacgcaggagcaggtggttgtactgaaggtatcactgcactgcaaagcgtgcgcgggcaaagtgaagaagcacctcgccaagatggaaggagtgacatctttcaacatagacttcgcggcgaagaaggtgacggtggtcggcgacgtgacgccgctgggggtgctgaacagcgtgtccaaggtgaagaacgcccagttctgggcggcgccgccggcgatagccgcctgatag

SEQ ID NO: 164 - DNA, 4049 bp, Oryza sativa
ccgccatgaacaacttccacgtctacgaggccatcggccgcggcaagcactcgacggtgtacaaggggcggaagaagaagagcatcgagtacttcgccgtcaagagcgtcgacaagtcgcagcggtccaaggtcctcaatgaggtccgaatgcttcattccttagatcatccgaatgttctgaaattttactcatggtacgaaacctcagctcatttttggttaatactggagtactgcgttggtggagacctaaagggcttgcttgagcaggataagaagctgcctgaaaattctatacatgacttggcttatgatcttgtgaaagctcttcagttcttgcattcacaaggaattatatattgtgatctgaaaccatcaaatgttttacttgatgaatctgggtgcatgaagctgtgcgattttggattagcaaggcgtttgaaagacatagagaagaccaatcctggagatgtgccgcaacctttgaaggggactccatgttatatggctcctgagttgttccaagagggaggagtgcattcatatgcttcagatttctgggcacttggttgtgtattgtatgaatgctattcaggaaggcccccttttgtggctaatgaatttacccagctagtcaaatctataatttcagatcctacaccacctttgcctgataacccctcaagatcctttcaaaatctgatcaattgcttactcatgaaagatcctgctgaaagattacagtggtctgaactatgcgagcatcacttttggaggagcagaatgtcaattattcctttacctcctcagcctgcctttgacaacatggtcgacctttctgctacaccatatttagttgagagaaatggtgataaaccttctagacagtccacaccacccaagccccgtgatggcctacggaagaaggacgaaaattctgctaaggtgttcacccctgttaagaatatgctaagtggtaagaaaaacaatgcaaaaccttcctgtaaggctgatggattgaagggtgtaaatatcctcaggatgtctcgtgtagctaagaggaatttgcagagagaaaaagacaaggagaactacaggcgacaccctacagaagcttctgagaatgatacagaagttaagattgaaaacaatgatatggaacttgattttggtgaaaatccagaaggtgatgcacctgatgacaatgatggatcagacaatcctggatccgcagaagatgaaaaactttccactcaaggcactgatggtaatgaagagaactgcatgagtaatcagatggatatgctcacagatgaaggcccagttaaggctgaaaccatgataaaaactgaacataattgttcagaaaatcttgatgtggtggccactccaccaagtatttgtatgaggaaagcacaacgagcaaagacaacttcaggtgccgcagctggttccgagccatctgacatctctgcagcattctggcatccaacagatcttgctgttaaaccagttatgcctggtaggaaaggagataaagctgtagagacagtccctatgcttccgtttgaagctcttcctgctgttgattatattaagttgccacgggaacaaatgaatgcattcaatagtcagatacttcagagtttaagtggtacttttcaggtttcagagaaacagaatatcatcaaatacctggagatgttaagcatcaattctgatgctgcaaatataatcacaaatggtccaattatgctgttgcttataaaaatgctccgtctgtcaaaaacttcagtattgcgtgtccaaattgcttcacttatgggattgttgatacgctactccactatccttgatatagagctggcaagttcagggatttttaatgcactatcagatggtctaagggacaagcatgataaactcaggcgattctgtatggcaacactaggagaattactgttctacatttctactcaatctgatcaagataccaaagaaatcaatgcccaagaatcccctttgaaggataacagggccacagcttcttggcaggttccaagttctgtaattgcgctggtgtcatcaatcttgcgtaaaggtgaagatgatctagcccagctttatgctttacgaaccattgataacatctgtagccaagggacagattggacttcacgtttcgcttcccaagatgtaatcagtcacctgtgctacatctatagagcaactggtaagcaggagaatacaagacttattgcaggatcttgtttggcacgcttagctcgcttcagctcatcttgtattcatttaatactggagaggctggccttcaaggatatcgcatgcacactcattaaaggcaattcacgtgagcagcagatcagtttgaatcttctgaattcagcactagttaacagccaaatcataccaaccatgaaccgctacattcagtcgttaacagaagagaagcagttggttcctggactcatctctcttattgaacagggaactgatgttctgcgtggcaaaacccttctatttgttgctcttctttgcaagaacagtcgaagatggcttcctcatttcttttgcaatgcaaaactactatcagcagttgatagattgggaaaggagaaggaaggcttcattcatcaatgcacagaagcatttgtgcagttggttgcttcattggtcccaggcatccttgacactgtctctagtgatatacaacaggttatgggaggcaagcgtcatggagctgctactgctttaactggacgagctcatccaaagagcataattcatttgtttcctgttatccttcatcttcttgggagtgtttcattcaatcacagagttgtgacgagccatgtattgcttcagttggcaaatcttatgaaaattttggaagcaccatttcaggctcgggatgattttcaaatgacactattgagggttcttgaggcagccacggaggagccttctgttatacttaatgaacacaaaatattcacaagtcgaatccttccaagcttatccgtcttgtacaagggcaataaagatggtgatgccagattcctatgtttaaagatactgtccgatgtgatgattgtgatcttcagtgactcttcattgacgtctaatgagcaaacagtatctgacctggaaaagatctctcagaagtattttctccccatgtatccatcatttgcagaggatgaagatccaatacctatatatgcccagaaacttctggtaatgctgatggagcatgattatgttaaggtttctgatattctcaatgaagcaacagtatcccggtgctttgaatttttgctaggagatttgtctaatgcaaatgtaagtaatgtcaagctttgctttgcattggcatctgctcccgatatggacaccgacattctttctcagcttcaagttgtcagaagaatagggaacctgctggagtttgtgactgcaaaagatatggatgattttctagaaccaaccttggaactttgcagagcattcattatccggggcatcagcagtgacaaaattgtggccctttccaaagagcccgcactccttgttgatagtgccttcagcatgagcattgctgtcgatcaacaatcatgcgtcatggatatatgcgactttggtggcaacatgggcattttcctcgacctagttggaagttcagatccacatataagcgatttggcatcagactgcttggtgctgttactcaaagcagcacctcgggaggctacggtgggcttgctgaccaatcttcctaaactgagcgttgttctggacctgctgaagcatggcacctgcctaaggctgactcgcctgctgtattgcctggccttctcctgcaggcaatatctagcgcaaggaatgatcgtgtcgatatctttgtcagccttgatgcgagtagaagcactcgtgtcggcattcaagggttcacatgatggctgccttgctgacgccgcctcatatttgggcgctgaactgcagcgtttacctcgctgtggttgatag

SEQ ID NO: 165 - DNA, 1997 bp, Oryza sativa
gcgagatgacactgcagatggagccgccgccgccgccgccgaggcggtcggtgtcgacgagctgcgacctgcacccgggggagacgttcacgggcttctgcgccgcgtgcctccgcgagcgcctcgcggggctcgaggcgtccaccgccgccgcggccgccgcgccgggccgcaggtccacctccgccatccgctcgctcttctccaggccattcgtcgccgccggcggtggcggcggcggcggcggcggcggcggcgcggtcccgtcgggctccagcgccgcggtcccggacctccgacgatgcaagtcgttctcctgcggccgcggcggcgacgtgctcgccggtggctgcggggacgagccgcagcggcggtcgtgcgacgtgcgcgggaggagcacgctctgggcgctgttccaccaggacgaccgcgagcgcgtccgcgacggcacggcgttcggggcgttcccggcctcgtcctcagccgcggcagcggcgctcgcctctgaagtacaacctcagccgccgccgccgccgccgccgtgcgttcctgaggtgttcctggaggaggagatagctatggctgaggagtctgacgagattactccagtggtggagccaatcttggtggtggacacctccggggagatggaaacggaagccaatggtggacgggaggccaaggccatgaaggaccacatagatctagagtgttcgcaggccaagaagccgcagcccaaggacctgaaggaaatcgccgggagcttctggctcgccgcctcggtgttcagcaagaagtggcagaagtggagacgaaagcagaagctcaagaagcaggacgccgctggcagcaaggcagcagccgcagcaatgccgccgccggagaagccctccaagccctcgttcctccggcggagtcgcctccgtggagaagcctgctcggagttcgccggaggtcggcgttcgtgcgacactgacccaaggttctccctcgatgccggccgaatgtccgtcgacgatgtaggcttctcctgggacgagccccgcgcgtcgtgggacggctacctgttcggcgccggcaccggcattggcctcggccgcgcgcccccgccgctctcccgcctgccgcccattctctccgcgatggaggactccccagccggcatcgtcgagcgttccgacggccaaatcccggtggaggacgactcccagccggagcccgatcccgacgccgacaccccgggcggctcggtgcagacccgagactattacgacacgtcgtcgtcaagccggaggcggcggagcctggagcggaccagctcggtgcggaggccgtcattcgaagtcaccgacgcaaagccagtgctgccggcggcggccgccataacaagcgtcaaagattcgccgctaattgggagctcagagttctaccacttccagcatgccgaggacctgctcgaacaccaccggttcagcaccagctccctcatcgaagacttccccatgagcctggacgccgcgttcccgggccccgacaagaagccccggaggtggcgcaaggcgtggagcctctggggcctgatacaccgccgcgccgccggccgcaggggcggcgcgtccgacgtcgcggacagggccttctcggagccgtggccggagctgcgcgtccgcgggtgcaacgccaggatgcagcggtgcaacagcaacgccagcgcgcggagctctttcagcagcaacagcggcggcctcggcagctcgaggcgcagctacgtcgacggcaacggcaacgtcgtcaagcggcggcgggaggagtgcgccctggagcgcaaccgcagcgcgcgctactcgccggggcacgctgacaacggcatgctgcggttctacctcacgccgatgcggagcgccagcggccggcgcgccccggggctaccggccaaaggcggccggcaactgaggtcgcaatcgttcgcgcgtagcatgctccggctgtactgatga

SEQ ID NO: 166 - DNA, 1229 bp, Oryza sativa
caggcatggctgctgcggtagtggcgaggtgtggtggtgccaagaagcggaagggcgaggggctcggggagatgcacgacgacgtgctcgagcgcgtcctggcgaggctcccgccggcgagctacttccggctcaggggggtgtgccggcggtggagcgacgccgcgtcgtcgcccacgttcctcgccgcgtgcggccgcgtccccgcgcgcgacccgtggttcctcatgctgtcggagggggaggggcaggagcggcgtcttccggccgtcgcgttcgacgccggcgagggggaatgggcgcggtgcgggggcgcgccggggcacgtgatgccggtggtggccgcgtcggggggtcgagtgctgtaccgcgcgccggacaccggggagctcaccgtggccaacccgctcaccggcgcgtcccgcgtgctgcctgcgccgccgcccggcgccgcgctccacgccgttgccatgtacggctcctccccctaccgcgtcgtcctcatcacgggcgacctcccggacctctccatgacggtgttcgactcgtccaagaacgcgtgggacgacgcggtggcgctgtcccggaagccggatgcctcgtcgcccgagcgcgacgcggagggcggcgtcggcggcggcggcggcggcggcgacgacgagacggtctacttcctgagcaagtccggcgacgtgatggcgaccaacatgcagcggagcgcgtcgaggcagtactcgtccgccgtcacgtgcggcgacggcggcgaggccgtggcctacttcctgagcaactccggcgcggtggtggcctgcgaactgtcgcgccgcgccttcgccgagctcccccggatcctgcccgtgtacttcgagtactccatcgacgtcgtggcgtgcggcggccgcgcctacgtggtggtcctctcggagctcctcggcacggccagcctgcgcctgtgggagttcgccggcggcgcgtggcggcaggtggccgcgatgccgccggccatgtcgcacgcgttccacggcaagaaggccgacgtcaactgcgtcgggcacggcgaccgcgtcatggtctgcgtcagctccggcgaggccaacggctgcttcatgtgcgacgtgccgaccaaccgctgggaggagctcccgccgtgcgccggcgccggcggcgagcccatggacttcgtggccgccttctcgttcgagccaagaatggaggtcaccgtctaatag

SEQ ID NO: 167 - DNA, 950 bp, Oryza sativa
ccccgatgcaagcgtccgcgcgcctctacaccgccgccgcatccaagcgggtgattgcgggcgtctctagcacgatctcgcgctcgtgccaccggacttgccgatggaagtcacatgccgcgccgctgtccgctcaggaggcgcccaaagggccaaagaggatgaccaagcaggagaggagggttaaaatagagaaatttgttgaggagtataaggcatcgaatgatggtaaattccccacgatgacgactgttcgtcaacatgttggagggggtcactacacggtgagggagatagttcaggaacttgagtacaaccagagaatgttacaactggaccagtctaaggcagctgagctgcccgaaacagctgaacattctgagcatttaaagcccaaggatgtccatggaaatgctcaatttaattctgaaagcttcagtggaaaccaaaatacagatgaccttcacctctcccagaaagttgctgctaccagcactgaaatcatagataagactgaaacatggagattggaagaatcacagatgacatcaggcacttctcattacactggagaaacagaagctgtcaagcaagaccttcacactgcagatagtttacagggtgcaaatgaatcaatcaagtcatgtcaaacagaaagtgacagcataaagaatgaagattccatatctctgggactagatactaaatcagatccaactgacctagaactaggggaaagcaaatctgacaagatagagctgaatagtacagcaaggtttaagaatgtcagtgaaccacctgtatcagatccaattgaaggtgataagacggtcaaggcaaatgtactggacagagaagagaacccggaggttgagccgaagacaggtctttttgggagcctgaaatcttttgcttctgggatcagaaatttttggagaaaactgtgatag

SEQ ID NO: 168 - DNA, 2375 bp, Oryza sativa
cgccaatgctcgcgcggtggctgctcgtgctgctcctcttgctgcctgtttcttggtgtcatcaagatcggcatggccgccgccattacccgcggcggtggaggagcagcggcagtaggagggagctgcacgagccgctgttccctctcgagaacgcgcccgcgctgccaccgccgccgccgccgccaccggcgccgttctttccgttcttgcctgactccgccccgccgcagctgccaccgccggtgaccacgcccgctcccgccggtggcgccggagatggtggtacggacgcaggcgccgccgccaccggggacgcgtcttcgtcttcgtcctcgtcggcgtcgccgcaccccacggcgccggcgaacatctcgtacatggccatgcccatctaccactccgcgccgctccgctccttcctgtcgtcgcaccgcctcctcaccgtcctcctcccggtcgccgccgtcctcgccgccgtgctagccgcggcgctcgtctacctcctcacgcgacgccgccgctgctccaagggggagccgcacgcggcgcatacgaaggccgtgctgctttccccggggaactccacggcgctctacgacggcgaccacgaccagcatggccgggggtccaccgccaccgcagcctccagcgccagctcgccggaactccggccgatgccgcctctaccccggcagttccagcagacgaggacgagcatgccgtcaacttcgcaaaccatccatgaagccggagcagaggacaagcgagcgccgccaccgcagagtgttcgaccgccgccgccaccaccaccacctcctcctccgccgccaatgccgccgagaacggacaacgcgagcacgcaagcagcgcccgcgcctcccccgccattgccgcgagccggcaacggcagcggctggctgccacggcggtacacggagcgcgccgcgccgacggtgatcagggcctcggcgggggcagtccacccggaggagtcgccggcgcgcgcctcgccggaggagaaggccgccgacgcggccgctcggccgaagctgaagccgctgcactgggacaaggtgcggccggcgagctccggccggccgacggtgtgggaccagctgaaggcgagctcattccgagtgaacgaagagatgatcgagacgctcttcgtctccaactcgacgaggagagcatccaagaatggagtcaaggaggcaaatgcagcttgctgcaaccaggagaacaaggtgctggacccgaagaaatcgcagaacatcgcgatcatgctgagggcgctcgacgcgacgaaggaggaagtctgcaaggctctcctggatggccaggcagagagccttggaactgagctgctggagacacttctaaagatggctcctagcagagaagaggaaatcaagctgaaggaattcagggaggatgccgtatctaagctcggccctgccgaaagcttcctcaaggcggtgcttgcgataccatttgcgttcaagagggtcgaagcaatgctctacatcgccaacttcgattcggaggttgactacctcaagacctccttcaaaactcttgaggcagcatgtgaagagctgaggggcagcaggttgttccacaagatcttagatgcagtgctgaagaccggtaaccgcatgaacactggcaccaaccgcggaaatgcaagcgccttcaagcttgatgccctcctcaagttagtcgacgtaaagggtgcagatggcaagacaacccttctgcattttgttatcgaagagattgtcaagtccgaaggtgccagcatcttggccactggccaaacatccaaccaggggagtgccattgcagatgatttccagtgcaagaaggttggcctcagaattgttgctagccttggtggtgagctcggcaatgtcaagaaggcagctggaatggactcagacacactggccagctgcgttgccaagctttctgctggtgttagcaagatcagtgaggccctgcagctgaaccagcagctcggttccgatgatcattgcaagagattccgcgcctcaatcggtgagttcctgcagaaggccgaagctgagatcaccgcagtgcaggctcaggagagcctcgccctctccctcgtcagggagacgaccgagttcttccacggtgactcggtgaaggaggaagggcaccctctgagaatcttcatggtggtgcgcgacttcctcaccgttcttgatcatgtctgcaaggatgtcggcaggatgaacgaaagaacagcgattggatcttcgctccggctggagaatgcacctgttcttgcgaggttcaacgcagtccaacccagtagctccgaggaggagagctcatcgtcctagtag

SEQ ID NO: 169 - DNA, 1094 bp, Oryza sativa
ataatatgagccgcgcgcagcctggcggggcggccgccggcggcggcggcgcggcgaggctcaagccgtccccaagggcgctcttctcgtgcgggatcttcagcacctgcacgcacccggcgctcagcccgacggccacgcccaacaacaatgtcgtggcggggatgggcggggccaagggcggatcgggcacgccgtgcggcggggatgcggccgcggcgtcgccggtcgtggaggcggcggcgccggcggtggagatgagtagtcatcatcagcatccgcagcagcagcagcagcagggtgcggcggtgcagaggagcgtcgggccgtcgtcgtcctcgtcgtcgtcctcgtcttcggcgtcgcagagcttcacgcagtggaggctgccggtgcatcacccgccgcaagcgtcggggtcggcgggaggaggaggaggtggtggaggtgggggtgggggtgcggtgatgatgagcgcggaggagaagttcgcggcgggggaggtggtggcggcgctgcggactgtggagagggagatggaggcggcggcgagggcggtgccggtcgccgtcgtggccggggtcgtggcggcggtgcgggagccggagacggcgaggctcgcggcgaaggtgctgttggtcgtgctgctggaagaagggaacagggaggcggccgtcgaggccggcgcggcgtcggcggccgtggaggcggtggcggcgtccgggccggcgggggccacggcggagcgcgcgctggcggcgctggagctcctctgcaccgccgccggcggcgccgcggccgtgcggagggagcccctggccgcgcccgtgctggcgcgcgccgtggagggcatggccggccgcggacgcgagtgcgccatcggcgtcctggcggccatctacggcaggaacggcgacgaggccgcctcgtcgccgccgtcgccgccgccgccggaggtggtgaaggcggtggtggcggcgatgcagggggagtgcagcgcgcgggggcggcgcaagggcgcgcagctgctgcgcgcgctgcaggagggcggccgcctcggcctcgcgtgggacggcgtcggcgagccctgatag

SEQ ID NO: 170 - DNA, 1838 bp, Sorghum bicolor
tcaagatgaagttcatgaagcttggatcgaatccggatacctttcaggacgatgggaatgaagtcagtattgcggcatctgaattggtgagcgacatcactgttcgcatagggactacaaagttttaccttcacaagtttccgctcctatccaagtgtgctcgctttcagaaattgattccaactactggtgatgaaaatattgagatccacatccatgatattcctggtggtgcaaaggcttttgagatctgtgccaagttttgctatggcatgattgtcacactcaatgcctacaatgtgattgcagcccgctgtgctgcagagtacttggagatgaatgagactgttgacaagggaaatctgatctacaagattgatatcttcctcagctcaagcatattccgaagctggaaagactctattattgttcttggtacaacaaaggctcatttaccttgggcagaggatcttaagctggttagccactgcattgactctgttgcttcaaaagcctctattgatgtttcaaaagttgaatggtcatacacatacaatcgtaagaagctcccaactgagaatggtcatgattcaccatggaatggagtcaagcagcagcagtttgttccaaaggattggtgggttgaagatctgacagatctcgacattgatgcctacaagcaagtcataacagcaatcaaaaccaagggtatggtgcccaaggatgtgatcggtgaggcaattaaagcctacacttacaagaagctcccgtcactaagcaaggtctcaatgatccatggcgatgcaaaagttcgggctatgctagttaccatcacatgcctgttgccatctgagaaaggttcagtttcatgcagcttcctcttaaagctactgaaggcaacaaatttgctgaagtgcggagaaatgtgcaggaaagagcttatgaagcgcattgcacggcaattggaagaagcatcagtgtcagatcttctgatccctacagtggatggggataccactgtttacgacattgacctgattcttagcattgttgaagaatttgtcagacaagatagtaagaatgcccagagacataatggtggtgaagtgaatgaccatgtatcagctcctagtgcatcaatgattacagtggccaaaattgttgatggatatctcgcagaggttgcaaaggacccaaatataccggtctacaagttcttcagtctagctgagacagtttcagccaattcaaggccggttcatgatgggctgtatcgcgccattgatatgtatctgaaggagcacccaggcttgggcaaaagcgataagaagaggctttgtgccctcatggactgcaagaagttgtcgccagatgcatgtgctcatgctgtgcagaacgagcgcctgcctctgaggattgtggtgcaggtgctgtaccacgagcagacaagggcttctgcagcagccaccatccgagctgacagcatcggcatcggctcctacgagagctcaaggtcaggggccacaacaaacacagaagacgagtgggacggcgtcatggccgtggaagacctcagtctgtccaagaccacgaagctagacaaatgtcacacagccagcaccatcgtggagaagaaccacggtggcaacaagggtgccaacggcagggtgaaaggtggcgcaacgtcaaagaaggcgcttgggaagatcatgtcaagcaaagggcagactggggagcgcagcagctcggattcatccgacagcgccatcttgcccagccaggagcatcccaagaggacccccgcaaggagcaccaccaagtcagctgctgcgtagtag

SEQ ID NO: 171 - DNA, 1390 bp, Glycine max
cggttgcagaacagaacaaacttctttcactctttcgcttctgaatcttcaacaatggtgctcgaggcgacgatgatctgtatcgacaattctgaatggatgcgtaacggagattactctccttctcgatttcaagctcaagcagacgctgtcaatctcatatgcggtgctaaaacgcagtctaatccggaaaatacagtgggagttctcacaatggctgggaaaggcgttcgtgttttggttacccctaccagtgatctgggcaagatcttagcctgcatgcatggactagatataggtggtgagatgaacctagctgctggcattcaggtggcacaattggctcttaagcatcggcaaaataaaaagcaacagcagaggattattgtctttgctggaagtcctgtcaagcatgaaaagaagatgctggagatgatagggagaaagttgaaaaagaatagtgttgcacttgatattgttaattttggtgaagaagatgaggggaagacagagaagctggaagcactccttgcagctgttaacaataatgataccagccacattgttcatgttccatctggtccaaatgctctttctgatgtacttataagtacgcctatttttactggtgatggggaaggtggaagtggttttgctgctgctgccgccaccgctgcagctggtggtgtatccggatttgagtttggcgtggatccaaacttggatccagaattggctcttgctctaagagtttcaatggaagaggagagagccaggcaggaagcagctgcaaaaaaggctgcagaggatgctgccaacctagagaagggagatgagcagcaagcaagctcacaacatgcaacaatgactgagcgtgccggtgcagcaacatctgaagctgagaataagacaagtgatttgatggatgatgagaatgccctactacagcaggcacttgcaatgtcaatggatgattctgcaattagccatgatgtaaaagatacagatatgtctgaagcatctgcaagtgatcctgacttggctctggcacttcaattgtcaataacagatagtgcaaaggatcaatcaagccagtcagacatgagcaaattgttagctgatcaatcctttgtatcttctatccttgcatcgcttcctggggttgacccaaatgacccttctgtcaaggatttgctggcgtccatgcaaaatcagtctgagcctcaacagaagaatgacgacaagccatcaaacgaggaggagaagaagtaatctttaagagccacttttccctgtatgatttttattttgttggtagcattcttcgcggctgttgctaatcggggaactattccaatatgtctctctgcagtttaattggaacccaatg

SEQ ID NO: 172 - DNA, 320 bp, Arabidopsis thaliana
attcgatggcatacgtcgaccatgcgttctcgatatcggacgaagacctaatgattgggacttcgtacaccgtcagtaatcgaccaccggtgaaggagatctcactcgcggtgggtctactcgtattcggaaccctaggaattgttttaggtttcttcatggcgtataaccgtgttggtggtgatcgaggtcacgggattttcttcattgtactgggatgtctactgtttatcccggggttttactatacacggattgcatattacgcttacaaaggatacaaaggtttctctttctcaaatataccatccgtttaatag

SEQ ID NO: 173 - DNA, 1031 bp, Arabidopsis thaliana
cttcaatggcggagtatatctgtttattcggcaaggacagtgcagcgattgttataaagcaaccaaagaaatcaccattattcttaaggatgattgttttagtgtttgctatggtttgtggtctctacatttgcgctgtttgcttaaaacagttaagtaatgtcagcttccaaacctcccaacttgtccaaactagtcctattgattctcactcgctacgctttgttactcggattcattatccaaagcctcagacttttaatagagctgaatgtggacataatccggtgaggtactttgcgatattgtcgatgcagagatcaggaagcggttggttcgaaacattgttgaatagtcataacaatgtgagttctaatggagagattttctctgttttggatcgaaggaaaaacatttcttcaatcattcagactcttgatagagtttataatcttgattggtttacgagtgcttcaaagaacgaatgttctgctgctattggtttcaaatggatgcttaaccagggtttgttggagaaccataaagacatagtagagtactttaaccgaagaggcgtctctgcgatatttctgtttagaaggaatcctttaagaagaatggtttctgtgttggcaaattcttatgaccgttatgctaagcttttgaatggaactcataagtctcatgttcattctcctgcagaggcagatgcactttctagatataagccggtaatcaactcgacatcgttgatccacgatttacaagaaacagagaattcagctgcaaaggctttagaatatttcaataccactcgtcatattgttgtcttctacgaagatctcataacaaatcaaacgacattgaaacaagttcaagagtttttgaacattccagtgaaggatttgtcaagcagacaggtgaaaatacatagaggagatttgtcagatcatataaagaattgggaagatataaacaagactttgaatgggactgagtacgagaaatttctacgagctgattattagtag

SEQ ID NO: 174 - DNA, 2354 bp, Sorghum bicolor
gaagctcagttcacctcacctcaccgcaccccgtgtcagtctccctcctcgagatgccgttcccgttcctgcctccacgtcgcagtccgccccagcgacctctattaaacggcaacacctcatgctgcccccgttgccacacccgccgctcatcatgcgctggcgaaggcgattgagcgagttgagctcctaaaagatattttttttttcagtatttccgggagaatataatgcggggtggcggcggtgcttccgggcttgcgtttcggggcgtggtggaggaggaggaagaagaggcagtggtttcggcgccggagaggccaatgcagcggcggcggcagcggcggaggtggggagaggaggtggacgacggctactcgccgagctccacgggcggcggcgggagcagctgctgcgattccttcggctgcgactcgcctttggccgggttcgtgcgcccagatggtgacccagatacagatctggagacagatgggttggccacttcctcctccagtgcttctgcagcctttaccgagcggcaggacgacgaagcagaggaggtgctgtgcggggtgaaggaagaggagtgggctcaggtacaagaaccggccaagaatccggcggcaggccgtgccaccgcagaatgccataaccagcggtaccggacggaggctgctgttcttttgcatggtaggaaggggtcgaagcagcggccagcctcacttgaccttggtagccctggatttcatggagccacgttttctccaagtttcgtgattggtggtgtggggttgatgaacaaaggacttggagcatcactcatcaggtcagacgtgtttcatagtcctgggacgccgaactatccacgacaccgtgcatcagtgttggggtgccagaaagggtggagctctgagagagttccacatccttctaaaggaagtaggagatatccaggcagcagtatggcatttccctacagcaatgggaggacattgccctcgaaatgggaggatgcagagaggtggatcttcagtcccaattccagtgacgcgcttggaagaactacggttgctcatgctcggcgaccaaagtctaaaagtggtcccctggggcctccaggaagacttggtggacagtattcatctgtttcttcagtgtcattgcttgatagtgggagagctggacctattacagcaaattcacctttcatggcaggagtactaatgcccgaacatgtttgtggaggaaaaaatacaaatggaacctattcaggtagaccaattggtgacgaaatcagcattggaagaggagtcaaaatttgtccactgaatggtggatctcatcccattcgaacttccagagttcgccagcgattagattatgcactcgaatcatctgcttcattgcctagcacgcgagaatctatccaagacgagcaggttgaaattactgaagattcagcttctactattgcttctataatttctaggaaagatgctgcaacccagaccagcccagagctaagtaggtcctcttcgcccaacactagaccaacatttaatcgttccctgtcgacagaacaagtgaaagagagcgggagctgtttctcagatcttgatatcagggatgttcagatggatgaccgagtgactttgactaggtggtcaaagaaaaatgtaacacggtcgtctaacaagaattcaacaaacataatagaatggaaggaaaagacagtggagtcaaattcttcatcctggggctttgcggaagcgaagtgcatatctaagattgatagagaggacacaaaaattactgcatgggagaatattcaaaaagcaaaagctgaggcagcaattcagaagttagtgattaagctcgagaagaaaagatcatcttccctggataagattttgaacaccctcaagtctgctcaaagaaaagcccaggtgatgcgtgagcgtgagcgtgatgcagtaacagcaaaccaagatggaaaaggctctaggaaggcaaaaaagagagtgcagcttagcaagaatggtcaaatcagttcgctgagtggctgcttcacttgccatgctttctgatacatgtaattccaaaattgagaataaggatatgagaaattcctttgtatcccctacatcaccttcatgttctccacatcaaaatctggatgaaggtcagagatccatcacatgtcagtacataatatcgataatcattcagctggaaatcacagactcagatcttttgaagatgcttagctacaggcttcagctgctatgataggaaaaggaacaatgcaatatctacagtgcttctctttgttagtttcgattctgccaagg

SEQ ID NO: 175 - DNA, 1118 bp, Glycine max
gtggtatgtgggttgctgcggcaacaaaaccattcatcaaattccaattccacagacacactacttctcttccgcttcttctgatggcaaaccaagcttcactctccttttcttcttccgtgtctcctgttcacgcgcctctcaagcgcgtgggcacgcacaacggaagctttcattgcgacgaggccctcggctgcttcatgattcgcctcacgaacaaattcaacagcgccgaaatcgttcgctcccgagaccctcaggtgttggaggttctcgatgctgttctcgatgttgggggagtgtatgaccctgcccgagatcggtatgatcatcatcaaaagggatttgaagaagtttttgggcatggtttttccactaaattgagtagtgctggtcttgtttataagcattttggaaaggagattatagccaaagaacttgaggtagatgaggaacaccgagatgtgcatcacatatatttggctgtttacaagagcttcatggaggcaattgatgctatagacaatgggatcaatcagtatgatacagaccagcctccaagatacgtgaataatactcatttatcctcaagagtaggaaggctaaatttggattggacagatcctgatcagtcacctgagaaagaaaatgaggcctttcaacgtgcaatggctcttgctggcagtgagtttctggatagtgttcgatttcatgtcaattcatggttaccagcaaggtcaattgtaatggagaccctagcggctagacatactgttgatcctagtggagaaattctagttttgactaaattttgtccttggaagcttcacttatttgagcttgagggagagttgaaaaatgaccctgctgtcaaatatgttctatatcaggatgaaagaagcaagcattggcgagtgcaggcagttgcagtatctcctgacagttttcagagccgaaaggctctaccctcacagtggcgggggttaagggatgaagaattgtcaaagaagtctggcattcctggatgtgtttttgtgcatatcagcggatttattggtggaaaccaaaactttgatggtgccttggccatggcaaaggctgctttgaagatgtagtag

SEQ ID NO: 176 - DNA, 2078 bp, Glycine max
cagcaatggccacgcacgtgagtcacgtgatagtagcggcagcatttcttctacttcttctccctttctctttctccttctccatctcccattctcaccgatccgctgcaatcaacctcttcgctgccactcccacaagcttagaagacgcgtacgaggcgcttagagtttttcagattctcggaatcgaagagaagaatactcctgtgaacgaggacacgtgtcagaaagtagttgaaagtctagcctcgtcttctcctctcaaggatttgttctatgccttgaaagttaacgccattttaaaatgcaatgtcaatgggaacgtttttaaggatattgcttcaagacttaaagccactgttcatgatgcgagtgctttgcttgacatctactattcaattggaggtttggttgttataaaggatcaggattctaatgttgatgtgcttcttgctgatgttgatggggttttccaatcaatcaaggttctcagtcaaagtgacggaagatggcgctatagttctgataatccagagtctagtacctatgctgctggattagctcttgaatcccttgctggattgatctcactagcttcttctgaatttgatcaatctaaggtcaacgtagtgaaaaatggcatagtaaagctttttgatggcattgagaaatatgaggatggaaccttttattttgatgagaaatatgttggtggacatgagcaacggggttctctttccacaacttcttcagttgttagaggggttactgcatttgctgctgtaacttctggaaaaataaatcttccaggggataaaatattgggtctggcaaaatttttcttgggcattggaatccctggagatgccaaggacttcttcaatcaagttgagtcattagcttttctagagagcaacaggatttccattccattgatattgtcactcccagaaacagcttattcattgaccaagaaaggccagcttaaggtcaaggtgaatacagtgcttggttcagctgcaccaccgttaacagtgaagcttgtccgtgcttttagcacaggtgcaaaagattcagctattattgacagcaaggagctccggtatgaccaagaaagtggatttcatgtcttggatgctttgccgaagaatgtggatgtggggacatatgtgtttgtttttgagattgtgcttcatgattttggcagtgaaaaagtttatgcaactggaggccaaattcatgtaccaatatatgtcactggaattattgaagttggtaatgcagaaatcacagttcttgacagtgatcttggaagtgctgaaacccagaaaaagctagatttggctggaaatgatgccgtttcactctcagctaaccacctgcagaagttgaggttttctttccaattgacaactcctcatggtcatgtttttaagcctcatcaggcgtttttcaagttgagacatgagacaaaggttgaacacatctttgtggttggaaataccggcaagaagtttgagaaagttctcgattttcttggcttggtggagaaacttttctatctctcgggaaaatatgaaattgagctgactgttggtgatgctgtcatggagaactctttcttacggctacttggccatgttgaattagatcttccagaagcacctgagaaagcaccccgtcctccaccaccacctgttgatccttactcaagatatgggcccaaagcagagattacccatatattcaggtctcctgaaaagagacctcaccaggaactctctcttgctttcttgggtttgatccttttgccattcattggctttttggttgggttattgcgcttgggggtgaacctaaagaatttccctggttcaacagtacctgccacatttgggatccttttccatgttggtattgcggcggttttgttactttatgtacttttctggttgaagctggacctgttcactacactcaaagcatttggtcttttgggagctatactgatgtttgtggggcacagaattctttctcatctcgcttttacatctgccaagttgaaatctgcatgatag

SEQ ID NO: 177 - DNA, 1151 bp, Glycine max
atcagatgccaagatcaagggggtctgagttgcctcaaaggcagtctccacgaggtccacatcaacatcggacatcaagttctgattctgatccgttgcatcatcggctgattgctgaccgaagtccaaagctaggagaccggcgttccccaagaggtactcaatctgagggattaaatcagaagaagctaggaactcgtattgcagatttggaatctcagctcggtcaagcacaagtagagttgaaagttttaaaggaccagctagcttctgctgaagctgcaaagaaagaagctcaagatgagctagtgaagaaagctgtgcaatcagtattgccagtggtagagaagctccaagagaaatccacttccaagaatgctccagagtctaataaaactgaaatcaaaccccaagatgttatacctgatgacgaccaactagagactgatgtgtttgaagttccaattgagaagttgacaattgaattcagcaaaccagctgatcaatcagaaaaggaaactcaaccatttgaagacacaaatgcagcagcaatatcaaagccagaaaagctttctgtggatgaacatgaactgacactaaagaatgatgaaattgcattgttgaaaaccagtttggaagagaaaggtaaggagttagagtccatgagtaatgaaaaggagaatctgaagaaccaactgaatgaagcagtttcaaaagtgtctgctgctcaaaccaaggaagaaggaatgactttgcagttgaaccaactgagagaagagttggaaaccagtaaagccaatgcagacaagttggatgagaagttgaaatctgtggaagcagaaaaggaggggttggagtcagagatgaagaagctaagggtgcaaactgagcaatggagaaaagcagcagatgctgcagctgcagtgcttgctgggggtgtggatatgagtgcaaggattcctgaaaggtgtggctccatggataagcactttggtggcacatttgagacacctgctggtaggtacaatggctatgtggggtctcccggtatggctgatgacttggatgacagttttggaggtggaaagaggaagggttctgggattagaatgtttggtgatttatggaaaaagaagagccaaaagtgatag

SEQ ID NO: 178 - DNA, 1619 bp, Glycine max
cagcaatggcagctgttaggtcttcctctgtaagacggttggggagcacaattaagggttcttttagtatggaattagttcaccatagtatgtgtatgaatcttgcaaggtttccgagtgattcgtttaatgatccttattacaaaagagagttacagttttctaagaatcagtttagtaatttggcttctgaatcccttggaagtagtcatcactttggtactagagccaatgtattggttaaaccaacgttctctggttattgtttttggagttcccttccttttgcttccatgagcaaccacgttttgaatcgtcgaatgtattcatcgtcgtcggtgggtgacaaaggaagtagagatggtggtacagaagtttctgctggttctggtgcgagtgatatgaatactggtggtgattctgttgttgggggtgattgggctgagaggattaaagatgcttggaagagtgtggcagaggcagcatcatatgctggagataaggttaaagaaacttctgatgatctcactccatatgctcagcagttgcttgattcacacccgtatcttgacaaggtggttattccagttggtggtactttaactgctaccataatagcttggttcttgctgcctaggattttgaggaaatttcacaaatatgcaatgcaaggtcctgtttctctattgccagcaagcgtggctggggagccagttccttatgagaaaagcttttggggtgctatggaggatccagtgcgatatttagttaccttcattgcattctcacaaattggtgttatggtggctccaacaactataacctcacaatatcttgctcccgtttggaggggtgcagtgattgtttcatttgtatggtttttgcatagatggaaaacaaatgtttttgcacggtcattgtctagtcaaagtttacttgggcttgatagggagaaagtgtttgctctagacaaaatctcatctattggtctatttgtgattgggataatggctttggctgaggcttgtggtgtggccgtgcaatctattgtgactgttggtggtataggaggtgtggctactgcttttgctaccaaggacattcttggcaatgtgttcagtggtttatctatgcagttttcaaagcccttttcaattggagatacaataaaagctggctcgatagagggtcaagttgtggaaatgggtcttactagcacgtcattgctgagttcagagaagttcccagtcattgtgccaaactcatttttttctagccaggttattgtgaacaagtcccgtgctgaatatcgcgccattattactaaaattccactgcaaactgaggatttaagtaagattccccagatatcagatgatgtaaaaagcatgctcagatcaaatgcaaatgttttcttagggaaagatgttccctactgtttcttatcccgtatagaaagttcatatgcagaattgactcttggatacaacctcaaacatatgcgcaaagatgaattatactctgcagaacaagatattctcttgcaggcagttcaaatcattaagaatcatggggttgctcttggcagcacatggcaagacacgtcttctaaatgatag

SEQ ID NO: 179 - DNA, 1787 bp, Glycine max
gggatatggatgtttggagtcttcaaaagttggtgaagacagcaccatctaaagcattggtcatcagaatcaacttggtctgtcttgccatctttctggtcgtctatgcaacctttcttctccgtccatcttcatccgtctatttcgagaatgcagcctcccttgtccggtgctccttgcgtgagtgccatcacaagggagaaaaaagcataaagatgaaagcagtgttggagaggaatgaagataggagggcaaagcagaacgcgagtaagatagaagtgcctagtttctttggcgaaatggggaaaggaatgaagataggaatggtgaacatgcaagaagatgatgtgagtgaatggagcacccttggagaaacaagccacgtttatttcgagaaagtgtcacagtttttcaattggacagatttatttcccgaatggatagatgaagaggaagagaccgatgttccatcgtgccccgagataccaatgccggaattcacagcatatgaaggcatggacgtgatcgtggccaagttgccttgcaattacccaaaggaagggtggggaagaaacgttttcaggttacaagttcatcttattgtggcaaatttggcagtgaagaaggggaagagggattggaattggaagacgaaagtggttttgtggagcaagtgtaggccaatgctggagctgtttcgatgcaacgatttggttaagcaggaaaatgagtggtggtattatgaggttgatgcaatgaggttggagcagaaagtttctttgcctgttgggtcctgcaatttggctctgcctctatgggaacaaggaatcgacaaggtgtacgacacgtggaacctggaacaaagcgttaaaagcgaagcgcgatcaaaacgtgaggcctatgcaacagtgctccactcctcagaaggctacgtgtgcggcgcaataacgctagcacaaaccctgctccaaaccggaaccaagcgtgacctaatcctcctcctggacacctccatctccgtcgcgaaacgccgctccctcgaactctccggctggaagatccgactcataacccggatccgaaatccgcgggccgagaatggcacctacaacgagtacaactacagcaagttccgactctggcagctcacggattatgagagagtgatcttcattgatgctgacatcatcgtcctccgcaaccttgatattctcttccacttcccacagatgtccgctactggtaacgaccagtccatcttcaactccggcatcatggtactcgagccctccaactgcacattccacgttctcatgtcgcgccgccacgatgtcatctcctacaacggtggcgaccagggtttcctgaatgagatcttcatgtggtggcacaggcttccgcgacgggtgaactacttaaagaacttttgggccaacacgacaatagaggcaggtaggaaaaatgcaatgttcggggcggagccgccgaagctctacgcgattcactatctagggctaaagccatggcattgttatagggactacgactgcaactgggatgtggaggatcagagagtgtacgcgagcgacgtggcacatcgacggtggtggaaggtgcacgatgctatggacgagaacttgcaaaagctgtgtaggttaacgaggcaacgaagaatggagttgaactgggaaaggagaaaggctgggaaattagggttgccagatatgcattggaagatcaatgtcacggatcccagaagagctggctcgatgttgattggctagtag

SEQ ID NO: 180 - DNA, 1835 bp, Glycine max
ccaccatggagctccgccgccgctcctccgccgcggccaaagcctccgacgccctccccctccctctccacgtcaccaacgccttcttcttcacccttttcttctccctcgcctactacctcctccagcggtggcgcgacaagatccgctcctcctcccctctccacctcctctccctctccgacatcgccgccatcttcgccctcctcgcctccgtcatctacctccttggcttcttcggcatccacttcgttcagtccttcgttgcacgtcccgccgacgaagaaccatcccaatgcgcctccattgacagagccgacgaggatatcgccaactccatcatagaaggagacgcacagccttctcccttgtgcagggtcgacaatgatatgaagggaaagaaagtcatacagcgtcctttcgaatgtaccaaaccaattcttaccgaactgatttcgtccattgacagagtggacagtgataatatcattgccgaccctgtcattaacggaaaagaagccgtgcaaccttctttccaatgtacgaaaccaattctcaccaaactgatttcgtccgacgatgatatcatcattgtcgactctgtcataaacgggaccgtcccatcgtattctctcgaatcgtgcctgggggattcccgccgggcggcagcgatccggcgggaggtggtgcagagagaaacggggcggtcgctggcgggtctacccctggaggattttgattacgatgcaattctggggcagtgctgcgagatgccggtggggtacgtgcagcttccggtgggggtggcggggccgctgctgctggacggggcggagtacacggtgccgatggcgacgacggaggggtgcctcgtggcgagtacaaacagagggtgcaaggcgatttacgcgtccggtggggcgagcagtgtggtgttcagagatgggatgagtagagcgccggttgtgagattcgcgaccgtgactagggctgcggagttgatgttctatttggaagatcctctcaattttgataccttggcggtcgttttcaacaggtcaagtagatttggcaggcttcaaagcattaagtgctctattgcagggaagaatgtttatattagatttacctgtagcacaggtgacgccatggggatgaacatggtttccaaaggggtccagaatgttcttgatttccttcaaagtgatttccctgatatggatgttattggcatctctggaaattactgttcagacaagaaacctgctgcagtaaattggattgagggacgtgggaagtcagtggtttgtgaagcaattatcaaagatgatgtggtgaagaaggtgctgaagaccagtgtggctgctttggtagagcttaacatgctcaaaaaccttgctggttctgctgttgctggtgctcttggtggattcaatgctcatgccagcaacattgtttctgccatttttatagccactggtcaagatccagctcagaatgtggagagttctcattgcataaccatgatggaagccgtgaatgatggcagagaccttcacatctcagtgaccatgccttccatagaggttggtacagtggggggtggaacacaactaccatctcaatctgcttgcttgaatctgctcggcgtaaagggtgcgagcaaggattcaccgggatcgaactcgagacttttggccaccattgttgctggatctgttctagcaggggagctgtcactgatgtctgctatagctgcagggcagctagtgaagagccacatgaaatataacagatcaagcaaagatatgtctaaagtgtcatcatcctgatag

SEQ ID NO: 181 - DNA, 1022 bp, Solanum lycopersicum
gaaaaatggaggagaatgtattgtgccaatggagtgttgttagatccatttttgctattcttcaatggtggggtttcaatgttgctgttattatcatgaacaaatggatctttcagaaattggtgtttaaatttcctttgacagtatcttgcgtgcacttcatatgctcagctattggtgcatacctggtaattaaagtgctgaaacttaaaccactcatcgtggtcgaacccacagatcagtggagaagaatttttccgatgtcatttgtgttttgtatcaacatagtcttggggaatgtaagtttgcgatatattcctgtctcttttatgcagaccgtaaagtcatttactcctgctacaacagtgattttgcagtggctagtttggaggaagagctttgaatggaggatctggacttccttgattcccattgttggaggaattcttcttacttctattactgagctcagtttcaacactttaggattttgcgctgctttgtttggttgccttgctacttctacaaaaactattctagcagagtcgttgttgcatgggtacaaatttgacagtataaacacagtatactacatggctccctatgcaactatgatactggctctgccgtctttactctttgaaggagctggggttgtagaatggttatacactttcccttcagtcgttccatccatgcttcttatttttctctccggagtgctagctttctgccttaacttctctatcttctatgttatccactccacgactgctgtcactttcaatgttgctggaaaccttaaggttgccgtggctgttacattttcatggatgatattccaaaatccgatctcagctatgaatgccctgggatgtggagtgacgcttgttgggtgtacattttatggttatgtgaggcacatcctatcacaacatgctcgagagtctcctcgtacgccagagaacaagatggaatctgttcctctaatacatgagaaagaacaagaccaaagataatag

SEQ ID NO: 182 - DNA, 2949 bp, Phaseolus vulgaris
ctgcattctccgttcaattctcgcaccgttcatgttcttcccctcgtgcgctcagatcttgaaaattggcgcctcaacgacgttcgcagcgccacgcgagtggccagatgccgcagggcaatgccgccgccgccgctgctctgttggacaacggcggcgatgctggagacgccgtcatggcgcggtggctccagtccgccggcttgcagcatctcgcctctcccctggcttctaccgccatcgatcatcgcctcctccccaaccttctcatgcagggttatggagcacagtctgccgaggagaagcagaggcttttgaagttaatgagaaacctcaattttaatggggaatctgcttcagagccatatacacccaccgcccaatctttaggtggagtggccgggtcggatgggtttttttctcctgagttcaggggggattttggagctgggcttttggatcttcatgcaatggatgataccgagcttttgtctgagcatgtagtttcagaaccgtttgagccatcacccttcatgcctggagatgctagagtatttgaagatgattttaatccaattaactgcaagctggaaagcggggaagcagatgctgatgcatcaatttctttaccaatgaatgaaaaagagtatagcacaagggaaaataatgttgctaaaattagagttgtggtacgcaaaagaccattaaacaagaaggaactagctaagaaggaggatgatattgtaaccgtatctgacaatgcatatctgacagtccatgaacccaaactaaaggttgatttgacagcttatgtggagaagcatgagttttgttttgatgctgtgcttgatgagcatgttaccaatgatgaagtatacagaactacagttgaaccaattattcctacaatttttgagcgaaccaaagctacctgttttgcttatggtcaaacaggaagtggcaaaacatacacaatgcaacctttaccactcagagctgcagaagaccttgtttggcagttgcatcagccagtttaccggaatcagagatttaaattgtggctcagctattttgagatatatggtggaaagctttatgatcttcttagtgacagaaagaaactttgcatgagagaagatggacgacagcaagtttgcattgtaggactgcaagaatttgaagtttgtgatgtggaaattgtcaaagaattcattgaaaggggaaatgctgcaagaagtacaggatccactggtgctaatgaggagtcttccaggtcacatgctatcttacagctggttgtaaagaaacacagtgaagtgaaagagagtaagcgaaacaatgatgggaatgaggcaagaagtgggaaggttgtggggaaaatttcttttattgatcttgctggaagtgaacgaggtgctgacactactgataatgatcgtcagacacggattgaaggagcggaaatcaacaagagtcttttggctctgaaggagtgcatccgtgccttagacaatgatcagatccatattccatttcgaggaagtaaacttacagaagtgcttcgtgactcctttgtgggtaattcaaagactgtaatgatctcttgtatatctccaggtgctggatcttgtgaacacacacttaataccttgagatatgcagatcgagttaaaagtctgtccaaaagtgggaatcctagaaaagaccaggtcccaaatcctgcaccacaaactaataaggaaatttcatccacatcatccattcctgctagtgctagtgcagaggattttaactatcaacgtcaagagaaaacaatggacataggcaggaaattcgttgaaagggagaattcttcgtacagctctgctgctaccgctgctgacaaacagccattaagtttttcttcaaattatctatcaaatgggcgagaggaaaagggcttgccttctgcttcattggaccgggagaggtttgaaccaaagaactcgtatggtgacactaccagtcaaaagatgaactcttactcacaaattgatacaggtgagaagttgcaaaaagtgtctccaccacgcagaaaagggtctaaggatgaaaaatctgaaaggcctgcaaactggatgaaaagggatgcaaatggttctgataccttcactacaaactccaagcagcagagcactgggaactataacactgtgtctaaggatgaaaagtctgataggccatcaaactggatgaaaagggattccagcagttctgatcttttcactacaagctccaaacagcagagcacggggaattatgcgcctaaggatgaaaaatctgaaaggccagcaaactggatgaaaagggatgccagcaactctgatatcttctctacaagcttaaagcagccgagcacagggaactataacaatgttacaactggatccaggccttatgaagcagaatcctctcctaacgggaatatcaatgcagtactcgaggaggaagaagcactaattgctgctcataggaaggaaattgaggatacaatggagattgttcgtgaagaaatgaaactcctggccgaagtggaccaaccgggaagcctaattgacaactatgtaacccaattgagttttgtgctttctcggaaagcagcgagtctggtgggtcttcaagctcgtcttgcaagattccaacatcggctaaaagagcaggagattctaagtagaaaaagagttccgcgtcagtaagagtcttcttcgatctctctctctctctctcttatttgtattctcgtgtttgttagcaatatagttgaaaggttttgtttgatataagcaaatcttttggtgaatatgttctaattaaaatttacttacatgtatatgccctttgtgtgagtttgggccacctcatgccattgcaaatttggtgtaatctatgtagcttatctgcgccattgtt

SEQ ID NO: 183 - DNA, 1670 bp, Phaseolus vulgaris
tgtggttatgagcagtaggaagagttgtttataatttgaaaacttgaacgcagccaacaaagtaggggattgattgttctttgtagttcttctgttttgtatggacatgaaggcatattcagtttcctggacaaaacataagaaagagccatattttgcagttcctcacacaagaagacaacaacagtgcatacaagcaaatcatgataccccagaagaaacaacttcactaaatcattccctgaaattggcgctttccacttcccaaaacactctactgcctacgctacctgcctttgttgttttgctactacttgttacttcaattggcacatcattttctcaccccattgcctccaattcacctttgccaccaccctctcaccccactgctaaccatactttcagaccagctccagtgtcgcaaaagttcaggacaatcagagctcacctcaagaagattaacaagccacctgttaaaacaattaagagtccagatggggatttgatagactgtgttttctctcatcaccagcctgcttttgaccatcctttgctcagagggcaaagaccattggatccaccagaaaggccaaagggccaccacaatggagaaacagtcacagagagctttcagctttggactgattctggtgaaatatgccctgaaggaactgttccgatcagaagaacaactgaacaagattttctacgagcaagctctatcagaagatttggaagaaaagtacggagggactcaactggcactggtcatgagcatgcagttgtttttgtaaacggagatcaatactatggagcaaaagcgaacataaatgtatggacacccagcgtaaccgatccatacgaattcagtttgtcacagatatgggttattgctggatcttttggcaatgatctgaataccatagaggctggatggcaggtaagtcctgagctatatggagacaactatcctaggttcttcacttattggacaacggatgcatatcaagcaactggatgctacaatttactatgttcaggatttgtccaaactaacaacaggatagcaataggggctgcaatctccccaagatccatctataataacagacaatttgatattggcttaatggtttggaaggacccaaagcatggacattggtggctggaatttgggtcggggctacttgttgggtactggccagcattcttgtttagccacttgagaaaccatgctagcatggtacaatttggaggagaaatagtgaattctcgttcaaggggctaccatactggcactcaaatgggtagtggccattttgcagaagaaggatttagaaaagcagcctactttagaaacttacaagttgttgattgggacaataacttgcttcctctttcaaatattcaccaactggctgaccattccaattgctatgacataagggtgggatcaaacaatgtctggggaacttacttttattatggaggtcctggaaggaatgtgagatgtccatgaagatcatacatatatccatatctatatagttcctattatacaggcttctctgttctaaatatataaatattcttttctttatcccacttttttttttcttttggggatttttggtttcattataagcttcacatggttcggctatatt

SEQ ID NO: 184 - DNA, 1463 bp, Glycine max
tgagaatggaagagagtggtgatgcgagggatcttcagaaaccgttcctccacacagggagttggtacaagatgggttccaggcagtccagcatcatgggatcctccactcaggttatccgcgacggcgccgtttccgtcctcttctgcgtcctcatcgtcgccttgggtcccattcaattcggcttcacgtgtgggtattcttctccaacccaaggggctatagttcgcgatctaaacctctctatttcggagttttctttctttggatctttgtctaatgtgggagcaatggtgggagctatagctagtggtcagatagctgaatacatcgggcgcaaagggtcattgatgattgctgcgatccccaatataatagggtggcttgctatttcttttgccaaagattcctcgtttttgtatatggggaggttgttggaaggttttggcgttgggattatctcttatgtggtgcctgtttatatagctgagattgcacctcaaaacttgagaggtggccttgggtcagtgaaccagctctctgttacaattggcattatgctggcttatctgttgggtctttttgtcaactggagagtccttgcaattctaggaattttgccttgtacagtattaatacctggattatttttcatacctgaatcccccagatggttggccaagatggggatgatagatgagtttgagacttctttgcaagtgttacgaggatttgacactgatatatctgttgaagtacatgaaattaagagatctgtggcttcaacgggaaaaagagctgcaatccgatttgcagatctcaagaggaaaagatattggttcccgttaatggttggtattggattacttgttcttcagcaattatctggtatcaatggaattttgttctattcaactaccatctttgcaaatgcaggaatttcatccagcgaagctgctacagttggacttggagccgttcaggtcatagcaactggaatttccacatggttggtggacaaaagtggccggaggctgcttctaataatatcctcatctgtaatgacagttagccttctcattgtttctatagcattttatctggagggggttgtatcagaggattcacatttattcagcattttgggaatagtttctattgttggactcgtggctatggtgattgggttctctctaggtctgggacccatcccttggcttataatgtctgagatacttccagtgaatataaagggccttgctggcagcatagcgacaatgggaaattggctgatttcgtgggggatcacgatgactgctaacttgcttttgaattggagcagtggagggacatttacaatctacacagtcgtagctgcctttactatagcttttatagcaatgtgggttcctgagaccaagggaagaacattggaagaaattcagttttccttcagatagtag

SEQ ID NO: 185 - DNA, 2387 bp, Medicago truncatula
atttcatgtctctccctacaaaacgttctagcggcgctacttcatcttcatcttctccttcaacctctatgaaaaaagctaaatcttcttcaaccttcgacgacgtcgttttcgactcttctatggacgacgatctcaaacctaccgaccttcctcgcggcggcgccgcctctaatatggctgctaatctcgctcgcaaaaaagctactcctcctcaacctgctaagaagcttctcatcaggctccacaaaggcaacccaacagtgcccagtaattttgaagacaagacatgggcaattttaaagtctgctatatgtgctatatttttgaagcaacccgactcctgcgacttggagaagctttatcaggccgtcaatgatctttgcattcataaaatgggtgggaatctttatcaacgaattgaaaaggagtgtgaagtacacatatctgcagcactgcagtctttggttggacaaagcccggatttgattgtatttctatctctagtcgagagatgttggcaggatctctgtgaccaaatgttgatgattcgtggtatagccttgtttctggataggacatatgtgaaacaatcaccaaatatacggtcaatatgggacatgggccttcaaattttccgaaaacatctttcactgtctcctgaagttcaacacaaaactgttactggtcttttacgaatgattgacagtgaaagattaggtgaagcagtggatagaactcttctcaaccatcttttaaagatgtttactgctctgggtatttatgcagaaagctttgagaagccattccttgaatgtacatctgaattttatgccgctgaaggtgtgaaatacatgcagcaatcagatgttccagattacttgaagcatgtggagacaagattgcaagaggaacatgaaagatgtttgatctacttggatgcaagtactaagaagccattaataacaacaacagaaaaacaacttcttgaacgtcatatacctgccattcttgataagggtttctctatgcttatggatggaaatcgtattgaagaccttcaaagaatgcacttgctcttttctagggtcaatgcccttgagtcattgaggcaggccattagttcatacatcaggagaactggacagggcattgttatggatgaggagaaagataaagacatggttcaatcccttcttgaatttaaggctgctcttgacacaacatgggaagaaagctttgcaaagaatgaagcattcagtaacaccattaaagacgcatttgagcatcttatcaatctccgtcagaaccgacctgcagagttgattgccaagtttttggatgataaacttcgtgcgggtaataagggtacttcagaagaggaattagagggcacgcttgataaagtcctggttttattcaggttcattcagggcaaggatgtgtttgaggcattttataagaaagatcttgctaaaagattactcttaggaaagagtgcttcaattgacgcggagaaatccatgatctccaagttgaagaccgagtgtggtagccagtttacaaacaagctggaaggaatgtttaaggacatcgaattatcaaaagaaattaacgaatccttcagacagtcatcccaggcgagaacaaaactcccatcaggcattgaaatgagcgttcatgtcttgacaacagggtactggccaacatatccacccatggatgtcagacttcctcatgaattgaatgtttaccaggatatttttaaagagttctatctgagcaaatacagtggaaggcgtctcatgtggcaaaattctttaggtcactgtgtcctaaaggcagattttcccaaagggaaaaaggagttggctgtctccctatttcagactgttgttttgatgcaattcaatgatgctgagaaactaagctttcaagatatcaaggattctactggtatcgaagacaaggaactgagaaggactctgcaatcacttgcatgtggaaaagttcgtgttctacaaaagatgccaaagggtagagatgtggaagattatgactcgtttgtttttaatgacacatttaccgcccctctctaccgtataaaggtgaatgcaattcagttgaaggagacagtagaggagaatacaaacaccacagaaagagttttccaagatcgtcaatatcaggtcgatgctgctattgtgaggataatgaagactaggaaagtgcttagtcacactcttcttattactgaactcttccaacagctcaaatttcctattaaaccagctgatttgaagaaaaggattgaaagcctgattgacagagaatatctggagagggacaagagcaatcctcaagtatacaattacttggcatagtag

SEQ ID NO: 186 - DNA, 1196 bp, Glycine max
gagagatgggttcgttcgtgaagctttcaaggagggccttggaaactgagatgcccgttatggttcagatgcaggaattgctccgaggagctaagaatgccgtgtctttggcccagggggtggtttattggcagcctcccaagcaagcattggaaaaagtgaaagaacttgtatctgagcctttaattagtcgttatggtaacgatgaaggtattcctgaactcagagcagcattagtcaaaaagttgcgtgatgaaaataatttgcacaaatcttcagtaatggttacatcaggtgccaatcaggcatttgtgaatctagttcttactctctgtgatccgggtgattccgtggttatgtttgctccttactacttcaatgcctacatgtccttccagatgactggcgttaccaatattctagttggtcctggtagctcagacacactccatcctgatgcagattggttggaaagaatattatcagaaactaaaccacctccaaagcttgttactgttgtaaatccaggcaatccatctggaacttacattccagagccccttctaaagaggatttcagatctctgcaagaatgctggctcttggcttgttgttgataatacatacgagtattttatgtatgatggcctgaaacactcttgtgttgagggaaatcatattgttaatgttttctcattctcaaaagcatttggaatgatgggatggcgggttggatatatagcatatccctctgaagtaaaagactttgctgaacaacttctcaaagttcaagacaacattcccatctgtgcttcaatattatcacagtatcttgccctgtattcattggaagtggggcctcaatgggttgtagatcaggtaaaaactcttgaaaagaacagagaaattgttttagaagccctctctcctcttggagagggttctgtgaaaggaggagaaggtgctatatacctgtgggcaaagctcccacacggaaacgctcacgatgattttgatgttgttcgctggctagctaacaagcatggggttgcagtaatcccaggaaaagcttgtggttgtcccggcaatcttagaatttcatttggaggcttgacggagaatgattgcagagctgccgcagaaagactgaagaaaggcttagaagaattggttagagacggactgcgggagtaatag

SEQ ID NO: 187 - DNA, 2376 bp, Glycine max
acaccataaccttctctcatccaaaacttccaatctctctctctctctctctttctctaatatctttcacaacttgccggaaaattctcgccggcggcggcgatggccgactatttctccggctccgtcgaattcggactcaacctctcgaagcgaatatactacggtaaaggatcggctccgtcgccggcgccggcgatgtcgcggtccctgtcgaagtcgccggagggatacctcccgacggcgccgatgtgctacgcggtgatatcggatccggagaaggtggagaatccggacattcggagctaccagccgtatgtgctcggtcagtgcgagcctccggcgctgataccgctggagcttcacggcgtcgccatggaagttgagtgttctttggacacggcgttcgtaacggtcaccggaaagtggcgcgtgcattgcgtgaccgcaagtagtacgtgtgactgccaggttgccatacctataggtgaagagggttcacttctaggtctagaggttgatggttctggaagatcttatcatactgaattgatctctctgaaagatgaaaaggataagaataaagtggccaaaactaaagacggatactttttgaaaagccatatatacaccgttaagattccacagtttaggggaggctccgtcttctcaattaagatcagatggtcacagaaaatattatttcatgatggccagttatctctctgtgtccctttcagctttccctcatacgtcaaccctgctggaagaaatatttctaagaaagagaagatatttttgaaagttaattccggtgctacaacggaagtgttatgcaaaaccaccagccatccttttaaggaactactgcgccaagctggcaaattaaatttatcatatgaagcagaagtgctaacatggtcaagtacagacttaagtttttcgtactctgtttcttcaaatgacatatttggagctgttctcttgcaatctccattcctgcgtgattttgacgaaagagagatattttgcttgtatctttacccgggaaacagcccggatagaaaggtttttaaaaaggatgtggtgtttgtagtagatataagcgcaagtatgaagggaactcctcttgataacacaaagaattccctactgacatcactctctcaactaaatgcacaagatacatttaacattatagctttcaatggggcggtctacttattttcatcatcaatggaaagagctacagaggaagcaattttaaatgctaccacgtgggttgacaccaattttattgctaatggtgacactaatatcgtgcttcccttaacacaggcaatgaagctacttgagaaatcaactgattcggttcctcttatttttctcgttaccgatggggctgttgaggatgagagagatatatgcaattttgtgaaaagctatgtctcaagtgggcaatcgtttcgaacacctcgcatatatacttttggcataggtttatattgtaatcactacttcctgcaaatgctagcacaaattgggaggggccactatgattctgctcatgatttagattcaattgactttagaatgcaaagactattcagttcagcttcatcagttatggtagctgatataacaatcaaaagtttagaaggtcttgattcacttgagttattcccaactcatatacaagacatatcatttgaaagtcccttgatcttatcaggaagatacagtggaacttttcctgaattagttaaagtcactggtactttggcagatatgactaacttcgtagtagaccttaaagtgaaaagagaaaaggatatgcagctcagtaatgtcctttcaaagagacatatagatcaggtcactgctcaagcctggttgttaaaaagtaaagagctggaggagaaggtcactaaaatgagcattcaaaataaagtcccgtcagagtatacctgcatgaacattgttcttgtacagagtgatgaagggaagaaggcacctgaacaatttctgttgcaaaaggcgtacaacaaacttagcttccagaagttggaactcaacaaccagaacttattccttggagggttgaatcttggatttggtgacttgaaagcaactgctgagaacttgccaccagctataaaagaagcaaaaccacctgaaggactactggggaaggctgcttccaattgttgtggtcgattggctgatacctgttgtggcatgtgtctgttgcagacttgcacttttgtgaatgaccagtgcaccatcgtttgcactcagatatgtgcagccctggcctgttttgagttaatcaaatgctgtgttgagctctgtgactgtgattgcttgcagtgatga

SEQ ID NO: 188 - DNA, 2307 bp, Glycine max
cactacactaaactgtcctctttggctagaagaactacatgttctctggttccttcatgctttacactgtggctggctcctgttgttctgtcactttttttcactctctgggggttcagtttaagttagctcaagataaagacatggattttcagaggtttctcatgtgacaaaaattgtcttgtgtttctctgaggagaagaagtagatcaagttaagagattgcagatatgcttatttggcttgttttgatgttttcttagttatgagggaaacgcactcttttcaaggggagagctgaacttgcggaaagagtggaacagaatttgccgagcgagagattttctttcctttgacttgacttccaagtacaataatacaaccaatttggttgtttgttacataggaaaacgaggggcttgtttggtttttctcccttccactgcatcattttcagtttttcactacttgtgatgctctcataccttgttctacctcattagttttgtgtgtgtgaaacccttggtagatacatggcagaaattaggctcacaagggttgagcaaggccaaaccaagattaagaatgttccaatagctgtcaccccagaagggttttggtgctgcccttcccctgtggtgtttcagaaaagcctcaaaactcagaatactctcaataaacacaaaccctcttcaccacccccaccaaaaaccagtgttcagaaaaagcctgtgcctgtgtctgtgtctgtgccagtgtgtgagagaagaactactacacctgccccttcaggattggtgctttctgatgaaaaacaatgtgcaactgctccagaaaggcctccaccacctaccgccacatctgtggctgctgcagagagggcacccaggcaaaaaattgaatctttgccaaagaaggttgctattgagtttggtgaacctggaacttgtgatatgaaagtggttttgttgggaaagcagggattttgtgtcaagttgagtgtgcacagggatgttttgacccagaagagtggtttcttttctgaaaaactctccgaacaatcgggtttgtcgtgtctccaaatcggtgactgcgaggatgtggagatatatgttgaaactgttggtcttatgtactgtaaagagatgaagcagcggctaatgaagcaaagtgtttcccgcattcttcgaatacttaaggttgccgaattccttggcttcagctcatgtatccaatcatgtttggagtacttggaggcagtcccttgggttggagaagaagaggaagaaaaggtggtctcaactgtactacaactccaagcagaaggaattagagtcaaccctgtgctgaaacgaatttcatctgacatttctaatgtcccaaaagacactctttcccacatcatcgaccttgttctcaagagcaacgaggaaagaggccgccgagagatgaaatccattgttctaaagctcctcagggagaacaacagccttccaagctatgcgcgatcaaccgacatatgcaatgacacgatctacagatcatgccgaagctgcttggattcattactgtctctattcaagcaggctgcagaaccagacaaaccgagtgaggaccgtgatcctatagcaaagtgcatagctctcgaagctgataacttatcatggttgcttgagattttagttgacaaacaagccgctgatgagtttgcattgatgtgggcaaaccaacaggaactggcgttgctacacacgaagctgccaaccatgttgcgctaccatgttagctgcctttctgggaggctgtatgttggcatcggaagaggggagctgttgccgtcgaaggacacacgccggttgttgttacagacatggctgcagcctctgatgaatgactacaactggctgcagcatggatgcaggtcgtttgataggaaacttgtggaggaaggaattgggaggactattctgaccttgcctcttgagtatcaacagagcattttgctttcgtggttggggagtttcttgaaaactggtgatagctgtcccaatcttcagagggcatttgaggtatggtggaggagaaccttcattaggccatatgtggagaaccaaggtaatgttgctgtatcagatagtagtttaatgttgccaaagcagcatgagtgaaaaaaagggtcaaatggggttcataaatgtttcattggtactggagttcaagtttttatattaacgagtttgaggaattgtaaagatatgtattgattgcagaatgtggattaacctccagcagctaacaagtagtcaa

SEQ ID NO: 189 - DNA, 1809 bp, Phaseolus vulgaris
ctagctttgcttcccattactcatcgcactcttttgtttttctgacatcaaacttcaaaacggttccaatggatcgttttccttccagtaccattatccctgaatcgttcctaggggccaaagatgacctcaccacacagcttgcattggtttggaatcaaatcaaagcgccattgattgtcccgttgctgaggctagctgtgtttctgtgcttgatcatgtcggtgatgatgttcatagagagggtctacatgggcgttgtcataactctggtgaagttgttcgtgagaaagcccgagaaacgttacaaatgggagccaatgaaggacgacatagagttgggaaactcttcttaccctatggtcctcgttcaagtccccatgtacaacgaaagagaggtttatcagctctcaattggtgctgcgtgtgggctttcttggccttcagataggatcatcatacaggtccttgatgactccactgatccaacaatcaaggagttggtgcagcttgaatgtcaaagatgggcaagcaaaggggtgaacataaagtatgaggttagagacaacaggaatgggtacaaagcaggggctctcaaagaaggcatgaagcgtagctacgtgaaacaatgtgactgtgttgcaatctttgacgctgattttcaaccagagcccgatttcttgtggcgcaccgtcccattcttagtgcacaatcccgaactagctctcattcaagcacggtggaaatttgtgaatgccgatgaatgtttgatgaccagaatgcaagagatgtcactggattaccattttactgtggaacaagaagtggggtcttccacttacgccttctttggattcaatgggactgcgggagtatggagaatttcggcgttgaatgaggctggtggatggaaggataggaccacagtggaagatatggacttggctgtgcgagccagtctcaaaggatggaaattcttatacttgtccgacttgaaggttaaaaatgaattgccaagcactctcaaggcctaccgttaccagcagcaccgttggtcttgtggtccagccaatctttttagaaaaatggtcttggagatcataaacaacaagaaagtgtcattgtggaagaaaatacatgtgatatacagcttcttctttgttcggaaggtcgtagcacacatcaacacctttgtgttctactgcattgtattgcctgcaacagttttggtgcctgaggttgtggtcccaaagtggggagctgtctacatcccttctgtcatcacaattctaaatgcagttggaactccaaggtcactccatttgctggtcttctggattctctttgagaatgtcatgtctctgcaccgaacaaaggcaacgattattggcctactggaggctagtcgagtgaacgaatgggttgtgacagaaaaacttggtgatgctttgaaggctaaagcaggaggtaaagcacctaaaaagcctcgattcaagattggagacaggattcacttgttagaacttggtgtcgcattctacctcttcttttgtggctgctatgatgttatgttcgggaaaaaccactacttcatattcctctttatccaagctcttgccttcttcattatggcatttggatatgtcggcaccattgttccccagtcctagaaggacatggcatttcttcattcggctacttcagcttccatgccttcatatcaaagtgtattatactgttttcaacaaagttctggcgaattacaaacttgttagtgtaaaagaaagggtggtcattctttaaggtgtc

SEQ ID NO: 190 - DNA, 1004 bp, Glycine max
tccccatggcgttgaacaatggcgtccccgccaccggcaccggcctcatcgtcagcttcggtgagatgctcatcgacttcgtccccaccgtctctggcgtgtccctggccgaggcccctggcttcctcaaggcccccggcggcgcccccgctaacgtcgccatcgccgtgtcgcgcctcggcggcaaagccgccttcgtcggcaagctcggcgacgacgagttcggccacatgctcgccggaatcctcaaggaaaacggcgttcgcgccgacggcatcaactttgaccagggcgcacgcaccgccctggccttcgtgaccctacgcgccgacggggagcgtgagttcatgttctacagaaaccccagcgccgacatgctcctcaagcccgaagaactcaatctcgaactcatcagatctgcaaaagttttccattacggatcaatcagtttgatcgtggagccatgcagatcagcacacttgaaggcaatggaagtagccaaggaatctgggtgcttgctctcctatgaccccaaccttcgtctacctttgtggccttcggctgaggaagctcgtaagcaaatactgagcatttgggagaaggctgatttgatcaaggtcagtgatgcggagcttgagttcctcacaggaagtgacaagattgatgatgaatctgctttgtcattgtggcaccccaatttgaagttgctccttgtcactcttggggaacatggttccagatactacaccaagagtttcaaaggatcggtagatgctttccatgtcaatacagttgatacaactggtgccggtgattcctttgttggtgctttattggccaagattgtcgatgatcagtccatacttgaagatgaaccaaggttaagagaagtactaaagtttgcaaatgcatgtggagctattacaactacccaaaagggagcaattccggcccttcccaaagaggaggctgcactgaaactgatcaaaggggggtcatagtag

SEQ ID NO: 191 - DNA, 1843 bp, Phaseolus vulgaris
atcagagagcttcaagagctgcatgaagtagaagtttgcaaaaatgagagatgaaaattccaagaaaagcaagctctcatggtcaaagaaaatggtccgaaagttctttaatatcaaatgcaagactgaggattccctagcagacgttactgcttatggaggaggtgacgtggaatgcagaagtaggaatagcttctctgagagagagccatgcacaatcaaaaagagcaaaacagagaagtttagcagaagcacagatcaggtgaggcgagcaagaatgaatcttgaccaccctcgaattatagatgtgcagaattatagcatttttgtagctacgtggaatgtagccggaagatcccctccaagtactttgaatttagatgattggcttcattcttcatcgcccgctgatatttatgttcttggatttcaggagatagttcccttgaatgctggtaatatcttaggggcagaagacaatggccctgctaaaaaatggttggctctcatcagaaagactctaaacaatcttcctggcaccagtggaagcagtgggtgctatactccatctcccatacctcagccggttgtggagctgaatgcagattttgagggatcagctaggcagaagaactcatctttcttccataggcgatcattccagacaacttctagtggctggggaatggacaatgatccttcagttgtgcagccgcggctagatcgaagatacagcgtttgtgatcgtgtaatttttggtcacaggccaagtgactttgatcccagttttagatggggctacaggcccagtgactattccagggcaagtgactactcaagaccaagtgactactcaagatggggttcatctgatgatgataatggccttggggattcaccaagtacagtcttattttccccaatgtcccgtggtggaggaggaccttcctttaatgaagagggatatgccatgccaggtcactcaaggtactgccttgttgctagtaagcaaatggtgggaatatatctcacaatatgggtgagaagtgaactgaaagatcatgttcaaaatatgaaagtgtcttgtgttggcagaggattgatgggctatctgggaaacaagggatccatctcaattagtatgtctttgcatgaaacaagcttttgctttatctgtagccatttaacctcaggacagaaagagggtgatgaactaagaagaaattctgatgtgatggagattcttaaaaagacaaggtttcctcgtgttcaaggagtggacaatgataaatctccacaaacaatcctcgatcatgatcgaattatatggcttggagatttgaactaccggattgccctatcctaccgttcagctaaggcacttgttgagatgcaaaactggagagcattgttagagaatgatcaattgagaatagagcagaaaagaggtcgtgtgtttctggggtggaatgaagggaagatatattttcctccaacgtacaagtattcaactaattcagatagatatgctggagacgatatgcaccccaaagagaaaaggagaacccctgcttggtgtgaccgtattttgtggtatggagaaggtctacatcagttgtcgtatgttcgaggggaatcaaagttttcagatcacagacctgtctatggcatattttgggctgaggttgagtcagctcatggaagattgaagaaaactatgagttgttctcgttccagaattgaagtggaggaacttctgccatattccggtggatatactgaactaagttttttctaaaggagtttggtatatgagacgtgtccttccacattcagaagctag

SEQ ID NO: 192 - DNA, 1256 bp, Sorghum bicolor
ttcacatgccaacaaccccaagaagcagaagccaggctaggaccactaggccttggatcttgtcagggatggactttgctgattcgcgacggaagcctaatttcacggggaagattgccgtggcagctgcactcacggtgatgtgcataatcgtgttgaaacagtcccccagtttcagcggtaccagcgtgttctctcgccgtgaaactggggtgacccatgtgttagtaacagggggagctgggtatattggctcacatgctactcttcgtctccttagtgacaactaccgagttaccattgtggataacttatcaagagggaacatgggagctgttagagttcttcaacggctatttccagaacctggaaggcttcaatttatttatgctgatttgggcgatgccaaagctgtgaacaaaatattttcggagaatgcatttgatgctgttatgcactttgctgctgttgcttatgttggtgagagcacaatggagccactcaggtactaccacaacataacatcaaacacattgacagttcttgaggcaatggcagcacacaatgtaaatactctgatttactcgagtacatgtgcaacctacggtgaacctgatacgatgcctattgtagaaacaactcctcagaatcctatcaatccatatggtaaggcaaagaagatggcagaggacatcatcttagattttacaaaatcaaagaaacaatcaaacatggctgtcatgattttaagatacttcaatgtgattggatcagacccagagggacgtctaggagaagctccaaggccagagcttcgtgagcatggacggatatctggtgcttgctttgatgcagctctgggaatcattccagggctaaaggttcgtggaactgattaccccactgcagatggaacttgcattagggactacatcgatgtcacagatcttgtagatgcccatgtcaaagctcttggtaaagctgagccaggcaaagttggaatctacaatgtcggaacaggacaaggtagatcagtgaatgagtttgtgaaagcttgcatgaaggcaacaggagcttccatcaaggttgaatatcttgcccgtagacccggagattatgctgaggtatacagtgatccatcgaaaatctacaaggacctcaactggacagcccaatacactgatcttggccaaagccttgcccaggcatggaaatggcagaaagcgcacccaaacggatatggatcagcctgatag

SEQ ID NO: 193 - DNA, 2088 bp, Glycine max
tgaaagagaaggttaccaattaacccacactttaccaattattcactcactcactcactgttgcagcaacgccattgtgtgaaatcaatgttttgagatttgttgggaacaatggggagcgtttcgtccgaagatggttccgaccgttgtgggagttatagcctcagtgctgatgtcagcgagtccgagagctgcagcagcttctccgcacgccgcttcgacgccgagggagcttccagctccgccaacctctcgccgcggcccgtcgctgctcactttaacttcccgccggcacaggtaatgcttcccgtcattggcggcaaagacgtcgtcgtttgggatcacaagcgtgacctcgatttgtcggaagtggaaatgatgaaggagaggtttgctaagctgcttctgggagaggacatgtctggaggcggaaaaggggtgtgtactgcacttgcaatctccaatgcaataactaatctctctgcaaccgtttttggcgaactgtggaggttggagccactggcgccacagaagaaaaccatgtggcgtagagaaatggagtggctgttatgtgtgagtgattccattgtggagttagtgccatctgtgcagcagtttcctgggggtggaacctatgaggtgatggccacgcggcctcgctcggatttgtatatcaatcttccggctctgaagaagcttgatgggatgctgcttaatatgcttgatgggtttcatgacacgcagttttggtatgttgaccggggaattatattgggtgattccaaggattgtgatgcctatggtagaccttcggttaggcaagaggagaaatggtggcttccctctcccaagcttcccccaaatggcttgtccgaggaaagtaggaaaaggttgcagcagtgtagggattgcaccaatcagattctaaaagctgctgttgcaattaatacttctgttcttgctgaaatggaaattcccggtgcctacattgagtccttgcccaagaatggaaaggcttgtctaggggatataatctatcgatacataacggcagaccagttctcgcctgaatgtctccttgattgcctggatctttcaacagagcaccacactctggatatagctaatagaattgaggctgctatacatgtatggaggctgaaggaccataagaaacatctaagttcagcaaaatccagacggtcttggggtggaaaggtgaagggacttgttgctgatggtgagaagaacaagaacaactttcttgcccaacgggctgagacgcttctagaaagcttgaaacacagatttccagggctccctcagactgcactagatatggccaaaattcaatataataaggatgttggacagtctattcttgaaagttattcaagagtgatggagagcttggcctttaacataatggccaggatagatgatgtcctatatgtagatgatagcataaagcggtgtgcagctgcagattctctctcgttgttcagcaggggaggttttggaggcatgcccattcagaagcgattctctcctagtcccttctcaattcagcacaccccatatgcctccccatttgcaacgccaacattttgttcctccactcctgttactgggagcccttgcagtcctgcaaggatacatgatgtgaaaaggaatgctccaaaggagggtgcagattcgaagactgaaaagttggccacatctgagtttgagagggtttggtcatatgccggaaacctcagtgcaagaagagcatctggcgatgctccagaaagagactgagttctacagttagtatgacttgcatccataagatggtcatctcttgtctttttaatgtggatctggctaaagtccttggtcctgctccctgtatatgtgggtctaatttttgtatattcttaggcagaactagtaggattatgttgaatgatcatgctaatggatcattagttaaaaatgtttcctccccagtataaatttctagagataggccatgatattgttttttctactgatgccaaattttctaagttgagttctggactacataacccattcgagattcag

SEQ ID NO: 194 - DNA, 2591 bp, Phaseolus vulgaris
tcgaagaggttaaaatcttgatcatggttttggaattgaagatgagattgggcacagattaacactgcccacacatatcccgatgcagagataagcggcgtttggtaatgttccgcatgtgggtttcctccatcgtgatccatcatcaacggtttctcgctccactgctggccaaccagaggacgccacgtcatggaaacattacacggtggaatgaaaataaaacgtagggaggtggacccaccggaaaaggaccttgtcgggtgcttaacttaaccgcggtgtaacggaaagacactccctgcaaacggcgtctcttttcttgcttttgctcccatcaaatcatcaccaccaccactactactacacagtgaagtgaaagagaacgttacgagttaacccattctgtctcctcactgttttcttcacttttattttcgcctttgccgttttctcaccaccaatgcgcctgagatctgcctgagatttccggtaaccatggggagcgtttcgtccgaagacggttccgaccagcagagcgaccgctgcggcagctacagcctcagcgctgacgtcagtgagtccgagagctgcggtagcttctccgcccgccgcttcgacgccgagggagcttccagctccgccaacctctcgccgcgtcccgtcgcctctcacttcaacttcccgccgccgcaggtaatgcttcccgtcattggcgggaaagacgtcgtcgtttgggatcacaagcgcgacctcgatctgaccgaagtggaaatgatgaaggagcggttcgctaagctgcttctcggagaagacatgtctggtggtggaaagggggtttgcactgcgcttgccatctccaatgctataactaatctctctgcaactgtgtttggcgaactttggaggttggagccgctggcattacagaagaaggccatgtggcgtagggaaatggagtggctgctgtgcgtgagtgattccatcgtggagctggtgccatctgtgcagcagtttcctgggggtggaacctacgaggtgatggcgacgcgtcctcgctcggatttgtacatcaatcttccggctctgaagaagcttgatgggatgctgctaagtatgcttgatgggtttcacgacacacagttttggtatgttgagcggggaatcatattgggtgattccaaggattgtgatgcctacggtagaccatcggttaggcaggaggagaaatggtggcttccctctcccaagttacccccaaatggcttgtccgaggagaacaggaaaaggttgcagcaatgtagggattgcaccaatcagatactaaaagctgctgtcgcaattaatacttctgtgattgcggaaatggaaattcccggcgcgtatgtagagtccttacccaagaatggaaaggcttgtctgggggatataatttatcgatacattacggcagaccagttctcatctgaatgtctccttgattgtttggatctttcgtcagagcaccacactctggatatagctaatagaattgaagctgccatacatgtatggaggctgaaggaccacaagaaacatttaagttcggcaaaagccagacggtcttggggtggaaaggtgaagggacttgttgctgacagtgaaaagaacaagaatcattttcttgcccaacgggcagagacacttctagaaagcttgaaacaccgatttccagggctccctcagactgcactagatatggccaaaattcaatataataaggatgttggacagtctattcttgaaagttattcaagagtgatggagagcttggcgtttaacataatggccaggattgatgatgtcctttatgtagatgatagtataaagcgatgtgcggctgcagattcactgtcattgttcagcaggggaggttttggtggcatgcccatccagaagagattctctcctagtccattctcaattcaacacaccccatatgcctccccatttgcaacaccaacgttttgttcctcctctcctgttactgggagcccgtgtagtcctgcaagaatacatgatacgaagagaaatgctccaaaggagggtgcagattcaaaggcagacaagttggccaaatctgagtttgagagagtttggtcatatgctggaaacctcagtgcaagaagagcttctggtgatgctccagaaagagactaagttttacaattagtataacttgcatccataggtactcaccaatcatcttgtcttaatgtggatctggctaaagtccttggtcctgctccctgtacatgagggtctaatttttgtatattcttaggcagtatgagaaaagcttatgttgaaagatcatgccaatggattattagttaaaaatgtttcctcccaagtataaatttctagaggtagtaggcttctataatttccaaattctaagtagtgttcaggactaacccattccaaacagcagcaaaccaatgcctagtctcaaactatcatctttaagttgaaaacaaatatataaattagtagctaccaataagtactatatacaattattttgctttttcctgttgctcaatcctacc

SEQ ID NO: 195 - DNA, 3645 bp, Glycine max
tatagaaacaggttacactagtgtggtggtggactgaaaaaatcaacgggtagcattaccaattggatgaaaaagcaagcccctctgatttgcaaacgattttggtgacgcaaaagatttctgggtcgaggaggcgaggcgtgcttggttttcctgttctgtactaaacacattagcgcattgtagaaaaatggctatgcaatgcatgcgtaataaaaggctagctaacgtgatagaaatcgcaaatcacaatgtcactattgtctgcgccatgccatttttataacaaagggccccacatatccactgatccaatggttgttgaagatgagatattccccaaccagcgcatgccacgtcatgagctggaccctagggtcacggaaagacactctctgcaaacggcgtttcgtttcttgcttttgcccccatctcatctcagacaacgttaccaattaaccctcgctgtcccacactccgctgcttcttcactttttactgttgcagtaacggcattgtgtgatatcaatcaatgttgtgagatctgtgtgggaacaatggggagcgtttcgtccgaagatgcttcagaccacatgagcaaccgttgtgggagttatagtctcagtgctgatgtcagcgagtcggagagctgcagcagcttctccgcccgccgcttcgacgccgagggagcttccagttcagccaacctctcaccgcgccccgtcgctgctcactttaacttcccgccggcgcaggtcttgcttcccgtcattggcggcaaagacgtcttcgtttgggatcacaagcgtgatctcgatttgtctgaagtggaaatgatgaaggagaggttcgctaagctgcttctgggagaggatatgtctggtggtggaaaaggggtgtgtactgcacttgcaatctccaatgcaataaccaatctctctgcaactgtgtttggcgaactgtggaggttagagccgctggcgccacagaagaaagctatgtggcgtagagaaatggagtggctgttatgtgtgagtgattccattgtggagttagtgccatctgtgcagcagtttcctgggggtggaacctatgaggtgatggcgacgcggcctcgctcagatttgtatatcaatcttccggctctgaagaagcttgatgggatgctgcttagtatgcttgatgggtttcatgacacacagttttggtatgttgaccggggaattatattgggcgattccaaggattgtgatgcctatggtagaccttcggttaggcaagaggagaaatggtggcttccctctcccaagcttcccccaaatggcttgtccgaggaaagcaggaaaaggttgcagcagtgtagggattgcacaaatcagattctaaaagctgctgtggcaattaatacttctgttcttgctgaaatggaaattccgggtgcctacattgagtccttgcccaagaatggaaaggcttgtctaggggatataatctatcgatacttaacggcagaccagttctcgcctgaatgtctccttgattgcctggatctttcgtcagagcaccacactctggatatagctaatagaattgaggctgctatacatgtatggaggctgaaggaccataagaaacatctaagttcagcaaaatccagacggccttggggtggaaaggtgaagggacttgttgctgacagtgagaagaacaagaacaactttcttgcccaacgggcagagacacttctagaaagcttaaaacaccgatttccagggctccctcagactgcactagatatggccaaaattcaatataataaggatgtcggacagtctattcttgaaagttattcaagagtgatggagagcttggcctttaacataatggccaggattgatgatgtcctatatgtagacgatagtataaagcgatgcgcagctgcagattctctctcattgttcagcaggggaggttttggtggcatgcccatccagaagcgattctctcctagtcccttctcaattcaacacaccccatatgcctccccatttgcaacgccaacattctgttcctccactcctgttactgggagcccttgcagtcctgcaaggatacatgatgtgaaaaggaatgctccgaaggagggtgcagactcgaagacagataagttggccacatctgagtttgagagggtttggtcatacgcgggaaacctcagtgcaagaagagtgtctggcgatgctccagaaagagactgagttctacaatgagtatgacttgcatccatagatgctcatcaatcatcttgtctttttaatgtggatctagctgaagccattgttcctgctccctgtatatgagggtttaatttttgtatattcttaggcagtatgagtaggattatgttgaaagatcatgcgaatggatcattagttaaaaatgtttccccccaagtataaatttctagaggtaggccatgatattgtcttttctacaaatgccaaattttctgagttctggacgacataacccattcgagattcagcattgtaaatgtgttgattgaccctgctctcctcactgccataacattaaatgaagtttagtcatgccgaaacagaaatgcggacgaatcccaagtcttaaaatagctactaataagtaataaccaatgtgtatccagtaatatcaatagtgtgcatgtgaagaaaacaagttgacaagttgcttacatcagctgtgttcgtcatgtttattctttgtccaagtaatcagcttaacaagtatggtaatcctgcgtttgaccactacgaagcaagctacaatagtagaagactagagcatgaacaatgacatatagattgacatctcaagtgttgtaattaattaccacacttattttgtcttacaaaattccgtgattagtttcatgttggaaaccaaaatttaaagttagtcaaactcgatattatctttgactagagtctaaaatagacataagtgcatgtttggaacttggaacatacttattgttgcttctcacatacgtggatcgttcgggatgaatttaacatgcaaacaaacatgctcatcattgtgtatatttggattcccgtcaatgaattctgttcatataaaattcaagtcaaaataacaaaaaaagaagagtgaaaccaaataggcagatagttggacgttcttgtctactgattagcaacgagtaaagtgcagcatccaacatttatggtgctctttccttattctgatatggattgcaacttccttaattcctgcaatggatgttacatttggtggtaaaaataaaatgattgtttcttcttgtcgctcaatcttaccactttattattgaatttcagagatttcttgccgtgatgaaaatgtaacaacttctgttacttttgcagttgtctttgtttatttctgttgcccatttcatttaatttttaagagatttcttgcatatattttattttgaatttcttaaattaacttgaatggaaaatttgctacaaatctatttatttattttatttgtttacgcatatatcaaaatagtcagttataacataaagaaatctaaccataattatactcgaacattacagccttatattttaataatta

SEQ ID NO: 196 - DNA, 2070 bp, Cajanus cajan
catttcgctgaaatgtgcttgagatctgcctgagtaaccatggggagtgtttcgtccgaagacgcttccgaccgatgcggaagctacagcctcagtgctgacgtcagcgagtccgagagctgcagcagcttctccgctcgccgcttcgacgccgagggagcttccagctccgccaacctctcgcctcgccccctcgccgctcacttcaacttcccgccgccgcaggttatgcttcccgtcattggcggcaaagacgtcgtcgtttgggatcacaagcgtcatctcgacttgtccgaagtcgaaatgatgaaggagaggttcgctaagctgcttctcggagaagacatgtctggcggtggaaaaggtgtctgcaccgcgcttgcaatctccaatgcgataaccaatctctctgcaactgtgtttggggaaatgtggaggttggaaccactggcgccacagaagaaggcaatgtggcgaagggaaatggagtggctgctatgcgtgagtgattccattgtggagctggtgccgtctgtgcagcagtttcctgggggtggaacctatgaggtgatggcgacacgtcctcgctccgatttgtacatcaatcttccggcgctgaagaagcttgatgggatgctgctaagtatgcttgaagggtttcatgacacgcagttttggtatgttgaccgggggattatattgggtgattccaaggattgtgatgcctatggtagaccttcggttaggcaagaggagaaatggtggcttccctctcccaagcttccaccaaatggcttgtctgaggaaaataggaagaggttgcaacagtgtagggattgcaccaatcagatactaaaggctgccgttgcaattaatagctctgtgcttgctgaaatggaaattccccgcgcctacatagagtccttgcctaagaatggaaaggcttgtctaggggatataatttatcgatatataacggcagatcagttctcacctgaatgtctctttgattgcctggatctttcgtcagagcaccacactctggatatagctaatagaattgaggctgctatacatgtatggaggttgaaggaccaaaagaaacatgaaagttcagcaaaatcaagacggtcttggggtggaaaggtgaagggtcttgttgcggacggacacagtgaaaagaaccattttcttgcccaacgggcagagacactgctggaaaacttgaaacaccgatttcctgggctcccgcagactgcactagatatggccaaaattcaatataataaggatgttggacagtctattcttgaaagttattcaagagtgatggagagcctggcctttaacataatggcgaggattgatgatgtcctatatgtagatgatagtataaagcgatgtgcagctgcagattctctctcattgttcagtaggggaggttttggtggcatgcccatccagaagcgattctctcctagtcccttcccaattcaacacaccccatatgcgtccccatttgcaacaccatcgttctgttcctcctctcctgtaactgggagcccttgcagtccaggaaggatacatgatgtgaagaggaatgctcggaaggagggtgcagattcaaaagccgaaaagttagctacatctgagtttgagagggtgtggtcatgtgcgggaaacctcagtgcaacaagagcgtctggcgatgctccagaaagagactaaattcacccatgggtggtcactggtcattaatcatgttgtcttaatgtggatctggcttaaagcccttggtcccccccgcccgctgtatatgagggtctaatttttgtatattcttaggcagtatgagtaggattatgttgaaagatcatgctaatggatcattagttaaaatgtttcctcccaagtataaatttctagaggtaggccgtgatattatttttttaacaagtgccaaattctaagtagagttttttactacataacccattcgagattctgcattatacatgtgcagatgtgcccttgctctcctactaaatctagtcatggctaaacagcaat

SEQ ID NO: 197 - DNA, 2186 bp, Lotus japonicus
aaagaaaacgaatgttgagtggaagagaagagaacgttgtagcgagttaactaactcagtgagtgactcagtgctgcaatgtgtgtgagatctctgtgaattttgctgttgctactacaatggggagtgtttcgtctgaggaaggttctgaccgatgtgggagctacagcttgagcgctgacgtcagcgaatccgagagctgtagcagcttccgccgtttcgacgccgagggggcttccagctccgccaacctctctccgcctccgcttgccgcctctcacttcaacttcccgccgccgcaggtgatgttgccggtcatcggtggcaaggatgtcgtcgtttgggatcacaagcgtgaccttgacttgtcagaagtggagatgatgaaggagaggttcgctaagctgcttctaggggaagacatgtctggtgggggaaaaggggtctgcactgcgcttgctatctcgaatgcaatcaccaacctctctgcaactgtgtttggcgagctatggaggttggagccactggcaccgcagaagaaagccatgtggagaagggaaatggaatggcttttatgtgtaagtgactcaattgtggagcttgtgccgtcggtgcagcagtttcctgggggtggaacctatgaagtgatggctacgcgtcctcgttctgatttgtacatcaatctcccggctttgaagaagcttgatgggatgctgcttagcatgctggagggttttcatgatactcagttttggtatgttgatagggggattatattgggcgattccaaggattgtgatgagtatggtagaccttcggttcggcaagaggagaaatggtggcttccatctcctaagcttccaccaaacggcttgtgcgaggatgataggaagaagttgcagcagtgcagggattgcaccaaccagatactgaaggctgccatggcaatcaatagttctgttcttgctgaaatggagattcctggtgcctatgtagaatcgttgccaaagaatgggaaagcttgtctaggggatataatctatcggtacataagtgctgaccagttctcatcagaatgtctccttgattgcctggatctttcatcagagcaccacactctggacatagttaatagaattgaggctgctgtgaatgtatggagactgaaggaccataagaaacatctaagttctgtgaaagccagacggtcttggagtgggaaggttaagggccttgttgctgatggggaaaagcaccattttctttcccaaagggcagagacacttctacaaagcttgaaacaccgatttccaggactccctcaaacagcactagatatggccaagatacaatacaataaggatgtagggcaggctattcttgaaagttattcaagggtgatggagagcttggccttcaacataatggccaggattgatgatgtcctttatgcagatgatactgtaaaacgatgtgcagctgcagattctatccctctgttcagcaggggcggttttgggggtcttcccatgcagaagcgaatgtctcctagccccttctcaattcaacacagcccatatgcctctccatttgcaaccccatcattctgctcctcctctcctgtttccgggagcccttgcagtccgcggaggacacgtgctgtgaagaagaatgctcaggcaacggaatcaaagaccgaaaagttggcagctgctgattttgagagggtatggtcatatacgggaaacctgagtgcaagaagagcaactggtgatgctccagaaagggactgaattatgcatcctgagctagtcatcaatcatctttagatgtcttctaaatgcggatcaggctaaagcctctggtcctgttccctgtatatgcgggtctaatttttgtatattcgtaggtagcacgagtaggattatgttgaaagattattagcatgtttggatcagttttttttccttcagaatcaattttggaatccagaagctactcacataagcttctctccaaaagagattttggctttagaatcaattgtagaataattccaaacatgcattatgccaatggatcatcagttaaaaacgtttcctcactagtataaaagtccacttttctataggtcagtcctgttgctaagatggtctgctataaatgctaaaatagagttctagact

SEQ ID NO: 198 - DNA, 2328 bp, Lupinus angustifolius
tcatcatcactcccacaacactctctactcagatatagaaagagagtgagagaatgcgttgaattgagaagtacactaacataacccttcttccttatctctctcccggtagtaacactgctttgtcttcttcactttccattttattattcctttcttttaccaccattaccggtactcggttcaaatgtgtgagatctgagtaatgggaagtgtttcatctgaagatggttctgatcaacaaagcgaacgttgcggaagctacagcgtcagtgctgacatcagcgaatccgagagttccaccagtttctgcggtggtcgccgtttcgagactgaaggtgcctccacctccgccaatctcacacctcttcctctcctcgctcatttcaacttcccggcggcgcaggttatgatacctgtaataggtggtaaagatgtggtgatatgggatcacaaccgtgaaaaacgtgacgtagatttgtcagaagtggaaatgatgaaggagaggttcgcgaagctgcttttaggggaagacatgtccggtggaggcaaaggagtctgcactgcgcttgcaatctcaaatgcaataaccaatctctctgcaaccgtgtttggtgagctatggaggttagagcccctggcaccacagaagaaggctatgtggcgtagagaaatggaatggctcttatgcgtaagtgattctattgtggagcttgtgccatctgtgcagcagtttcctggtggtggaacatatgaaatcatggccatgcgtcctcgctctgatttgtacatcaatctaccggctttgaagaagcttgatggaatgctgcttggtatgcttgatggatttgaagatacacagttttggtatgttgacaagggaattatattgggtgacaaggattgtgatgactacagtggtagaccttcagttaggcaagaggagaaatggtggcttccctcgcctaagctaccaccaaatggcttgtttgaagatgatagaaagaggttgcagcaatgcagggattgcaccaaccagatattgaaggctgccatggcaattaatagttctgttcttgctgaaatggaaattcctcgcgcctacattggatccttgcccaagaatggaaaagcttgtctaggggatataatctatcgatacataactgctgaccagttctcgcctgaatgtctccttgattgcctggatctctcgtcagagcaccacactctggatatagctaatagaatcgaggctgcggtgcatgtatggaggctgaaggacagcaagaaacattcaaattcagtgaaagccagacgctcttggagtggaaaggtgaagggcctggttgctgatagtgaaaggagccattttctttctcaacgagcagatacccttctacaaagcttgaaacaccgatttccagggctccctcaaactgcactagatatggccaagatacaatataataaggatgtaggacagtctattctggaaagttattcaagggtgatggagagcttggcctttaacataatagccaggattgatgatgtcctttatgtagatgacaccataaagcgatgtgccgctgcagattctatccctctcttcagcaaaggaggttttggaggtatgcccattcagaagcgaatttcacccagttcattctcaattcaacacaccccatacgcctctccgtttgcaaccccatctttctgttcctcctctcctgttaccgggagcccttgcagtcctcaaagaacaccttctgtgaaacggaatggtcgaaaggaggcaacatattctaagtctgaaaagttggcctcaactgattttgagaggacatggtccttcacaggaaacctcagtgcaagaagagtttccggtgatgcgccagaaagagactaaattccgtagttaatatgactttacatttatagcggatcatccatcatcttgttttcccactccttgtatatgaggttctaatttttgtatattcctaggcagtatgagtagaattatgttgaaagattatgccaatgaatcatcggatttaaaaggtctctgcccaagtataaatttgttgaggccactcccaagatgcttctataaatgccatatgctaaatagggttaacaattcaatattcaagattcagcattagtcttctaccatgatcatctgtcacaaatggtgttccactccatgccccaaatcaatcagagtgtttcattttattactttttgtttttaaattctttattttattcacgtgttaatatatgattgacttggtatagaaaatgagacactgtttgaga

SEQ ID NO: 199 - DNA, 1881 bp, Trifolium pratense
atcaattattattattattcataataactatagacactgcattaaaatgtgtgttaccaaattaagatctgtgtgaaatttgcgttttgggaaagaaaaagaaacaatggcaagtgtttcgtcggaagaagaagtttctgagcgttgtggaagttatagtccgagtgctgacatcagcgaatcggagagttgtagtagtttttgtggtcgtcgtttcgatgccgaaggagcttcaagttccgctaatctctcgccacgtcagctcgccgctcattttaacctacccacggcggcgcaggttatgcttccggttatcggtggtaaagatgttgctgtttgggatcacaaacgtgatctggatttatccgaagttgaaatgatgaaggaacgtttcgctaagctgcttttaggagaagacatgtctggtggtggaaagggggtttgcactgcgcttgctatctctaacgctatcacgaatctctccgcaactgtgtttggagagttatggaggttagagccactagcaccacagaaaaaagcaatgtggcgaagagaaatggactggctactatgtgtgagtgattcgattgtcgagttggtgccttctgtgcagcagtttccaggtggtggaacctatgaagtgatggcaacacggcctcgttctgatttgtacgtcaaccttcctgctttgaagaagcttgatggaatgctgctaagtatgctggatggattttgtgatacacagttttggtatgttgatagaggaattgtgttgggtgattctaaggattgtgatgagtatgatagaccttctgtcaggcaagaagagaaatggtggcttccttctcccaagcttccgccaaatgggttgtgtgaggatgataggaaaaggttgcagcagtgtagggattgcactaaccagatattaaaggctgccatggcaattaatagttctgttcttgctgaaatggaaattcctgctgcctatgtagaatccttgcccaggaatggtaaagcttgtttaggggatataatatatcggtacataactgctgcccagttctcgtctgaatgtctcctagattgcctggatctatcatctgagcaccacacacaggatatagctaatagaattgaggctgctatacatgtatggaaattgaaagacgataagaaagttaaaaattcggtgaaagcccgaaggtcttggggtggaaaagtaaaaagccttgttgctgacggtgataagaaccattttcttgcccaacgtgcagagacactactgcaaaacttgaaacatcgatttcctgggctccctcaaacagcactagatatggccaagatacaatataataaggatgtagggcagtctattcttgaaagttattccagggtgatggagagcttggcttttaacataatggccaggatcgatgatgtcctttatgtagacgatagtattaaacgatgtgcagctgcagattctatcttgttcggtaggggaggctttggtggtcggcctattcaaaagcgaatgtctcccagccccttctcaattcaacacaccccatatgcttctccttttggaaccccatcttcctctcctgctagcgggagctcttgcagtccacgtagaacacatgctgtcaagaggaataccaagggaaaagattcaaagaccggaaagttttccccagctgattttgagaaggtatggtcatacacgggaaacctcaatgtaagaagagtttctggcgaggccccagaaagaaactgagttctagttagaatgatcttattaacttagatccatagtggatcattagtcattttgattgtcttctaaaagcacaagcctttggtacaattctctgtatatga

SEQ ID NO: 200 - DNA, 2281 bp, Citrus sinensis
ctaaaaaaaaaaaaaggaaaaaaaaaggaaaataaaaacaaacggatcactcactacataaacaaagagaagaaaaacaaaaaagcgaacaatgtcaatgaagtgaactaatcaatcagcacacttcatttgctttagtttgtactctgctttcttctttatccttctcatctggaaatgctcagcattagccgcgactgagatcttttgatcttttgatattttgtcagccgtccgatctttgccaaggcaaaatggggagcgtgtcgtcggacgacgacgtttctgatcagcagagcgagaggtgtggaagctactctttgagcgctgatgtcagtgagtctgagagttgtagtagtagtagtttctcgggtaggagattcgacgctgaaggcgcttcgagttcgatgacgtcatccccgcgaccggtcgccagaggattcggctttccggtgccggttatggtacctgttattggcgggaaagatgttgttgtttgggatgagaagccggaaaaatctgacactgacttgtccgaagttgagatgatgaaagaaagatttgccaagcttcttttaggagaagatatgtccggtggtggtaaaggagtttgtactgcacttgcaatctcaaacgcaatcacaaatctctcagcgactgtgtttggcgagctgtggagattagagccattagcaccccaaaagaaggcaatgtggcgtagagaaatgcagtggctattgtgtgttagtgattcgattgttgagcttgtaccgtccatacagcaatttccaggtgggggtacgtatgaagtaatggcaacaaggccacggtctgatttatacatgaatctacccgcgctcaagaagcttgatgctatgttgattggtatgcttgatggattttgtgagacggagttttggtatgttgatagagggattgttgtgggtgatggaggtgaccgtgatgcattttcatcaatggttccaagtggaagaccatctgttaggcatgaagagaagtggtggttgccatgtccgaaagtgccccaaaatgggttgtctgaggacgtaaggaaaaaattgcagcaatgtagggattgcacaaatcagatacttaaggcggccatggcaattaatagtagtgtgcttgcagagatggagataccagctgcatacttggaaaccttgcccaagaatggaaaagcttgtcttggtgatatcatctatcgctacataactgctgatcagttctcgcctgagtgtcttcttgattgcctcgacttgtcatcagagcatcacactttggaagtagctaacagaattgaggcagcagtgcatgtatggaagcagaaagatcagagaaaacatttaagtcactcgaaatctaggcgctcgtcatggggtggcaaagtcaagggccttgttgccgactctgaaaagaatcattctctggcccatcgagccgagactctattgcacagcctaaggcttcgatttcctggcctcccacagactgcattggatatgaacaagattcagtacaacaaggatgtagggcagtcaatacttgagagctactcaagggtgatggagagcttggccttcaatatcatggcaagaatagacgatgtgcttttcgttgatgatgcaaccaagaggtgtgctgcggctgaatcaatctcactattcagcagaggaggtttgagtggccttcctatacagaagcgcatgtctcccagccccttctcaatccagcacactccttatgcctctccatttgggactccaactttctgttcatcaactcctgtgggtggaagtccaggaagggtgccaactgctcagaagaggagcagtcttaaggaggcaccccccaggaagttggaaaagccatgtccagctgaatttgagagggtatggtcatatgctggaaaccttagttcgagaagagtttctggagatgctccagagcgagattgacgagaactgatgcagcattctcttacaacatcaaagaagttgcacagatgttcagtagggttatgatcatatgctggaaatacaatttgactaacgaatcatgtatattgtttagcagtaggaatatcatgttaagaatgttttggtcatggttttttgtctggtggtagttacggactgtagattatgcttatgttattatattatctaatgtcggtgaaaattttctctttaatctcttctaaacgtttgacaagacgcttttacatagttacaagcgtacgacaagttaattattcttg

SEQ ID NO: 201 - DNA, 2831 bp, Theobroma cacao
gagaaaccaaagtaaaagtttcagtacttatagagagagaaaggtgaagaaaagagaaaaacttatgagagaatgtgaaagggtttcttatctctttcactttagtctttatacctcttcttcttcttcttcttcttcttcttctatttctaaatttccaatcaatcatttcaccacacagccaccacagctagcgccaaatttcttctcattgtagcaaatgtgcggctgagatttgtttgttttttggtagccgttggatcttgtgatgggaagtgtatcttcagatgatggctctgatcagcagagcgtgcgatgcgggagttatagtttgagtgctgacgtcagcgagtccgagagttgcagtagcttttcgtgtcggcgtttcgacggagaaggttgttcgagttcgatgacgtcatctccgaggttactggctgctggagggttcggttttcaggtgccggtgatgttgccggtcatcggggggaaggatgtcgtgatttgggatgatgagaagcctgagaaacgggacaacaacttgtccgaagttgagctgatgaaggagagatttgccaagcttcttctaggagaagacatgtctggaggtgggaaaggagtgtgtactgcgcttgccatttcgaatgcaatcacaaatctctctgcgaccgtctttggtgagctgtggaggttagagcctttagcaccgcagaagaaggcaatgtggaggagagaaatggagtggctcttgtgcgtgagcgattcgattgttgaacttgtaccatcgatacagcaattccctggagggggcacgtatgaagtcatggcaacaaggccacgctcagatttgtatataaaccttcctgcccttaagaagctggacgcaatgttgattagcatgcttgatgggtttctcgagactgagttttggtatgttgatcgggggatagttgtgggtgatggtggtgactgtgatgcttatccatcatctgtttctggagggaggccctcaattaggcaggaagagaagtggtggttgccttgtccaaaagtgccaccgaatggtttgtcagaggatgcaaggaagaagttgcagcaatgtagggattgcacaaaccaaatactgaaggcagccatggcaattaatagcagtgtgcttgcagagatggagatacctactgcttacttggagaccttaccaaagaatggaaaagcttgtctaggagatatcatctatcgctatgtaacagccgaccagttctcgccagaatgtctccttgattgccttgatctgtcaacagaacatcacaccctggaaatagctaacagaattgaggcagcagtacacgtttggaagcagaaagatcataggaaacacatgactcatggaaaagttaggcgctcatcgtggggtggaaaggtcaagggccttgtagctgacaatgaaaagaataattttctggcccaaagagctgagactctcttacatagcttgaggcttcgttttcctggtcttccacagacagcattagatatgaacaaaattcaatataataaggatgtagggcaatcaattcttgaaagctactcgagggtgatggagagcttggccttcaacattatggcaagaatagatgatgtcctctatgttgatgatgctatcaagcgctgtgctgcggcagaaacaatttcccttttcagccggagcagtttgagtggtcttccaatccagaagcgaatgtctccgagtcccttctcaattcagcacagcccttatgcctctccttttgcaacgccaaccttctgttcttcaactccactcactgggagcccaggaagggcagcttcctctttgaagagaaatggtcttaaggaggaacctgactggaagttggaaaaagcatatggggctgaattcgagagggtgtggtcatatacggggagccttagcgcaagaagaatttctgaaaatgctcctgagagagattgatatgaagagattcatgaccctttgtgagataaagtttctgtgttctatgaatagtagaaaagaagttgcacagtttcgttgggtggctgacaggttaagagaaaattggtgatctaatcttttgtatatttcttagcagtagaaatatcaaagttttgatttttttaatatttttttttcaacttcaaatcgtgttagtcaaagggagaagattatgctttaatcgaattcctattaatgctgttcattaaatgtagtttgattagtgcacttgagcagcagctgtcattcaaatgacccaagttactcagagcaaaacagtaggtggccggaaaaaggaattcatttctaaccagagaacaaagaaaacagcagaaagagtttgctgatgacttatgacaatgaactgaaagcaaactgaaaacttagcattgaaaaacaaaaaacttagatcaagtgttagcaacaacaaaatttgaagctgaactttgaacttggagagggaggcttgccgccggattcttgtcctccagaagttattgtttcaagagatttacctccaacttccctggtggaagatgctgaagaagtagagttgcttataacttctctcggagaaaccactgaaggataagcgtcgttttcaacttttggtaatgcagaagttacccactcaggaggtggtcagaacaagttacggtaggcagggcaattctctaatggactagcactaccattttctaagtcaaatacaagcatacccctctcttgagaatgaccatatcgtggagagatgcagagatcagtcgaatagaatataaggtttcctttaccccaagaa

SEQ ID NO: 202 - DNA, 2281 bp, Citrus clementina
aaaaaaaaaaaaaggaaaaaaaaaaaggaaaataaaaacaaacggatcactcactacataaacaaagagaagaaaaacaaaaaagcgaacaatgtcaatgaagtgaactaatcaatcagcacacttcatttgctttagtttgtactctgctttcttctttatccttctcatctggaaatgctcagcattagccgcgactgagatcttttgatcttttgatattttgtcagccgtccgatctttgccaaggcaaaatggggagcgtgtcgtcggacgacgacgtttctgatcagcagagcgagaggtgtggaagctactctttgagcgctgatgtcagtgagtctgagagttgtagtagtagtagtttctcgggtaggagattcgacgctgaaggcgcttcgagttcgatgacgtcatccccgcgaccggtcgccagaggattcggctttccggtgccggttatggtacctgttattggcgggaaagatgttgttgtttgggatgagaagccggaaaaatctgacactgacttgtccgaagttgagatgatgaaagaaagatttgccaagcttcttttaggagaagatatgtccggtggtggtaaaggagtttgtactgcacttgcaatctcaaacgcaatcacaaatctctcagcgactgtgtttggcgagctgtggagattagagccattagcaccccaaaagaaggcaatgtggcgtagagaaatgcagtggctattgtgtgttagtgattcgattgttgagcttgtaccgtccatacagcaatttccaggtgggggtacgtatgaagtaatggcaacaaggccacggtctgatttatacatgaatctacccgcgctcaagaagcttgatgctatgttgattggtatgcttgatggattttgtgagacggagttttggtatgttgatagagggattgttgtgggtgatggaggtgaccgtgatgcattttcatcaatggttccaagtggaagaccatctgttaggcatgaagagaagtggtggttgccatgtccgaaagtgccccaaaatgggttgtctgaggacgtaaggaaaaaattgcagcaatgtagggattgcacaaatcagatacttaaggcggccatggcaattaatagtagtgtgcttgcagagatggagataccagctgcatacttggaaaccttgcccaagaatggaaaagcttgtcttggtgatatcatctatcgctacataactgctgatcagttctcgcctgagtgtcttcttgattgcctcgacttgtcatcagagcatcacactttggaagtagctaacagaattgaggcagcagtgcatgtatggaagcagaaagatcagagaaaacatttaagtcactcgaaatctaggcactcgtcatggggtggcaaagtcaagggccttgttgccgactctgaaaagaatcattctctggcccatcgagccgagactctattgcacagcctaaggcttcgatttcctggcctcccacagactgcattggatatgaacaagattcagtacaacaaggatgtagggcagtcaatacttgagagctactcaagggtgatggagagcttggccttcaatatcatggcaagaatagacgatgtgcttttcgttgatgatgcaaccaagaggtgtgctgcggctgaatcaatctctctattcagcagaggaggtttgagtggccttcctatacagaagcgcatgtctcccagccccttctcaatccagcacactccttatgcctctccatttgggactccaactttctgttcatcaactcctgtgggtggaagtccaggaagggtgccaactgctcagaagaggagcagtcttaaggaggcaccccccaggaagttggaaaagccatgtccagctgaatttgagagggtatggtcatatgctggaaaccttagttcgagaagagtttctggagatgctccagagcgagattgacgagaactgatgcagcattctcttacaacatcaaagaagttgcacagatgttcagtagggttatgatcatatgctggaaatacaatttgactaacgaatcatgtatattgtttagcagtaggaatatcatgttaagaatgttttggtcatggttttttgtctggtggtagttacggactgtagattatgcttatgttattatattatctaatgtcggtgaaaattttctctttaatctcttctaaacgtttgacaagacgcttttacatagttacaagcgtacgacaagttaattattcttg

SEQ ID NO: 203 - DNA, 2290 bp, Triticum aestivum
gccggcctcactctctcatcgatccccccatttctctccccctcgccgttctcttctattcctccctcggcccagccagatcgaccaaccggcaagcgcttctcggagcgggagcagcagacggcgcgattgcccgttgtttagtcgacggccacctgcctccggtttgaatactccgcacggcggaccactctggtgccagcccaagagcagcgcagcgcagcgcagcgcagagccaggacgggcgtgtaaacacgcagacaggtgaggaggctcctggtttcgtggtttgacgggagaggttggcagagaagggtcaggagaaggaagagagggagatggccgggggtttcgccggcgtcgaggccggcggcgggagggcggagcaatacgaggggaggatcaccccctacttcatcctcgcctgcatcgtcggctccttcggcggctccctcttcggctacgacctcggggtgtccagtggcgtgacctccatggacgacttcttgatcaagttcttcccggacgtgtacaaccggaagcacgcgcacctgcacgagacggactactgcaagtacgacaaccaggtgctgacgctcttcacgtcgtcgctctacttcgccggcctggtgtccaccttcggggcctcctacgtgaccaagcgccacggccggcgcggcagcatcatggtgggcgccgtcagcttcttcctgggcggcgccgtgaacgccgcggccgtgaacgtggccatgctcatcgtcggccgcgtcctcctcggcgtcggcatcggcttcggcaaccaggccgtgccgctctacctgtccgagatcgcgcccttcaagatccgcggcgccgtgaaccagctcttccagctcaccacctgcctcggcatcctcgtcgccaacgtcatcaactacttcaccgaccggatccacccgtgggggtggcgcctctcgctgggcctcgccgtggtccccgccaccgccatcttcgtcggcgcgctgttcctgccggagacgcccaacagcctggtggagcgcgggcggctggaggaggcccggcgcgtgctggagaaggtgcgcgggacgcacaaggtggacgccgagttcgaggacctcaaggaggcgagcgaggcggcgcgggcggtgcgcggcacgttccggaacctgctggccgtgcggaaccggccgcagctcatcatcggcgcgctgggcatcccggcgttccagcagctgtccggcatgaactccatcctcttctactcgccggtcatcttccagagcctggggttcggctcctccgcggcgctctactcctccatcatcaccgggtcgatgctggtggtgggcgcgctggtgtccatgctggtggtggaccggctggggcggcgggtgctgttcatcgaggccggggcgcagatgatcgcgtccatggtggtggtggcgacgatcctggcgctcaagttcggacacggggaggagctgtccaagggcgtgagcacggtgctggtggtggccatctgcttgttcgtggtggcgtacgggtggtcgtgggggccgctggggtggctggtgccgagcgagctgttcccgctggagatgcggtcggcggggcagagcgtggtggtgtgcgtgaacctcttctggacggcggccgtggcgcagtgcttcctggcggccatgtgccacctccggtggggggtgttcatcctcttcgcggcgctcatcgtggtcatgtccatcttcgtcatcctgctgctgccggagacgaagcaggtgcccatcgaggagatatggctgctgttcgacaagcactggtactggaagcgggtggtcaccaaggaccccaagtaccagggccaccaccagcgccaggaaatggccgccgccgccgccggtgccgtcaagcccgtcggcacctcggaatagatcgatccatgatgcgtgttttaataagatttactacaatgcattggtgggtgcataggtcgtgctatataggaactgcttgtgtgtgttaacttgtccaagacctcgtgttcttacgccttagtaatcttattacgaattcgattgggattcggtctgtcggaaggtgtgactggtggtggaggtcagatgcaaaagcatgcaagtttatgtgtgacattacgttgtgctctcgtctcgctatgatgcactgagaatgtgtgtgttgtctcgttctgaatgtcatggtaacgtaatgatcataccttcatcttgagatatagtatgtactactgtattagtatatcttatctgaacacgac

SEQ ID NO: 204 - DNA, 2002 bp, Secale cereale
ccaacgaagcagggcgagcgcagagccaagacgagcgtggtaaacgaaggcggacaaggtgaggagactcctggtttcgtggtttgaagggagaggttggaagaggagaaggaagagagggagatggccgggggtttcgccggcgtcgaggccggcggcgggagggcggagcagtacgaggggaggatcacgccctacttcatcctcgcctgcatcgtcggctccttcggcggctccctcttcggctacgacctcggggtctccagtggtgtgacctccatggacgacttcttgatcaagttcttcccggacgtgtacgaccggaagcacgcgcacctgcacgagacggactactgcaagtacgacaaccaggtgctgacgctcttcacctcctcgctctacttcgccggcctggtctccaccttcggggcctcctacgtgaccaagcaccacggccggcgcggcagcatcatggtgggcgccgtcagcttcttcctcggcggcgccgtcaacgccgccgccgtcaacgtggccatgctcatcgtcggccgcgtcctcctcggcgtcggcatcggcttcggcaaccaggccgtgccgctctacctgtccgagatcgcgcccttcaagatccggggcgccgtgaaccagctcttccagctcaccacctgcctcggcatcctcgtcgccaacgtcatcaactacttcaccgaccgtatccacccgtgggggtggcgcctctcgctcggcctcgccgtggtccccgccacggccatcttcgtcggcgcgctgttcctgccggagacgcccaacagcctggtggagcgcgggcggctggaggaggcgcggcgcgtgctggagaaggtgcgcgggacgcacaaggtggacgccgagttcgaggacctcaaggaggcgagcgaggcggcgcgggcggtgcgcggcacgttccggaacctgctggccgtgcggaaccggccgcagctcatcatcggcgcgctgggcatcccggcgttccagcagctgtcgggcatgaactccatcctcttctactcgccggtcatcttccagagcctcggcttcggctcctccgcggcgctctactcctccatcatcaccgggtccatgctggtggtgggcgcgctcatctccatggtggtggtggaccggctggggcggcgggtgctgttcatcgaggccggagcccagatgatcgtgtccatggtggtggtggcgacgatcctggcgctcaagttcgggcacggggaggagctgtccaagggcgtgagcacggtgctggtggtggccatctgcgcgttcgtggtggcgtacgggtggtcgtgggggccgctggggtggctggtgccgagcgagctgttcccgctggagatgcggtcggcggggcagagcgtggtggtgtgcgtgaacctgttctggacggcggcggtggcgcagtgcttcctggcggccatgtgccacctccggtggggggtgttcatcctcttcgcggcgctcatcgtggtcatgtccatcttcgtcatcctgctgctgccggagacgaagcaggtgcccatcgaggagatatggctgctcttcgacaagcactggtactggaagcgggtggtcaccagggaccccaagtaccagggccaccaccaacggcaggaaatggccgccgccgccgccgccgtcaagcccgtcgtcacgtcggaatagatcggtccatgatgcgtgttttaataagatttacaatgcatgggtgggtgcacaggtcgtgctaggaactgcgtgtgtgtgagttcttgtccaagacttagtgttcttagtaatcttatatacgagttcaattaggattcggtccgtcggaaggtgtaattggtggcgaaggccagatgcaaaagcatgcaagtttatgtgtagaaaacaaaaaaaaaaaaaaaagaaaaaaaaaaaaagtaacgtggagggacgaagacgacaacgagggaggtagggagggggggggggg

SEQ ID NO: 205 - DNA, 2188 bp, Triticum aestivum
tgcccgttgtttagtcgacggccacctgcctccggtttgaatactccgcacggcggaccacgctggtgccagcccaagagcagcgcagcgcagggcagagccaggacgggcgtgtaaacacgcagacaggtgaggaggctcctggtttcgtggtttgaagggagaggttggacaggaggagaaggaagagagggagatggccgggggtttcgccggcgtcgaggccggcggcgggagggcggagcagtacgaggggaggatcacgccctacttcatcctcgcctgcatcgtcggctccttcggcggctccctcttcggctacgacctcggggtctccagtggcgtgacctccatggacgacttcttgatcaagttcttcccggacgtgtacaaccggaagcacgcgcacctgcacgagacggactactgcaagtacgacaaccaggtgctgacgctcttcacgtcgtcgctctacttcgccggcctggtgtccaccttcggggcctcctacgtgaccaagcgccacggccggcgcggcagcatcatggtgggcgccgtcagcttcttcctgggcggcgccgtgaacgccgcggccgtgaacgtggccatgctcatcgtcggccgcgtcctcctcggcgtcggcatcggcttcggcaaccaggccgtgccgctctacctgtcggagatcgcgcccttcaggatccgcggcgccgtgaaccagctcttccagctcaccacctgcctcggcatcctcgtcgccaacgtcatcaactacttcaccgaccggatccacccgtgggggtggcgcctctcgctgggcctcgccgtggtccccgccaccgccatcttcgtcggcgcgctgttcctgccggagacgcccaacagcctggtggagcgcgggcggctggaggaggcccggcgcgtgctggagaaggtgcgcgggacgcacaaggtggacgccgagttcgaggacctcaaggaggcgagcgaggcggcgcgggcggtgcgcggcacgttccggaacctgctggccgtgcggaaccggccgcagctcatcatcggcgcgctgggcatcccggcgttccagcagctgtcggggatgaactccatcctcttctactcgccggtcatcttccagagcctcgggttcggctcctcggcggcgctctactcgtccatcatcacggggtcgatgctggtggtgggcgcgctggtgtccatggtggtggtggaccggctggggcggcgggtgctcttcatggaggccggggcgcagatgatcgcgtccatggtggtggtggcgacgatcctggcgctcaagttcgggcacggggaggagctgtccaagggcgtgagcacggtgctggtggtggccatctgcttgttcgtggtggcgtacgggtggtcgtgggggccgctggggtggctggtgcccagcgagctgttcccgctggagatgcggtcggcggggcagagcgtggtggtgtgcgtcaacctcttctggacggcggcggtggcgcagtgcttcctggcggccatgtgccacctccggtggggggtgttcatcctcttcgcggcgctcatcgtggtcatgtccgtcttcgtcgtcctgctgctgccggagacgaagcaggtgcccatcgaggagatctggctgctcttcgacaagcactggtactggaagcgggtcgtcaccaaggaccccaagtaccagggccaccaccaccgccaggagatggccgccgccgccgccggtgccgtcaagcccgtcgttacgtcggaatagatcgatccatgatgcgtgtttcgataagatttacattacaatgcaggtgcataggtcgtgctataggaactgcatgtgtgtgttaacttgtccaagacctcgtgttcctaattacgtcttagtaatcttattacgaattcgattaggattcggtctgtcggaaggtgtaactggtggcggaggtcaggtgcaaaagcatgcaagtttacgtgtgacattacgttgtgctctcgtctcgctatgatgcactgagaatgtgtgtgttgtctcgttctgaatgtcatggtaacgtaatgatcataccttcatcttgagatatagtatgtactactgtattagtatatcttatctgaacacgactacagattttatctggtttgcagtcaaagcggcgcgattatc

SEQ ID NO: 206 - DNA, 2058 bp, Brachypodium distachyon
aacacaaggagtcctcccacccactgcgccagaattcaacggccacagccacactaagcttaatttcgcagtctctccgtcctttcagggaagatcgagggccctgacaggtgaggtacgtgttcttggttggttggccagccgattggaagggagaggaggagaaggcagaagtgagataaagaaaagagagatggctgggggattcggcggcggcgaggccgtggcggggagggcagagcagtacgaggggaagatcaccgggtacttcatcctggcctgcatcgtcggctccttcggcggttccctcttcggctacgacctcggcgtctccagcggcgtgacctccatggacgacttcctgctcaagttcttcccggacgtgtacgcgcggaagcacgcgcacctgcgtgagacggactactgcaagtacgacaaccaggttctcaccctcttcacctcctcgctctacttcgcgggtctcgtctccaccttcggggcctcctacgtcaccaagcgccacgggcggcgggccagcatcatggtgggcgccgtgagcttcttcctgggcggcgccgtgaacgcggcggcccagaacgtggccatgctcatcgtgggccgtgtcctcctgggcgccggcatcgggttcggcaaccaggccgtgccgctctacctgtcggagatcgcgccctacaagatccgtggcgccgtcaaccagctgttccagctcaccacctgcctgggcatcctcgtcgccgacgtcatcaactacttcacggaccggatccacccgtggggatggcgcctctcgctgggcctcgccatgggcccggccacggccatcttcgtcggcgcgctcttcctcccggagacccccaacagcctggtggagcgagggaagctggaggaggcccgaagggtgctggagaaggtgaggggcacccacaaggtggacgccgagttcgaggacctcaaggaagccagcgaggcggcgcgagcagtcaaaggaaccttccggaaccttctggcggtgcggaaccggccgcagctcatcatcggggcgctggggatcccggcgttccagcagctgtccgggatgaactccatcctcttctactcccccgtcatcttccagagcctgggcttcggctcctcggcggcgctctactcctccatcatcacggggtcgatgctcgtcgccggcgcgttgatctccatggtggtcgtggacaggctgggtcgccggttcctcttcatcgaggcggggatccagatgatcgcgtccatggtggtggtggcggtgatcctggcgctcaagttcggccacggggaagagatctccaagggggtcggtacggtgctcgtggtggccatctgcatgttcgtggtggcttacgggtggtcttggggaccgctggggtggctggtgccgagcgagctgttcccgctggagatgcggtcggcggggcagagcgtggtggtgtgcgtcaacctcttctggacggcggccgtggcgcagtgcttcctggccgccatgtgccacctccggtggggcgtcttcgtcctcttcgccgcgctcatcgtcgtcatgtccgtgttcgtcatcctgctgctgccggagacgaagcaggtgcccatcgaggagatctggatgctcttcgacaagcactggtactggaagcgggtcgtcaccaaggaccccaagtaccaaggtcacacgcggcaccagcggcaggaaatggcagccgccagcgcctccactgtcaagcctgtttcttcggatgcttgatccatgcatgatgatgaagataaaatgtttcaataaaagatacttagatctcttgttcgtgacagtttgattaggatttgttggactccatctcgggaggtgtgatgcatggtagtggggcaatgaaatcttcgatgcaaaggttgtgtgcccggcccagatgttgccgctgcatgatgcagtatcgatatcagctacactaggcaagttacatgttactagctgaatctataaactttttacaaaatctgtgttgcagtcaatgatgg

SEQ ID NO: 207 - DNA, 2210 bp, Oryza sativa
gattactctctcctctgttctgctctgctgttcgtcgcccagcctagattagggatgatcagggattagattagtgacagaggcccgattaaacaagtgatcaaactcactgttaatttgtttaatcactgctgattgatgctgctgctgctgctgtgatttttttagggctaaagagtccaagacgagagatttggagttgttgcgaaatttcttggggaggagaggaggaagagtgtgactctgaatctctgtctctgaaactcagagagggagagagagagagagagagagagagagagagagagagagagagagagagaagatggcaggagggttcggcggcggcggcggcgaggcgatcgccgggagggcggagcagtacgaggggaagatcaccggatacttcatcctcgcctgcatcgtcggctccttcggcgggtcactcttcggctacgatcttggagtctccagtggtgtgacggccatggacgatttcttgatcaagttcttcccggaggtgtacgcgcggaagagcgcgcacctgcacgagacggactactgcaagtacgacaaccaggtgctgaccctcttcacctcctccctctacttcgccggcctcgtctccaccttcgccgcctcccacctcaccaggcgccgcggccgccgcgccaccatcatggtcggcgccgtcagcttcttcctcggcggcgccgtcaacgccgccgccgccaacgtcgccatgctcatcgccggccgcctcctcctcggcgtcggcatcggcttcggcaaccaggccgtccccctctacctctccgagatcgccccctacaacatccgcggcgccgtcaaccagctcttccagctcaccacctgcctcggcatcctcgtcgccgacgtcatcaactacttcaccgacaagatccacccgtgggggtggaggctgtcgctggggctcgccatgggccccgccaccgcgatcttcgtcggcgcgctgttcttgccggagacgcccaacagcctcgtcgagatggggcggctggaggaggcgaggcgggtgctggagaaggtgagggggacgaggaaggtggacgccgagttcgaggatttgagggaggcgagcgaggcggcgagggcggtgcgcggcacgttcaggagcctgctcgccgcgcgcaaccggccgcagctcatcattggggcgctcgggatcccggcgttccagcagctgtccgggatgaactccatactcttctactcgccggtcatcttccagagcctcggcttcggcaactccgccgcgctctactcctccatcatcacgggatccatgctcgtcgtcggcgcgctcgtctccatggtcgtcgtcgaccgcctcggccgcagattcctcttcatcgaggccggcatccagatgatctcctccatggtggtggtggcggtgatcctggcgctcaagttcgggcacggcgaggagctatcgaagggcgtgggcacggtgctggtggtggcgatctgcctgttcgtggtggcctacgggtggtcgtgggggccgctggggtggctggtgccgagcgagctgttcccgctggagatgaggtcggcggggcagagcgtggtggtgtgcgtcaacctgttctggacggcggcggtggcgcagtgcttcctcgccgccatgtgccacctccggtggggggtgttcatcctcttcgccgcgctcatcgtcgtcatgtccatcttcgtcatcctcctcctgccggagaccaagcaggtgcccatcgaggagatctggatgctcttcgacaagcactggtattggaagcgcatcgtcaggaaggaccccaagtatcagggccaccaccaccaccagatggccgccatgccaaccgccgccgccaagtccggctcgtcggaggtttagatgatgatgataatgaattgatgatggtttaataaggttttagtgggtggtgattaagacttgatcttgaattgttcatgtggcagtagcttttttgatcttcgattgatgcaaaagaagaggtcagagggttaatgcatgtgtgtgctcgtgtgtctatagttttagtttcatgttcttcagaattcgattcagtgtagtggtgggctgattaatggatcttgatgatgcacaaggaatgcagtgttctgaattcttgaaattattctcaatataacttgtagatttgtgt

SEQ ID NO: 208 - DNA, 2181 bp, Setaria italica
aactcccataaaaccctccccgtcccaacggcctcctgccacccccgcagcctcccactgccttcccctaccagatcagcggggcagagtggatcagactggctttcttggttcggagcagccggtggatcattgtttaatcgccggttacctggcccggtgttgaatactgctcgccgcacgcatttcggcgaggtccccgggaggagctggtccaactccaagaacggagggaagagagcctgtcggaagagaggcgaggaacttgcttctcgggtgaggagcagaggaggaagcggaggagcgggagagagtaaaagaccatggccggcgggttcggcggcggaggggcggccaccgggagggcggagttatacgagggcaagatcaccggctacttcatcctcgcctgcatcgtcggctccttcggcggatccctcttcggctacgacctcggagtctccagcggcgtgacatccatggacgacttcctgaagaagttcttcccggacgtgtaccaacggaagcaggcgcacctgcacgagacggactactgcaagtacgacaaccaggtgctgacgctcttcacctcctcgctctacttcgccggcctcgtctccaccttcggcgcctcctacgtgaccaagcgccacggccggcgcgccagcatcatggttggcgccaccagtttcttcctcggcggcgccatcaacgccgccgccatgaacatcgccatgctcatcgtcggccgcgtcctcctcggagtcggcatcgggttcggcaaccaggccgtcccgctctacctctccgagatcgccccctaccgcatccgcggcgccgtcaaccagctcttccagctcaccacctgcctcggcatcctcgtcgccgacgtcatcaactacttcaccgaccggctccacccgtggggttggcgcctgtcgctgggcctcgccatgggccccgccaccgccatcttcgtcggcgcgctgttcctgccggagacgcccaacagcctcgtcgagcgcggacacctcgaggaggcccgccgcgtgctggagaaggtgcgcgggacccacaaggtggacgcagagttcgaggacctcaaggaggccagcgaggcggcgcgcgccgtgaagggcacgttccggaacctgctcgccacgcgcaaccgcccgcagctcatcatcggcgcgctcggcatcccggcgttccagcagctgtccgggatgaactccatcctcttctactcgcccgtcatcttccagagcctgggcttcggcaactccgccgcgctgtactcctccatcatcactggctccatgctcgtcgtcggcgcgctcgtctccatggtcaccgtcgaccgcctcggccgacggttcctcttcatcgaggctggcgtccagatgatcgcctccatggtggttgtggcggtgatcctggcgctcaagttcgggcacggcgaggacctgaccaagggcgtgagcacagtgctggtggtggccatctgcctcttcgtcgtcgcctacggctggtcatggggcccactggggtggcttgtccccagcgagctgttcccactggagatgcgatcagcagggcagagcgtggtggtgtgcgtcaacctcttctggacggcggccgtggcgcagtgcttcctcgccgcgctctgccacctccggtggggcgtcttcgtgctcttcgcgtcgctcatcgtcgtcatgtccatcttcgtcatcctcctgctgccggagacgaagcaggtgcccatcgaggagatctggatgctcttcgacaggcactggtactggaagcgcatcgtccgcaaggatcccaaatacccgggaaatctccacgagcagcaggagatggcgagagcttaaacgtgatctgattttattagataggggaaaatggtcctggatgcagagatgtgttaggattggtgttgctgctgcgctttacgttgtgtctctgtccatggtttcatgttcttgaagttcagacttatggggcaaaaagtttgccccgatgtgtatttggtggcgggtagatgaacggttatgcgaaaatgtgctacgatattgttcattgtttgggcttagtgtccaattcccaatctgatgagtgtactgatggatttctcaatgctcatatacaactcttagtcaatttaactgggtg

SEQ ID NO: 209 - DNA, 2252 bp, Zea mays
atcccacgttcccaacgacctcccgccaccctcccggattcctctgcgacagggagctgccgttgctcgtccctcagccagattggatcggcgctggctggctggctggctggcttggcccggtgaggcggaaccaaccagccgctcgactcggtccctgattataaacataatcttgtcttcagttcatctagcctggtgttggattctgtactacgcacagcacgcattcctgggctcagctggtccaaggaacagcggagccttgccattcagggaagcgaggcagagtaccgaaggtgcagcgcgtcgtcgacggcctccctgcttctctgagacagcgagagatggccggcgggtttttggcggcggcggggcagccgccgggagggccgagctctacgagggcaagatcaccggctacttcatcctcgcttgcatcgtcggctccttcggcggatccctcttcggctatgacctcggagtctccagcggcgtgacttccatggacgacttcctggtgaagttcttcccggacgtgtaccggcggaagcaggcgcacctccacgagacggactactgcaagtacgacaaccaggtgctgacgctcttcacctcgtcgctctacttcgcgggcctcgtctccaccttcggcgcctcctacgtgaccaagcgccacggccggcgcgccagcatcatggtgggcgccgccagcttcttcctcggcggcgccatcaacgcggccgccatgaacatcgccatgctcatcgtcggccgcgtgctcctcggcgtcggcatcggcttcggcaaccaggccgtgccgctctacctctcggagatcgcgccctaccgcatccgcggcgccgtgaaccagctcttccagctcaccacctgcctcggcatcctcgtcgccgacgtcatcaactacttcaccgaccgcctgcacccctgggggtggcgcctctcgctgggcctcgccatgggccccgccaccgccatcttcgtcggcgcgctcttcctgcccgagacccccaacagcctcgtggagcgcgggcacctggaggaggcccgccgcgtgctggagaaggtgcgcggcacgcacaaggtggacgccgagttcgaggacctcaaggaggccagccaggccgcgcgcgccgtcacgggcacgttccggaacctgctcgccgtgcgcaaccgcccgcagctcatcatcggcgcgctcggcatcccggcgttccagcagctgtcgggcatgaactccatcctcttctactcgcccgtcatcttccggagccttgggttcggctcctccgccgcgctctactcctccatcatcaccggctccatgctcgtggttggcgcgctcctctccatggtcgccgtggaccgtctcggccgccgcttcctcttcatcgaggctggcatccagatgatctcatccatggtggtcatcgctgtgatccttgcgctcaagttcgggaaaggcgaggagctgagcaagggcgtgagcacggtgctggtggtggccatctgcctcttcgtggtggcctacggatggtcctgggggcccctgggatggctggtgccgagcgagctgttcccgttggagatgcggtcggcggggcagagcgtggtggtgtgcgtcaacctcttctggacggctgccgtagcgcagtgcttcctcgccgcgctgtgccacctccggtggggcgtcttcgtgctcttcgccgcgctcatcgtcgtcatgtccatcttcgtcatcctcctgctgccggagaccaagcaggtgcccatcgaggagatctggatgctcttcgacaggcactggtactggaagcgcatcgtccgccgggaccccaagtaccagcagggcaacctccatcaccagcagcaggagatgtcctccagagcatgaacatgacaaacagtaattttctatatactactcgaactaaaattctgaatattcaaaacaatcccattttctgtgggacgacggtccctatcataatcattaatcaatcatgccataatctctttccaaagatcagacgtcgacctttctgggtgaattggatataattgttcacatgttgtcacactcgacagtcatatcgtttggcttagtcagtactgattatccctattccctacagatacacgtgtccaaatgtatttaaccctaaataattgtttatctttaccttgtatagttccaaaaacatcgcaatcctgggtccttgcaatcgttt

SEQ ID NO: 210 - DNA, 1984 bp, Gossypium raimondii
agtatgaatttggattggaacgaacaaaataagattttcatttcatttctgagatcgtattgtgttgaaacaaattgcgaacaagctttaaaaaatatctgttgaaacaggaaatcactatcatcagctgattaaaactgtatcgaactttgaaagcagtatctagagattcggatatttgtttctctttctttcttcgcggttatggaagctgatgtatctatttcctcctaaggccctcatcacaatcaaatctctttcgttccacagagagctagggttttctttttcaatcgaatttcttttgggtttttaatttttcagttttcggatgaagatgaatcgagttgtggttttattattgttattatggtttctctgtttctcgagtgttttctggatgacgtctgccagtgtggttttgattggtaacaacgttaccctctctttcgatgatattgaagctaattttgctccggcaattaaagggtcaggggaatgcggagtattatatttggcaaatcctcttgatgcctgttcagacttgagtattaaagttgatgaactttcaaatggttcgtccccatttgcattggttattcgaggagggtgtagttttgaagagaaagtaaggagagtgcaaaaggcaggatttgaagccgctattgtctatgacaatgatgatgatggtgtcttggttgcaatggcagggaatgcagctggcattaagatacatgctgtctttgtttccaaagcttctggtgaaatactcaaaaagtttgctgggtctactgatatggaactgtggctaatccctagctttgaaaactcagcatggtcgatcatggcgatctcctttatttctctacttgccatgtcagcagtgctggcaacttgtttctttgtacgtagacatcgcattaggcgagaactcccacagtcttctcgagttcgtgaattccatggaatgagccggcgtttagtaaaagcaatgcctagcttgatattcactgctgtcttggaagataattgtacttcaataacctgtgcgatatgtcttgaagattatactgtgggtgagaagctcaggattcttccatgtcgccacaagtttcatgctttttgtgttgattcctggcttacaacttggagaactttttgccctgtttgtaagcgtgatgcaagaactagcacaggtgatccacctgcatcagaaagtacaccattgctttcatccaccctgagcaccatgtcctcctctgcattgtcatctgttcgatcttcattagcatcatcatcagccatacaaattgccccagcattgtcacggtctccatcaattgctcatactcattctcttgccagcaatccatatattcagcaatcacttaggtcctatcgtcaatctcctatgagcttcagccgaagctcggtagaccttaggaacgcatcttctcaaagatctcgtgcttctcatctggtttcgccggcatcattgaattacccttctatatcgcctcttaatgcaagatacatctccccatattttccaagcccaagcaacgcatcaccaagtatagtcagttcttcgggtcacctactgcatccgctgcattatagcgagtctgctactagtttttctccttttgcatctgctcaatctcttccagactgttaattagatgagtgataacaaggtgagtttcatggagtcataggttgtgatagcattattgagttccttcggatgtgattgtgtagaatgttaacatgctgctgctaccagatgtgtacattgtaacataagattcgtgtgagttactttgattccccaaatgaaattgtggcttttacataaatgaggttaatgtgtgtaacgtgaatagagggattatttgtacagtgtttctgcggtcccttactactaaatgcttaaagcctaatcctgcccatttggttttacttttccggttaactacttgcc

SEQ ID NO: 211 - DNA, 1617 bp, Gossypium hirsutum
cagttttcggatgaagatgaatcgagttgtggttttattattgttatcatggtttctctgtttctcgagtgttttctggatgacttctgccagtgtggttttgattggtaacaacgttaccctctctttcgatgatattgaagctaattttgctccggcaattaaagggtcaggggaatgcggagtattatatttggcaaatcctcttgatgcctgttcagacttgagtattaaagttgatgaactttcaaatggttcgtccccatttgcattggttattagaggagggtgtagttttgaagagaaagtaaggagagtgcaaaaggcaggatttgaagccgctattgtctatgacaatgatgatgatggtgtcttggttgcaatggcagggaatgcagctggcattaagatacatgctgtctttgtttccaaagcttctggtgaaatactcaaaaagtttgctgggtctactgatatggaactgtggctaatccctagctttgaaaactcagcatggtcgatcatggccatctcctttatttctctacttgccatgtcagcagtgctggcaacttgtttctttgtacgcagacatcgcattaggcgagaactcccacagtcctctcgagttcgtgaatttcatggaatgagccggcgtttagtaaaagcaatgcctagcttgatattcactgctgtcttggaagataattgtacttcaataacctgtgcgatatgtcttgaagattatactgtgggtgagaagctcaggattcttccatgtcgccacaagtttcatgctttttgtgttgattcctggcttacaacttggagaactttttgccctgtttgtaagcgtgatgcaagaactagcacaggtgatccacctgcatcagaaagtacaccattgctttcttccaccctgagcactatgtcgtcctctgcattgtcatctgttcgatcttcattagcatcatcatcagccatacaaattgccccagcagtgtcacggtctccatcagttgctcatactcattctcttgccagcaatccatacattcagcaatcacttaggtcctatcgtcaatctcctatgagcttcagccgaagctcggtagaccttaggaacgcatcttctcaaagatctcgtgcttctcatctggtttcaccggcatcattgaattacccttccatatcgcctcttaatgcaaggtacatctccccatattttccaagcccaagcaacgcatcaccaagtatagtcagttcttcgggtcacccactgcatccgctgcattatagcgagtctgctgctagtttttctccttttgcatctgctcaatctcttccagactgttaattagatgagtgataacgaggtgagtttcatggagtcataggttgtgatagcattattgagttccttcggatgtgattgtgtagaatgttaacatgctgctgctaccagatgtgtacattgtaacataagattcgtgtgagttactttgattccccaagtgaaattgtggcttttacataaatgaggttaatgtgtgtaacgtgaatagagggattatttgtacagtgtttctgcagtcccttactactaaatgcttaaag

SEQ ID NO: 212 - DNA, 1950 bp, Theobroma cacao
aaaaatttcatctcggttcggagattgtgttggcactcattagtatcataagacttagaaggcagaatccaaagattcagatattctatatcctctcttggtattgcgctaatggaagcggatgtatctatttccttctaaacccaccccacaaaatcaaacctctttctttcccaacagagaattagggttttttttttctttgggatcgacttttttttttgggtttaatttttggatgaagatgaatcgtgttgtggtattattgttattatggtttctctgtttattgagtgcttcttggatgacgtcagccagtgtggtgttgattgggaaaaacgttactctctctttcgatgatattgaagctaatttcgctccggcgattgaagggtctggggaatgtggggtattatacttggcagagcctcttgacgcgtgttcggatttaagtaataaagttgaagaggtttcgaatgttacttccccttttgcgctggttattagaggaaggtgcagtttcgatgagaaagtacgaagagtgcaaaaggcggggttcaaagctgctattgtctatgacaatgatgatgatggtatcctggttgcaatggcagggactgcagctggcataaagataaatgctgtctttgtctccaaagcttctggtgaaatactcaaaaagtatgctggatgtactgatacggagctgtggcttatccctagttttgaaaactcagcttggtcgatcatggcgatctcctttatttctctacttgccatgtcagcagtgctggcaacttgtttctttgtacgcagacatcgcatcagacgagaacgccctcaatcttctcgagttcgtgaattccatggaatgagcaggcgtttagtaaaagcaatgcccagcttggtattcactgctgtcttagaggataattgtacttcaagaacgtgtgcaatatgccttgaagactataccgtgggagagaagctcaggattcttccatgtcgtcataaatttcatgctttctgtgttgattcttggcttacgacatggagaactttttgccctgtttgcaagcgtgatgcaagaaccagcacaggtgatccaccagcatcagagagtacaccattgctttcatccatcccaagctctgtgtcctcctctgtgttgtcatctgctagatcttcattagcatcatcatcagccatacaaattgccccagcatcgtcatggtgtccatcagtttctcatattcatcctcttgccagcactccatacgtccagcaatcacttaggtcctgccatcaatccccttccatcagcttaagccgaagctcagtagatcttaggaacacatcttctcagagatcccatgcttctcatttggtttcaccagcctcgttgaattacccatctatatcacctcttaatgcaagatacatgtccccgtattttccaagcccaagcaatgcctcaccaagtttagtcagctcttctggtcaccagctgcatccactgcgttgcagtgagtcagcagctagtttttctcctttcgcatctgctcaatctcttccagaatgttaactagttaagtgataatgagctgaattttgtaaaatggaatgacctttgcacagttaaatcgttcttgatctctggtactcttcattattgggttccttttgatgtgattgtggcgttcttatcccatgtctgccgctgattttgtacattgtagcttaagatttgtggtcatttgttttgattccgaaatcatgatgtggtttacataaatgaggatcctagagttgatactggaggaatgtgtgtattgcgagcagaggattgttgacattgttttagcagtcttgtgaatatagttaacccctaactactgaattgtgtggatgcctagtcatgttgatatgagctttatttcttatctgttc

SEQ ID NO: 213 - DNA, 1656 bp, Gossypium raimondii
cttattttaatttcttttagaaattttgactgttactcattgcttaaataaatccttaccttcctccttctggaagaactaaaaacaaatacacgtagtacttaaaactataacagcgtgaaacaccaacctccctagcaatctaacataaaaagcctacattctcaaacaagccacaaatcatctctctcttgttctttttttcctccaaagctcaattttctcctgcactctcactgttgaatttcccggtggtggcttgttgtaacttgacttgctttctgttgtttttatggagttttagcaaccctctgtcaaataacattgttaatttatatattctttcaaagcaaagatgggagaaatgtcaagcttccaattgggagttataggggccctgtttctttctgttgcatcatctgtctctattgtcatatgcaacaaagctttgatgagcaatcttggcttcccctttgctaccacactcactagttggcatctcatggtaacattttgcacccttcatgctgcccaaagattcaatctgtttgagaataaatcaattgacatcaagactgtgatgctttttggcatcctcaatggtgtttctattggatttcttaacttgagccttggatttaactccattggtttctatcagatgaccaaacttgcaattataccattcactgtattattggaaactgtcttcctcaaaaagcaattcagtcaaaagataaagctatccctcttccttttgcttgttggagttggcattgcctccattactgatctccaactcaattttgttgggacaatcctttctctccttgccattgcaaccacctgtgttggccaaattctgacaaacaccatacaaaagaggctcaatgtgtcttcaacccagcttctgtaccaatcagctccatttcaagcagctattctttttgtgtcaggccctttggtagatcagttcctcaccaatcaaaatgtgtttgcttacaaatattcccctatagtcctggcatttatcgtactctcctgtattatttctgtatctgtcaactttagtacgtttctggttattggaaaaacatccccagttacatatcaagtacttggtcacctcaagacttgcctggttcttgccttcggctatacactgctgcatgacccttttacagacaggaacatccttggaatcctgatagccatttttggcatgggtttatattcatatttttgcacccaagagaacaaaaagaaacaagctgatccattggagtgtcagatgaaagataaggaagacaaaccatttctggctcacgagaaagaaggccatgaagttaaaagttcagacaagaattccattgtctaaagcaaaattggattttgttataaagattttgtgtattaagttaaggtgttattccaaacgttttgtaccttccagcacaaatgactttgattctttaaataaactgaaacgatactggtttgtagccgttctaaaaagttgttacactatagtagcagttgtttcgatagttcagtaatgcaaagtttactagtaaaagcacaataagatcaaaattgcttatgtaattcgcatataatactatgtccacacagcttttttcaaacaaataattcacc

SEQ ID NO: 214 - DNA, 1564 bp, Theobroma cacao
aacagcgttaggcaccaaccctctttgcaatccaacatagaaagcctgcttaaaaacctacattctcatacaagccacaaccaactcattctctctctctttcttctccaagctttctgcagctcaaaaatctctatcaactctcttctccagccctctcacatttgattttgttgtaccctggtgctttctggtcagtttatggagttgtaggagccctctgtcaataatcctgtaaaacttacttgtactctttcacaagggctcctaaaactccaaagctttctacttcttttcaagcaaagatgggggagatgtcaagcttccaattgggtgttattggtgccctgttcctttcagttgcatcatctgtttccattgtcatatgcaacaaagctttgatgagcaatcttggcttcccttttgctaccacacttactagctggcatctcatggtgacattttgcacccttcatgctgcacaacgcttcaacctgttcgagaataaatcaatcgacatgaaaactgtgatgctttttggcatcctcaatggtgtttccattggacttctcaacctgagccttggatttaactccattggattctatcagatgactaaactggcgatcataccattcactgtattattggaaactgtcttccttaaaaaacaattcagccaaaagataaggctgtccctctttgtcttacttgttggagttggcattgcctctataactgatctgcagctcaatcttgtcgggacaatcctttctctcctagccattataacaacctgtgttggtcaaattctgacaaacaccattcagaagaggctcaatgtctcatcaacccagctgctgtaccagtcagccccatttcaagcagctattctttttgtctcgggccctttagtagatcagtgtctcaccaagcaaaacgtgtttgcttacaaatattctcccatagtcttggcattcatcattctctcatgcgttatatcagtgtctgtcaacttcagcacatttctggttattggcaaaacatccccagtcacatatcaagtactcggccacctcaagacttgcctagttcttggctttggctacacactgctgcatgaccctttcacagacaggaacatcattggaatcctgatagccatttttgggatgggcttgtactcctatttttgcacccaggagaacaagaagaaacaagctgatccattggcgtctcagatgaaagacaaggatgcaacaccatttctggctatggagaaagaaggtcatgaagttaagaaatcagacaaggattcccttgtctaaagcaagacaggattttttgtcataaagatttttgtgtattaaggacttctttccaaacattttgtctcgagtacacgtaaatgactttgattctttaaataaaccccccctcatttcccaattccatttgttcttcctcttcacagcttattgtaaaattcatggaaccatagacaaaagtgtaattcagcttcattgttagcattctcttggctatgaaacacaactagcgtcta

SEQ ID NO: 215 - DNA, 1086 bp, Pteridium aquilinum
ctccaaagctttctacttcttttcaagcaaagatgggggagatgtcaagcttccaattgggtgttattggtgccctgttcctttcagttgcatcatctgtttccattgtcatatgcaacaaagctttgatgagcaatcttggcttcccttttgctaccacacttactagctggcatctcatggtgacattttgcacccttcatgctgcacaacgcttcaacctgttcgagaataaatcaatcgacatgaaaactgtgatgctttttggcatcctcaatggtgtttccattggacttctcaacctgagccttggatttaactccattggattctatcagatgactaaactggcgatcataccattcactgtattattggaaactgtcttccttaaaaaacaattcagccaaaagataaggctgtccctctttgtcttacttgttggagttggcattgcctctataactgatctgcagctcaatcttgtcgggacaatcctttctctcctagccattataacaacctgtgttggtcaaattctgacaaacaccattcagaagaggctcaatgtctcatcaacccagctgctgtaccagtcagccccatttcaagcagctattctttttgtctcgggccctttagtagatcagtgtctcaccaagcaaaacgtgtttgcttacaaatattgtcccatagtcttggcattcatcattctctcatgcgttatatcagtgtctgtcaacttcagcacatttctggttattggcaaaacatccccagtcacatatcaagtactcggccacctcaagacttgcctagttcttggctttggctacacactgctgcatgaccctttcacagacaggaacatcattggaatcctgatagccatttttgggatgggcttgtactcctatttttgcacccaggagaacaagaagaaacaagctgatccattggcgtctcagatgaaagacaaggatgcaacaccatttctggctatggagaaagagggtcatgaagttaagaaatcagacaaggattcccttgtctaaagcaagacaggatttttgtcataaagatttt

SEQ ID NO: 216 - DNA, 1636 bp, Gossypium raimondii
cttgcttaacttgaaggtcagcttcttctggaaagtaaaacaagccgtccttcaaattgtaacagcgttaggcaccaaccctcttagcatattccaacactgtgaaaacacaggctgtttaaaaagccttctttctcaaacaacaccacaatcatctctctccctctccaagcttctgcagcaactctcaactctcatcttccagtttctgtttgttagtaagaaagatataaacttggtggtgattttgatggagttgtaggatccctctgcaaataatcttgtatacttatttgtactcttttcaaagatcaatttcagggctccaaaaactccaagggaatctgcttcttttatataaagagagagatgggagagatgtcaagcttccagttgggtgtgattggggccctgtttctgtcagttgcatcatcagtctccattgtcatatgcaacaaagctttgatgagcaatcttggcttcccttttgccacaacactaacaagctggcatctgatggtaacattttgcaccctccatgcggcgcaacggttcaatctgtttgagagtaaaccaatagacatgaagacggtgatgctctttggcatccttaatggtgtctccattggtcttctcaacttgagccttggtttcaactccattggcttctatcagatgaccaagcttgcaatcataccattcaccgtattattggaaaccatcttcctaaagaagcaattcagccaaaagataaagatgtcactcttcgttttactagttggagttgggattgcctccataactgatctccaactcaattttgttggcacaatcctttctcttcttgccatcgtcaccacttgtgttggccaaattctgacaaacaccatacaaaagaggttgaatgtatcttcaacccagttgctgtaccaatcagctccatttcaggcagccattctttttgtctctggtcctttggttgaccagtttctcaccaaacaaaatgtgtttgccttcaaatattcctctattgtctcggcatttatcatcctctcatgcataatatcagtatcagtaaactttagcacatttctggttattgggaaaacatccccagtgacataccaagtgcttggccacctcaagacttgcctcgttcttacatttggctacacactgttgcatgaccctttcactgaaaggaacatcattggcatcttgattgccatttttgggatggtcttgtattcatatttttgcacccaagagaacaaaaagaagcaggctgatccattggtgtctcagatgaaagataaagaaggggcaccatttctgggtctagagaaagaaggccaagaagataaaaatgcagacaaggattctcatgtctaaaaacaaaacaggatttttgtcataaagaaccttctgtcttttaaggtgttctttcaaacagattctttaaataagtcactcattttctaaaccatcttctttctttttcttcacagcttataattgtagaaaatttatggaatgattagcaaactgtaatttggtttcaaagtaaatagcaagaaatgttgaaagaagaaatatgatgccccaagtttatatatgtacatataaatataataaa

SEQ ID NO: 217 - DNA, 1453 bp, Gossypium hirsutum
accttttattttcgtctagttgttgattgtttgtaacctgatctacatttctggtgatttttatggagttgtaataggaaatctctgtcaactatcctgtaaacttacttgtactcattaaaaggggctcataaaataaaactccatagtttccacttctttgcaagatgggagagatgtcaagcttccaattgggtgttatcggtgccctgtttctttcagttgcatcatctgtctccattgtcatatgcaacaaagctttgatgagcaatcttggattcccttttgccacaacactcactagctggcatctaatggtaacattttgcacccttcatgccgcacaacgcttcaatctttttgaaagtaaacccattgacatgaagaccgtgatgctctttggcgtcctcaatggcgtttccattggacttctcaacttgagccttgggtttaactccattggattctatcagatgaccaaacttgcaatcataccattcacggtattattggaaaccatcttccttaaaaagcaattcagccaaaacataaagttgtccctcttacttttacttgttggagttggcattgcttccataactgatctgcaactcaattttgtcgggacaatcctttctctcctcgccattataaccacctgcgttggccaaattctgacaaacacaatacagaagaggttaaatgtgtcttcaacgcagctgctctaccagtcagccccatttcaagcagcaattctttttgtctcaggccctttggtagatcaattactcaccaaacaaaatgtgtttgcttataattattctcctatagtcttggcatttatcatcctctcatgcattatttcagtatctgtcaatttcagtacatttttggttattggcaagacatccccagtgacatatcaagttcttggtcacctcaagacttgcctggttcttacctttggctatacattgctgcatgacccttttacagacaggaatatcgttggaatcctcattgccatttttgggatgggcttgtattcctatttttgcacccaagagaacaaaaagaaacaagctgatcctttggggtcacagatgaaagaaaaggatgcagcaccatttctgggtccacagaaagaaggccatgaagttcaaaacttgaacaaagattccgttgtctaaaacaaaacagggtttttgtgtattaaggtgttgtttccaacattttgtatctcaagcgtaaaccagtttttgattctttaaataaaccacacattcccacagttcatctctatgttctctttctcagcacatagtaacagttatggaatcattagcaaattgtaattgatcagcttcatatttgttactattatttctttgcctgtaaaaatttatatacttaaatgaaattaaagccccactttctttcttctttggcaaaa

SEQ ID NO: 218 - DNA, 1545 bp, Gossypium raimondii
atacaagccaaaaccaactctctttctatctctcttctctaagctaattttgcatctctcaaacactcttctttatccctctcaccttttattttcgctagttgttgattgtttgtaacctggtctacatttctggtgatttttatggagttgtaataggaaatctctgtcaactatcctgtaaacttacttgtactcattaaaaggggctcataaaataaaactccatagtttccacttctttgcaagatgggagagatgtcaagcttccaattgggtgttattggtgccctgtttctttcagttgcatcatctgtctccattgtcatatgcaacaaagctttgatgagcaatcttggattcccttttgccacaacactcactagctggcatctaatggtaacattttgcacccttcatgccgcacaacgcttcaatctttttgaaagtaaacccattgacatgaagaccgtggtgctctttggcatcctcaatggcgtttccattggacttctcaacttgagccttgggtttaactccattggattctatcagatgaccaaacttgcaatcataccattcacggtattattggaaaccatcttccttaaaaagcaattcagccaaaacataaagttgtccctcttacttttacttgttggagttggcattgcttccataactgatctgcaactcaattttgtcgggacaatcctttctctcctcgccattataaccacctgcgttggccaaattctgacaaacacaatacagaagaggttaaatgtgtcttcaacgcagctgctctaccagtcagccccatttcaagcagcaattctttttgtctcaggccctttggtagatcaattactcaccaaacaaaatgtgtttgcttataattattctcctatagtcttggcatttatcatcctctcatgcattatttcagtatctgtcaatttcagtacatttttggttattggcaagacatccccagtgacatatcaagttcttggtcacctcaagacttgcctggttcttacctttggctatacattgctgcatgacccttttacagacaggaatatcgttggaatcctcattgccatttttgggatgggcttgtattcctatttttgcacccaagagaacaaaaagaaacaagctgatcctttggggtcacagatgaaagaaaaggatgcagcaccatttctgggtccacagaaagaaggccatgaagttcaaaacttgaacaaagattccgttgtctaaaacaaaacagggtttttgtgtattaaggtgttgtttccaacattttgtatctcaagcgtaaaccagtttttgattctttaaataaaccacacattcccacagttcatctctatgttctctttctcagcacatagtaacagttatggaatcattagcaaattgtaattgatcagcttcatatttgttactattatttctttgcctgtaaaaatttatatacttaaatgaaattaaagccccactttctttcttctttggcaaaaaaataagact

SEQ ID NO: 219 - DNA, 1579 bp, Gossypium hirsutum
caagcttctgcaaactcaaaaaaagcttctcaaaactctcatcttccagtttctgtttgttgttaagaaagatataaacttggtgttgattttgatggagttgtagatcctctgcaaataatcttgtatacttatttgtactcttttcaaagataaattccagggctcctagaactccacggaatctgcttcttttatataaagagagagatgggagagatgtcaagcttccagttgggtgtgattggggccctgtttctgtcagttgcatcatcagtctccattgtcatatgcaacaaagctttgatgagcaatcttggcttcccttttgccacaacactaacaagctggcatctgatggtaacattttgcaccctccatgcggcgcaacggttcaatctgtttgagagtaaaccaatagacatgaagacggtgatgctctttggcatccttaatggtgtctccattggtcttctcaacttgagccttggtttcaactccattggcttctatcagatgaccaagcttgcaatcataccattcaccgtattattggaaaccatcttcctaaagaagcaattcagccaaaagataaagatgtcactcctcgttttattagttggagttgggattgcctccataactgatctccaactcaactctgttggcacaatcctttctctccttgccatcgtcaccacttgtgttggccaaattctgacaaacaccatacaaaagaggttgaatgtatcttcaacccagttgctgtaccaatcagctccatttcaggcagccagtctttttgtctctggtcctttggttgaccagtttctcaccaaacaaaatgtgtttgccttcaaatattcctctattgtctcggcatttatcatcctctcatgcataatatcagtatcagtaaactttagcacatttctggttattgggaaaacatccccagtgacataccaagtgcttggccacctcaagacttgcctggttcttacatttggctacacactgttgcatgacccgttcactgaaaggaacatcattggcatcttgattgccatttttgggatggtcttgtattcatatttttgcacccaagagaacaaaaagaagcaggctgatccattggtgtctcagatgaaagataaagaaggggcaccatttctgggtctagagaaagaaggccaagaagataaaaatgcagacaaggattctcatgtctaaaaacaaaacaggatttttgtcataaagaacctttttgtctttttaaggtgttctttcaaacatattctttaaataagtcactcattttctaaatcatcttctttctttttcttcacagcttataattgtagaaaatttatggaatgattagcaaactgtaatttggtttcaaagtaaatagcaagaaatgttgaaagaagaaatatgatgccccaagtttatatatgtacatataaatataataaatagggttaatttctctcaaattattgaaaaatttctaaattcatccctaaactttaatttgaatgtaaactttaaacaattctattaatctagctattga

SEQ ID NO: 220 - DNA, 1050 bp, Citrus clementina
atgggagaaatgtcgagctttcaactgggtgttattggtgcactgtttctttcggtggcatcatctgtctctattgtcatttgcaacaaagctttaatgagcaaccttggctttccatttgcgacaacactcacaagttggcatctgatggtaacattttgcactctccatgccgcacaacgcttgaatttctttgagagcaaggcagttgacgtgaaaactgtcatgctctttggcattcttaatggcatttccatcggacttcttaacttgagccttggattcaactccatcggattctatcaaatgacaaagcttgcaattataccattcactgtgttactggaaactctctttctcaaaaagcaattcagtcagaagataaaattttctctgtttctattacttgttggagttggcattgcttctgtgactgatcttcagctcaacatggttggcacaatcctctctttgctagccattgtgaccacctgtgttggtcaaattcttacaaacacaatacaaaagaggcttaacgtctcatcaacgcagctgctctatcagtcagctccattccaagctgctgtcctttttgtctcgggccctctagttgatcaattcctcaccaagcaaaatgtgtttgcttataaatattccccagtagtcttggcatttatcatcctatcatgtcttatagcagtatctgtaaacttcagcacatttttggtcattggcaagacatcacctgtcacatatcaagtgcttggtcatctcaagacttgtcttgttctcggctttggctacacattgcttcacgatccattcactgagagaaacatcattggaatcttggttgccatttgcggaatgggattgtattcgtatttctgcactcaagaaaataaaaagaaacaatccggagacctctcactgagctctcagatgaaagatcataaagagacagcagcacttttggctcatcatcaagagaaagaaggtcatgaagttaagaaagcagctaaggattctattgtttaatttgattaatac

SEQ ID NO: 221 - DNA, 1599 bp, Prunus mume
caaaagccttacattctcatacaagccaagccaatcataaccaccacactattctctttatcttagctctcttcctccctgagttttcagaactcaaaacttggtccatcttttgttctctcatatatttccaactccgatcagttttgaagccacaatttgcttcaaacttgccggttggagctggtggcgattgcatggagttgtagcacattttgatcatcaagaagttgatcatttcttggtgaggtttcagggctgctaaactcccaactgggtttttccatttcattgaaaagaaaatatatcactgaagatcatcatgggagaaatgactggcttccaattgggagttattggtgcactgtttctatcagttgcatcatctgtctccattgttatatgcaacaaagctttgatgagcaatcttggcttcccatttgcaacaacacttaccagttggcatctgatggtaactttttgcactcttcatgcggcacaacgtctcaattttttcgagagcaagtcgattgacatgaagactgtcatgctctttggcattctaaatggtatttcaattggtttactcaacttgagcctgggattcaattccattgggttctaccagatgaccaagcttgcaattataccattcactgtgttattggaaactcttttccttaaaaagcaatttagccagaagataaagttttctctcttcctattacttgttggagttgggattgcttctgtgacagacctccagctcaattttgttgggaccattctctctcttctagccatcataacaacctgtgttggccaaattctaacaaacacaattcagaaaaggctcaatgtatcttctacgcagctactctaccagtccgccccttttcaagcagctattctttttgtgtcaggccctttggtggaccagttcctcaccaagcaaaatgtctttgcccacaaatactcttccatagtcttggtattcatcatactttcatgcctcatagctgtgtctgtgaacttcagcacctttctagtaattggcaagacatcccctgtcacatatcaagttctaggccacctcaagacatgccttgttctgggctttggctacacattacttcatgaccctttcacttacaggaacataattggaattctggttgccatttttgggatgggattgtattcatatttctgcttacaggagaacaaaaagaagcaagccggtgacctctctctgggctcccagattaaagataaggatggcattccacttttgagtatagataaagatggtcatgaggttaagaaatcaaccaagaactctcttgtttgattgatagggaacttttgatcatggttttatctttcatgtgttcattacactctgaattttcagtcttcaagacattttgatgggtgtaaatgtttttcattctttttttttagaggtggaggggagaaagactcaaatcttcttgtgggtgtaggggtaaagtgctctactactagagtcagaaatcccacaaaatgttttttattctttgaattaataaatatgccattttcaaattcaattatgaa

SEQ ID NO: 222 - DNA, 1233 bp, Ricinus communis
gctcttttatatctccaacattggcctttttgtcaacacaggttgcttgcctttgctggattctggccattgcatggagttgtaggagccctatatcttgcataaattctttctcaatatcttaataaaaaagggctccttacaactccaagaatttctttgctaaagctgaagatgggagagatgacaagcttccagttgggtgttatcggtgccctgtttctttcagtggcatcatctgtctccattgtcatttgcaataaagctttgatgagcaatcttggcttcccttttgcaacaactctcactagctggcaccttatggtaacttactgcacacttcattgtgcacaacgtttcaacttgttcgagtccaagcccattgacatgaagactgtaatgcttttcggcattcttaatggtgtttccattggactgcttaacttgagcctcggattcaattccattggattctaccagatgaccaaacttgcaatcataccattcactgttctattggaaactctcttcttgaagaaacagttcagccagaacattaagttatctctcttcctattgctcgttggagtcggcattgcctctgtgacagatctccagctcaattttctcggaacaattctgtctctgctggccattgctacaacctgtgtcggacaaattctaacaaatacaattcaaaagaggcttaatgtgtcttccacacagctgctttatcattcagccccatttcaagcagccattctttttgtctcaggccctttggttgatcaattcctcaccaagaagaatgtatttgcatacaaatattctcctatagtcttggcattcatcattctgtcatgcctaatatcagtggcagtgaacttcagcacattcatggttatagggaagacctcaccagttacatatcaagtgcttggccatctcaagacttgccttgtccttgcctttgggtacaccctgctacacgatcctttcacaacgagaaacattattggaatactagtggccatctttggcatgggcttatactcctatttctgcacccaagaaaacaagaagaaacattcggttgacctttcttcggttcctcagatgaaggagaaagacagcacaccactcttagcaatgcaagacaaagaaactcatgaagcaaagaaatcagcaaaggactctcttgtttaagtaaataggcctttctttttttgggtc

SEQ ID NO: 223 - DNA, 1071 bp, Prunus persica
agaaaatatatcactgaagatcatcatgggagaaatgactggcttccaattgggagttattggtgcactgtttctttcagttgcatcatctgtctccattgttatatgcaacaaagctttgatgagcaatcttggcttcccgtttgcaacaacacttaccagttggcatctgatggtaactttttgcactcttcatgcggcacaacgtctcaattttttcgagagtaagtcgattgacatgaagactgtcatgctctttggcattctaaatggtatttcaattggtttactcaacttgagcctgggattcaattccattgggttctaccagatgaccaagcttgcaattataccattcactgtgttattggaaactcttttccttaaaaagcaatttagccagaagataaagttttctctcttcctattacttgttggagttgggattgcttctgtgacagacctccagctcaattttgttggaaccattctctctcttttagccatcataacaacctgtgttggccaaattctaacaaacacaattcagaaaaggctcaatgtatcttctacgcagctactctaccagtcagccccttttcaagcagctattctttttgtatcaggccctttggtggaccagtacctcaccaagcaaaatgtctttgcccacaaatactcttccatagtcttggtattcatcatcctttcatgcctcatagctgtgtctgtgaacttcagcacctttctagtaattggcaagacatcgcctgtcacatatcaagttctaggccacctcaagacatgccttgttctgggctttggctacacattacttcatgaccctttcacttacaggaacataattggaattctggttgccatttttgggatgggattgtattcatatttctgcttacaggagaacaaaaagaagcaagcaggtgacctctctctgggctcccaaattaaagataaggatggcattccacttttgagtatagataaagatggtcatgaggttaagaaatcaaccaagaactctcttgtttgattgatagggaacttttg

SEQ ID NO: 224 - DNA, 1831 bp, Populus trichocarpa
attaccttacgggaggacctatcctcactgtaaattccacattaggtaatttgtatgggaaacttccacgtaaaatgggataaacaagaggggaaattagctgaaaattgtgtcttaatcatttgaaactgaaaatttaccttgttgactgtaatcttgcctcaacctacttccttctggaagtaagtcaaatcatgggagatcaaaataaaacaaaaaaccgaacaatcccacatagtaaaaataatcattaaagagttaggcacaaagctttgttgcctaaaaatttaagggtgcgggtgctaaagttgctttgttatacaacctccccaccatataaccaaacacacaggcatacacatttcaagcccatttcatctccaaaaacttgctttaagtttatctcccggattccggtgactgcattgagttgtaggggccctgcatttattgtaagtacagaggcagataaagaattccaagggctgcttagaactcccatacacaacatttctgttttctttgagttttcagggctcctcacaactcccagcaaatttatcttcgttcaaggtataattctccgtgagatgggagaaatgccgagcttccaattgggtgttattggggccctgttcctttcagttgcatcatctgtctccattgtcatttgcaacaaagctttgatgagcaatctcggattcccatttgctacaactctcactagctggcacctcatggtaacattctgcacacttcatgcggcacagcgtctcaatttgtttgagtccaaatccattgagatgaagcctgtgatgctctttggaattctaaatggggtttctattggacttctcaacttgagtcttgggttcaattctattggattctaccagatgaccaaacttgcaatcataccattcactgtcctattggaaactctgttcctgaagaagcaattcagccagaagataaagctttcgctctttgtcttgcttgttggagttggcattgcctctgtgactgatctccagctcaacttcgttggaacaattctctctctcctagccattataacaacctgcgttgggcaaattctgacaagtacaatacaaaagaggctaaatgtgtcttccacacagctgctttaccagtcagccccatttcaagcagcaattctctttgtgtcaggccccttggtggatcaattcctcaccagaaagaacgtctttgcatacaaatattcttcactagtcttggcattcattatactttcatgcattatatctgtgtctgtgaacttcagcacattcatggttatcggcaagacctcaccagttacttatcaagtgcttggacacctcaaaacttgccttgttcttggctttgggtacactctgttacatgatcctttcacaatgagaaacatcattggaatactagttgccatttttggcatgggcctatattcatatttctgcgtccaagagaataaaaagaaacaatcagtggacctttcactagcttcccagatgaaagataaggatagcactccaattttgggcatgcaagataaagaaatcagtcatgacgccaagaaatcaacaaaggactctcttgtttaatttgtcataaagaagttcatgcatgtatcgggtgtttgctctaccagaaacaattaatttgttgagttgagtataaatgttttttattcttttaatagacagtacccattcacttttttaccattgtattaattttagctctaaataaatcataacacagatcaattttcccattcttctgctgtaaatctaataatgtaacctat

SEQ ID NO: 225 - DNA, 1324 bp, Vitis vinifera
caccaacacactctcagaggctcagagctatcaattccttcatccaattctctcccaccattacccattttttattcctggtgattttgtcttcctctggggtctaaggagtccatttcttctgacaattttccagggcttctaacacacccaagaatcattttctttaagatgggagaaatgtcaggcttccaattgggtgtgataggagcactttttctatcagtggcatcatctgtctccattgtcatctgcaacaaagccctgatgagcaatcttggcttcccttttgctacaacactcactagttggcatctgatggtaacattctgcactcttcatgtggcacaacgcttcaatgtgttcgaaagtaagtcggttgacatgaaaactgtgatgctcttcggcattctgaatggtgtttccattggccttctcaacttgagcctcggattcaattccattggtttctaccagatgaccaaacttgccatcataccattcactgtactactggaaacccttttcttgaaaaagcaattcagccagaagataaagttctcgctcttccttttacttgttggagttgccattgcctcagtgactgatctgcagctcaattttgttggaaccattctctctctactagccatagcaacaacctgtgttggtcaaattctgacaaacaccatacaaaagaggctcaatgtctcttctacacagctcctgtaccagtcagccccatttcaagcagctatcctctttgtctcaggccctgtggtggaccaatgcctcaccaagcaaaatgtatttgcatacaaatattctcctatagtcttggcattcatcatactttcatgcataatctccgtctctgtgaacttcagcaccttcctagtgatcgggaagacgtctcctgtcacatatcaagtgcttggccacttgaaaacatgccttgttcttggctttggctatacactgctgcatgaccccttcacagagagaaacatcattgggatactgatagccattctgggcatgggcttgtattcatatttctgcactcatgagaacaaaaagaaacaattgggagatctttctacagtgtctcagatcaaggatagggaaactgcaccccttttggcagggaagaacatgggttatgaagataaagaaagtcatgaggtgaagaaagcaaccaaggactctcttgtttgagtaatgcccagagctttgattgtgataaaaatttcatgtattcagattttgttgagtgtaaatcattctcattctttgaataataaactccttctccctttcccat

SEQ ID NO: 226 - DNA, 1290 bp, Populus trichocarpa
gctattcttaaccttgaaatttgttttcttgttatctaattctctagtagtttacagtacactttgcctacttggttaattttagtatgtctgatttcagtaagatgggagaaatgtcgagcttccaattgggtgttatcggggccctgtttctttcagtggcatcatctgtttccattgtcatttgcaacaaagctttaatgagcaatcttgggttcccatttgctacaactctcactagttggcacctcatagtaacattctgcacacttcatgcggcacagcgtttccatttgtttgatgccaaggccattgacatgaagactgtgatgctctttggaattctaaatggtgtttctatcggacttctcaacttgagcctgggattcaattccattggtttctaccagatgaccaaacttgcaatcataccattcactgtcctattggaaactctgttcctgaaaaagcaattcagccagaagataaagctttcactccttgtgttgcttggtggagttgccattgcctctgtgacagatctccagctcaatttcgttggaacaattctctctctcctagccatcgtaacaacctgcgttgggcaaattctgacaaatacaatacagaagaggttgaatgtgtcttccacacagctgctttaccagtccgccccatttcaagcagccattctctttgtctcaggcccctttgtagatcatttcctcaccaaaaagaatgtgtttgcatacaagtattcttcaatagtcttggcattcattatcctttcatgcattatatcagtgtccgtgaacttcagcacgttcatggttattggcaagacctcaccagtcacatatcaagtgcttggacacctcaagacttgccttgttcttgcctttgggtatactctgctgcatgatcctttcacgattagaaacatcattggaattcttgttgctattattggcatgggcttatattcatatttctgcgtccaagacaacaaaaagaaacaatcagttgacctttctctagcttctcagatgaaagacaaggatagcactccactcttgggcatgccagataaagaaggtcacgaggcaaagaaatcaacaaaggtctcccttgtttaattaaaatgaataggcttaatttgtgaaaaagagaaaagcttcatgtatgatcaggtgtttgttcttccagaaacaatttgttgatcgagtataaaatgatcttgattctttcaataaacagtaccctttcactgttatccattttgttttagcc

SEQ ID NO: 227 - DNA, 1505 bp, Malus domestica
gttttaaatttaacggcgtttggcaccaaccacaaaaaccatctaaaataaaaagggtgcaaaacctttgcattcttatacaagtcaattattgccacggcaatactattctctctctctccatttctctctttttctctctctttttctctctctgagttcgtggttcaattaaagcttggtctttcatatccaactccaccatcagtttgtaaagctagggttgcatggagttgtaagattcttagctacgtattgtacatatatatatacatacatatgaatccttagcaaatcataattggcacatttgatcatctcaaaaggttgacaagtagccttgatcatttgttgcaatcggttatctttgctgaggtttctggggctcctaaactcccatcaggatttctggtttcattgaattcaagagtaccaaagcagaaactcgtacaatcctatcatgggagaaatggctggattccaattgggcgttattggtgcactgtttctttcagtggcatcatctgtctctattgttatatgcaacaaagctttgatgagcaatctcggcttcccttttgcaacaacacttaccagttggcatctgatggtaacatttggcacccttcatgcggcacaacgtctcaaatttttcgagagtaaatcaattgacatgaagactgtcatgctctttggtattctaaatggtgtttccattgggctgctgaacttgagcctcggattcaattccattggattctaccagatgaccaagcttgcaattataccctttactgtgttactggaaactcttttccttaaaaaacaattcagccagaagatcaagttttctctcttcttattagttgttggagttggaattgcctcagtgacagacctccagctcaattttgttggaactattctctctcttctagccatcgtgacaacctgtgttggacaaattctaacaaacacaatacagaaaaggctcaatgtctcctctactcagcttctctaccaatcagccccttttcaagcagctattctttttgtatcaggccctgtggtcgaccagttcctcaccaagcaaaatgtctttgcccacaaatattcttccatagttttggtattcatcatactctcatgcctaatagccgtgtctgtaaacttcagcaccttcttagtaattggcaagacatcacctgttacatatcaagtgctaggccaccttaagacatgccttgttctagggttcggctacacattacttcatgaccctttcactgagaggaatataattggaattctggttgccatttttgggatgggattgtattcgtatttctgtgcccaggaaaacaagaagaaacaagctggtggtgacctctcattgggatctcagatcaaagataaggatggcactccacttttgatccaagataaagatagccatgaggttaagaaattaactaagaactctcttgtttgattgatagggtttg

SEQ ID NO: 228 - DNA, 1522 bp, Malus domestica
tctctctgagttcgtggtttaattaaagcttggtcgttcatatccaactccaccatcagtttgtaaagctagggttacatatatatacatatatatatatgtatcattagcaactcataattggcacatttgatcatctcaagaggttgaccagtaaccttgatcacatttgttgcaattggttttctttgctgaggtttctggggctcttagactcccatcagaatatacatcatcactgaagatcatgggagaaatggctggattccaattgggcgttattggtgcactgtttctttcagtggcatcgtccgtctctattgttatatgcaacaaagctttgatgagcaatctcggcttcccttttgcaacgacgcttaccagttggcatctgatggtaacatttggcacccttcatgcggcacaacgtctcaaatttttcgagagtaagtcaattgacatgaagactgtcatgctctttggcattcttaatggagtttccattggattgctaaacttgagcctcggattcaattccattggattctaccagatgaccaagcttgcaattataccctttactgtgttattggaaactcttttccttaaaaagcaattcagccagaagatcaagttttctctcttcttattagttgttggagttggaattgcctcagtgacagacctccagctcaattttgttggaacgattctctctcttctagccatcgtaacaacctgtgttggacaaattctaacaaacacaatacagaaaaggctcaatgtctcctctactcagcttctctaccaatcagccccttttcaagcagctattctttttgtatcaggccctgtggtggaccagttccttaccaagcaaaatgtttttgcccataaatactcttctatagtattggtattcatcgtactttcatgcctgatagctgtgtctgtgaacttcagcaccttcttagtaattggcaagacatccccagttacatatcaagtgctaggtcacctcaagacatgccttgttctagggtttggctacacattacttcatgaccccttcactgagaggaatataattggaattctggttgccatttttgggatgggattgtattcatatttttgtgcccaggaaaacaagaagaaacaagctggtggtgacgtctcattgggatctccgattaaaggaaaggatggcactccacttttgagccaagataatgatacccatgaggttaagaaatcaactaagaactctcttgtttgattgataagagttttagatcatatgatttcatgtatgtgtattattgcactctgaattttcagtcttattaaagtaagacattttgattggtgtaaatggtttttgtctttactttttttggtccagaaaagggggtgggcaagtcccaaacccttgtcattggcgtaaggtaaagtgctctgccactagaggtcgtaagttgttttattctttgaattaataaatttaccctttacatatcaa

SEQ ID NO: 229 - DNA, 1038 bp, Manihot esculenta
atatatgggagaaatgtcaagcttccagctgggtgttattggtgcactgtttctttcagtggcatcatctgtttccattgtcatatgcaacaaagctttgatgagcaatctcggcttcccttttgcaacaaccctcacaagctggcacctcatggtaacattctgcacacttcattgtgcacaacgtttcaatctgtttgagtcaaagcccattgacatgaagactgtaatgctctttggaattcttaatggtgtttctattggattgctcaacctcagcctgggtttcaattccattggattctaccagatgaccaaacttgcaatcataccattcactgttctattggaaactcttttcttcaaaaaatatttcagccagaatattaagtgttctctcttcctcttgcttattggggtaggcattgcctctgtgactgatcttcagctcaatcttgttggcactattctttcaatgctagccattgtaacaacctgtgttggccaaattctgacaaatacaatacaaaagaggctcaatgtgtcttcaactcagctgctttatcaatctgctccatttcaggctgcaattctttttgtctcaggccctttggttgatcaattcctcaccaaaaagaatgtttttgcttacaaatattcttctatagtcttggcattcatcatcctgtcatgcctgatatcagtggcagtgaacttcagcacattcatggtaatagggaagacatcaccagttacatatcaagttcttggccatctcaagacaagtcttgttcttgggtttgggtatacacttttgcatgatcctttcaccctcagaaatatcattggaattataattgcaatctttggtatgggcttatattcttatttctgcacccaagaaaacaagaagaaacaatctcttgacctctcattaggacctcagatgaaggagaaggacaacacaccactcatagcaatgcaagacaaagaaagtcatgagacaaagaaaacagcaaaggactctcttgtctaagt

SEQ ID NO: 230 - DNA, 1715 bp, Cajanus cajan
tcccatacaagcttaacctcactcaatttctcttctccttccattatttctctctattttagactcttctataacacaactctctctggttataaacgctgccgtttagtctcacaacttgggtgatcttttggagttgtaggagcccttacaccttgcactctcatttcaccattcccaagggctccttccacgcaatagctccaagctgatctcagattgatacatcatttattccacttaatcactattcaataagaaaagatgggagagatgtcaaacttccaattgggtgttattggtgcactatttctctcagtggcttcttctgtatccattgtgatctgcaacaaagccttgatgagcaatcttggcttccctttcgccacaacacttactagttggcatttgatggtcacattttgcacccttcatgctgctcaacgtttgaatctattcgtgtccaaatccattgacttgaaaactgtcatgctttttggtattctaaatggagtctccattggatttctcaacttgagtctgggctttaattccattggattctaccagatgacaaaacttgcaatcataccattcaccgtattattagaaacccttttcctaaagaagcaattcagcacgaaaataaaattctctttattcctattacttgtgggagttggtattgcttctatcacagatcttcagctcaattttgtgggaaccattctttcccttctagcaatcataaccacatgtgttggccaaattctgaccaacacaattcagaagaagcttaacgtctcttccacacagcttctctaccagtctgctccattccaagcagcgattctttttgtttcaggtcctgttgtggatcagatgctcaccaagcaaaatgtctttgcctacaaatattctcctgttgtcttggcattcatcatcttgtcttgcttgatagctgtttctgtgaacttcagcacatttttggtgataggcaaaacatctcctgttacttatcaagtgctaggccacctcaagacgtgccttgttctaggatttggctacacattactccatgaccctttcaccggaaggaacattattggaatacttgttgccatttttgggatgggtttgtactcttatttctgcactgaggagaacaaaaagaaacaattacctagtgatctcccattggcctctcaggtcaaagacaaagatagctcaccccttttggccgggaaaaacgtgggtaatcagaacgacgaaaatcatgaaactaagaaattaaacaaggattctgttatttgaaagaacatgctccatctctttaattttgagatctcgtatattttggggttctttcaatttctagggaacttgtaatgagtgtaaatcaaatttgtttaataagttttgtgtaactttaagtcggtgcatttcctttaccaaccatatattcgttaaactacaggaaattcaaatttcataaaattgtaatcccttttttgtgtcaatgaaaaggtagacatcaattattttgatattcgtcgctttattgtgctcaataacaatcatagaaggtaactattgcatttcattttatgattatcattgtctaatattattctgaactctgttatgaaaattcaaatgttgtacgtgttttgaactattgcttgtaataaaaaaagaaaaattcaatgggctca

SEQ ID NO: 231 - DNA, 1020 bp, Manihot esculenta
atgggagaaatgtcaagcttccagttgggtgttattggtgcactgtttctttcagtggcgtcatctgtttccattgtcatatgcaacaaagctttgatgagcaatcttggctttccttttgctacaactctcactagttggcacctcatggtaactttcttctcacttcactgtgctcatcgtttcaacatgtttgagtccaagtccattgacatgaagactgtgatactctttggcattctcaatggtgtttctattggactgctcaacctcagcctgggattcaattccattggattctatcagatgaccaaacttgcaatcatacccttcactgttctactggaaacacttttcctgaaaaaacaatttagccagaagattaaattttctctcttccttttgcttgttggagttggcattgcctcagtgacagatctccaactcaattttgttgggacaattctctctatgctagcaattgtaacaacatgtgttggccaaattctgacaaatacaattcaaaagaggctcaatgtgtcttcaactcagctgctttatcagtctgctccatttcaggctgctgttctttttgtctcaggccctttggttgatcaattcctcaccaaaaagaatgtttttgcttacaaatactcttcaatagtcttggctttcatcatcctctcatgccttatatcagtggctgtgaacttcagcacattcatggtgatagggaagacatcaccagttacatatcaagttcttggccacctcaagacttgccttgttcttgcttttggctatacacttttgcatgatcctttcactgtcagaaatatcattggaattcttgttgccatctttggtatgggcttgtactcttatttctgcacccaagagaacaagaagaaacagtctgttgacctttcattgggacctcagatgaaggagaaggatagcacaccactcatagcagtgcaagacaaagaaagccatgaagcaaagaaatctcttgtttaa

SEQ ID NO: 232 - DNA, 1366 bp, Carica papaya
ctctctctctccctctccctctccctctcgtcagtctgagttaactcagtttgagattaacccttaacaacttatttcctacctctgagtcgtcgtctcgctgctcactgagtcaaggcgattaataggtatggaggtgtaggctccatttttctgttcttaatctccctttctccaacatcgagtcactatcatttgcaggtgagggagaaattgagaatgggagaaatgtcaagcttccagttaggtgtgatcggtgccctgtttctttcagtggcatcatctgtttccattgttatttgtaacaaagctttgatgagcaatcttggcttcccttttgctacaacattgaccagttggcatttgatggtaacattttgcacccttcatgctgcacatagattcaatttatttgagaacaaatcaattgacttgaagactgtcgtgctctttggcatccttaatggtgtctctattggacttctcaacttgagtcttggtttcaactccattggattctaccagatgactaaacttgcaatcataccattcactgtcttgttagaaaccatcttcctcaataagcaattcagccagaagataaaattgtctctgttccttttacttgttggagtgggcattgcttctgtaacagatctccagctcaactttcttggaactgtgctctccctactggccattatcacaacttgtgttggtcaaattctgacaaatacaattcaaaagaagctgaatgtatcatctacccagttgctgtatcaatcagctccatttcaagctgctattctctttgtctctggcccttttgtggataaattacttaccaagcaaaatgtttttgcctataaatattctcctatagtcttggcgttcataattctttcatgtgtaatagcagtgtctgtgaacttcagtacatttttggtaatagggaagacatctccagttacataccaagtgctagggcacctcaagacttgtcttgttcttgcatttggctacacattactacatgatccttttacacccagaaacataattggcatcctagttgctgtctttggaatgggattgtattcttatttctgtaacttggacaacaagaagaaaaactccggcgccgattccggttctcagatgaaagacaaggatgaaacactacttcttctggctcaagacaaggaaaatcaggatgctaataaagcaaacaaggattctcttgtctaaaatgttttttcataaacattcatcatgtattaaggtggtgttctttatttttgttttcttaaaccccattttgtttgagtgtaaatcagttaattctttaaataaattacccattttc

SEQ ID NO: 233 - DNA, 1391 bp, Glycine max
acaatacaactctctgcctataaacgctcttgtttaacgtgagaacttgggtgatcttttggagttgtaggagcccttacaccttgcagagtcatctcaacattcccaagggctcctactacgcaataacgccaagctcgatctcaaattaatatatcatttattcctcttaatcaaatattaaataagaaaagatgggagagatgtcaaacttccaattgggtgtgattggtgcactatttctctcggtggcttcttctgtctccattgtcatctgcaacaaagccttgatgagcaatcttggcttccctttcgccacaacgcttactagttggcatttgatggtcacattttgcacccttcatgcggctcaacgcttgaatctatttgtgtccaaatccgttgacttgaaaacggtcatgctttttggtattctaaatggcatttccattggatttctcaacttgagtcttggctttaattccattggattctaccagatgacaaaacttgcgatcataccattcactgtattattagaaactattttcttaaagaagcagttcagctcgaaaataaaattctctttatccctattacttgtgggagttggcattgcttctatcacagaccttcagctcaattttgtgggaaccattctttcccttctggcaatcataacgacatgtgttggccaaatcctgaccaacacaatacagaagaagcttaacgtctcttccacacagctgctctaccagtctgctccattccaagcagcaattctttttgtttcaggccctcttgtggatcagatgctcaccaagcaaaatgtctttgcctacaaatattctcctgtggtcttggcattcatcatcttgtcttgcttgatagctgtttctgtgaacttcagcacatttctggtcataggcaaaacatctcctgtaacatatcaagtgctaggccacctcaagacatgccttgttctaggatttggctacacattactgcatgaccctttcaccggaaggaacattcttggaatactaattgccgtttttgggatgggtttatactcttatttctgcactgaggagaacaaaaagaaacagttagctagtgatctcccattggcctctcaggtcaaagacaaagatagcttaccacttttggccgggaaaaacgtgggtaatcaaaacgaggaaaatcatgagactaagaaattaagcaaggattctgttatttgaaaggacaggctccatgtctaggaaactagtaatgagtgtaaatcaaatttgtttaataagttttctgtaactttaagtcggtgcatttcatttacctaccatatattcgttaaactgcaggaggaaattcaaatttcataaaattgt

SEQ ID NO: 234 - DNA, 1529 bp, Lupinus angustifolius
ctctctctttctctctagtctatagcttagatttggagctctatatgcatgtaataatacaaacactgacgtgtgattttctggagttgttgcagcacatacactgagaaggttatttctgtgttcttcaaattaagaaaagatgggagagatgtcaagcatccaattaggagttattggtgcactgtttctgtctgtggcttcatctgtctctatagtcatctgcaacaaagctttgatgagcaatcttggcttcccttttgccacaacacttacaagttggcatttgatggttacattttgcacccttcatgtggctcaacgcttcaatctgttcgaggccaagcccattgacatgaaaacagtcatgctttttggcattctaaatggtgtctctattggatttcttaacttgagccttggcttcaattctattggattctaccagatgacaaaacttgcaatcataccattcactgtattgtttgaaactattttccttaagaagcagttcagctcaaaaataaagttctccctcttcctcctacttgttggagttggcattgcctctatcacagaccttcagctcaattttcttggaaccattctttcacttctagctatcataaccacatgtgttggccaaattctgaccaacacaatacagaagaagctgaatgtctcttccacacagcttctctaccagtcttctccattccaagctgcaattctttttgtttcaggtccttttgtggatcagatgctcatcaagcaaaatgtttttgccttcaaatattctcctattgtcttaggattcattatcttgtcctgtttgatagctgtttctgtgaacttcagcacctttctagttataggcaaaacttctcctgtaacttatcaagtactaggccacctcaaaacttgtcttgttctagcatttggcttcacattacttcatgaccctttcactgagaggaaccttattggaatacttgttgctatttttggaatgggcttatactcttatttctgtactaatgagaacaaaaagaaacactcaattgatctaccattggcatctcaggttaaggataaagaaaattcaccatttttaggtgggaaaaatatgggcaatcaagaaaaggaaaatcatgagcctaagaaatcaagcaaggagtctcttgtttaaaataacattaatgcaagggttctttcaatgtttaggcacctcgatgagtgtaaatcaagttttaaagtaattgcaagtctttgaaattgtaatatttttcatgtgttaatgataagggtagactacatcaattattgtggttcatatcaacattgttgccaatactagtcataaacaagtattaacaaacataatttacacgaactaaaattcaaaaagcttcatcatagtaaaccatgcagtaaaatgctcccttcttaatcaattaataaatgctcaaattacaaaatacattagatggatgaacttgaattaaggctgagttctgccaacattttca

SEQ ID NO: 235 - DNA, 1187 bp, Helianthus annuus
cttaggtgctcgtaagtaattctcgaattgcatacgaattcggttaaagaaaaagaagatgggagaattgacagggttccagttaggagttattggtgcattgtttctatcagtggcatcatcagtctccattgttatatgcaacaaagctctcatgagcaatctcggttttccctttgctacaacgttgactagttggcatctgatggtaacatactgcactcttcacgtggcacaacgtttaaatttctttgagaacaagagaattgatatgaagactgtgatcctatttggcatcctaaatggcgtttcaatcggttttcttaacttgagccttggctttaactccattggcttttatcagatgaccaaacttgcaatcatacctttcaccgtcctattagaaactgttttcttgaaaaaacagttcagccagaaaataaagttatcgcttttcctcctacttcttggagttggcatagcatcagtgacagatcttcagctcaattttgtcggcacgattctctcacttctagctattgccaccacttgtgttggtcaaattctaacaaacacaattcaaaagagactaaatgtgtcatcaactcagttactgtttcaatcagcaccatttcaagcagctattctgttcgtcacaggcccgttagtagatcagtacctcactaagcaaaacgtatttgctttcaaatattcacctcttgttttgggattcattatcctgtcatgtgttattgcggtttctgtgaattttagtacatttttggtgattggcaaaacatcaccggttacataccaagttttaggacacctcaagacatgtcttgttcttggattcgggtatactttgttacatgaccctttcacagagaagaacataatcggaatacttatcgccattgttggaatgggactctattcttacttttgtacccatgaaaacaaaaagaaacagattgttgatctctctccaagttctcagattaaggataaagatagtaacacacctcttttgggacatcaagaaaaagaaaatcattttgaagcgaagaaagcaacgaaagactcccttgtttaagctaaagcgagcggtagggatttaaatgtgtgtaatttctttttgtgatgtaattcaaatgaacataatgaaattttgattctcttctctg

SEQ ID NO: 236 - DNA, 1340 bp, Trifolium pratense
ttcttcaaattaagaagaatcttgaaaaatatattggtggcaaagatgggagagatgacaaaagttcaattgggggttattggtgcactatttctatctgttgcttcctctgtctccattgtcatatgcaacaaggccttaatgagcaatcttggcttcccatttgccacaacacttacaagttggcatttgatggttactttttgcaccctccatgtggctctacgtttcaatctatttgaggccaaacctgttgacatgaagacagtcatgctttttggtattctaaatggtgtctccattggatttctcaacttgagtcttggcttcaattccattggattctatcagatgacaaaacttgcaatcataccattcacagttatgctagaaactattttcctaaagaagcaattcagccggaacataaaactatctctattcttcttacttgttggagttggcattgcctctatcacagatcttcagctcaattttgttggaaccattctttcacttcttgctatcattacaacatgtgttggccaaattcttaccaacacaatacagaagaagcttaatgtgacttctacacaacttctctaccaatctgctccattccaagcagcaattctttttgtttcaggccctcttgtggatcagatgctaaccaagcaaaatgtctttgcatacaaatattctcctatagtcctgactttcatcatcatgtcctgtgtgatagctgtttctgtgaacttcagcaccttcctagttataggaaaaacatctcctgtaacatatcaagtgttgggccatctcaagacatgtcttgtactaggatttggttacacattgctccatgaccctttcactgaaaggaacatcattggaatattagtagcagtttttggaatgggattgtattcttatttctgcactcaagagaacaaaaagaaacaattagtcgatcctcctttatcgtctcaggttaaagataaagatgattcaccacttttgaatggcaaaaacatggacaataaggaaaaggaaaatcatgagaaattaagcaaggattctcttgtttaaaataaacatgatttgtgttatttttaagatcttttatattttgagggttatttcaatgcttactcagggcacattgtctagtgtaaatcaaattttgtttagagattcattttgatgcactctcttaatgtaaaagaacttgtttactcttacataatgtcattatcatttgatgattttgacaaattcatgttttatcaaacttcatcatgtgtcaatgtacctttgaatgatgattccaaactattttatgc

SEQ ID NO: 237 - DNA, 1370 bp, Quercus alba
gactctctctttaagctcaggcctctcccaaccaattctctcatcattcttcatttcccagctctgatttcaagaaaattcgccggagccaccaccattgcttggagttgtaggagcccttataccttgtaaatccatttgtacattttctaagttctaagggctcctaacactccaagactttcttatcacttgtaaagatgggagaaatgacgagcttccagttgggtgttgttggcgcactgttcctatcagtggcttcatctgtctccattgtcatctgcaacaaagctttgatgagcaatctgggcttcccttttgctactacactcactagttggcatcttatggtgacattctgcacccttcacacggcgcaacgcttgaatttttttgagtccaagtccattgacacaaagactgtaatgctctttggcatcctaaatggggtttcaattggacttctcaacttgagcctgggtttcaactccattggattctaccagatgacaaaacttgcaattataccattcactgtattattggaaactcttttcttgaacaagcaattcagccggaagataaagttcgctcttttcctcttactagtaggagttggcattgcctctgtgactgatcttcagctcaatttagttggaacaattctctctcttttagcaattgtaactacctgtgttggtcaaattctcacaaacacaatacaaaagaggctcaatgtctcttctactcagctgctctaccagtcagctccatttcaggctgcaattcttttcgtctcaggccctctggttgatcagttcctcaccaagcaaaatgtctttgccttcaaatattctcctttagttttgggattcatcgtactttcatgcctaattgccgtatctgtgaacttcagcacgtttctagttattggcaagacatcaccagttacatatcaagtgctaggccacctcaagacatgcctcattcttggctttggctatacactactccatgaccccttcacagaaagaaacattattggaatcctaatagcaatttgcggcatgggactatattcattcttttgcacccaggagagtaaaaagaaacaatcccctgatctatcgttggtgtctcagattaaagataaagatactacacagcttttgggtcatccagataaggagagtcatgaagctaagaaatcaactaaggactctgttgtttaagtgaaagactttgtgataaaggtttcatgtatttttgtgttctttccagattcaggacattttttccgctcataaattcaaagacattttgatgagtgtaaatgatattaattcgttaaataaattccctttcttttt

SEQ ID NO: 238 - DNA, 1897 bp, Centaurea maculosa
tttgattgtagattatgcatcgtatatatgttattttttgtagctgtataatacacataataaatattttttaatttattcttgcaacatgaaatacatgatataatgtgcaatggctaatccgataaaagcccttatactttaaaaaacacagtgaagagtcaccaagtcataaagacggtatatgataccaccgacacctaaaagaatgtaagaacctgggctcactcttcaattaggcaaccatatagttctagaagtacaagggtctaagctccaaccctatcacgcggaatcaggcgtaattctgaaccatgtttcaggaagacattacctgcactttgttgaggactgattccaacaccatcattggtgatgatggcactagtctgtggaggtactttgaattcttcagccgcatatttaagaacagcggtgaatggagccccttctggaacgctaaacactttgaaaggaagcttcggatcggaggtcagagtaaccttgaaagaaaccttcccaccagcaccagtcgccattatcagctggatttccttttttctagaatcatcatcacctgcaacttaatccgccatcaatacctgctttaactcatcaaaacctatagatacatacatatttttccaaggtgctatcataagtcgatctctcagattgtacacgaattctgacgtcaattaaggaaaaagaagatgggagaattgacaggttaccagttgggggttattggtgcattgtttctatctgtggcatcatctgtgtccattgttatctgcaataaagccttgatgagcaatcttggttttccttttgctacaacattgactagttggcatttgatggtaacatattgcacgcttcatgtggctcatcgttttaatttctttgagaacaagagcattgatatgaagactgtgatcctgtttggcattctaaatggtatatcaattggttttcttaacctgagccttggctttaactccattggcttttatcagatgaccaaacttgcaatcataccttttactgtcctcttggaaactcttttcttgaaaaaacaattcagccagaaaataaagctatctcttttcctcttacttgttggagttggcatagcatcagtgacagatcttcagctcaattttgttggcacagttctctcacttctagctatcatgaccacctgtgttggacaaattctaacaaacacaattcaaaagagactaaatgtgtcatcaactcagctgctgtatcaatcagccccatttcaagcagctattctgtttgtcacaggccctgtggtggatcagtacctcaccaagcaaaatgtttttgcttacaaatattcacctcttgttttggggttcataatcctatcgtgtgtgattgcggtatccgtgaattttagtacatttttggtgattgggaaaacatcaccggttacataccaagtgctaggccatctcaaaacatgtcttgttcttggatttgggtatactttgctacatgaccctttcacagagaggaacatcattggtatacttgttgccattgtgggaatgggcttgtattcttacttttgtacccatgaaaacaaaaagaaacaagtgcttgatctctctccaggttctcagatcaaagataaggatagtagtgcacctcttttgggacatcaagaaaaagaaaaccattttgaggtgaagaaagcaaccaaagactcccttgtttaagctaaagcgattgatagggatttttaatgtgtttatttcctgtaattcaattgagtataaagaaattttgattctttttaataaatctaaatacccgcctcatttgactcgatttagtcttttattctactgttgttgctagtttt

SEQ ID NO: 239 - DNA, 1239 bp, Cirsium arvense
aactcacatttcaattgccggcaccgtcaattagtctgttgtttcgtaaagccaattgccaactctccttttgtggtttctatatggttatatctgttagtacgattctccttttttgaattagtttcaaggtttcaacttttcaggggctccgagtttagattccaggtcaattttgattttgattcagaaggaaaaggatgggagaattgacagggtatcagttgggggttattggtgcattgtttctatcagtggcatcatcagtctccattgttatctgcaacaaagccttgatgagcaatcttggttttccttttgctacaacattgactagttggcatctgatggtaacttattgcacgcttcatgtggcacatcgtatgaatttcttcgacaacaagaaaattgatatgaagactgtgattctttttggcattctgaatggtgtttccattggttttcttaacttgagccttggctttaactccattggcttctatcagatgaccaaacttgcaatcatacctttcactgtgctcttagaaactcttttcttgaaaaaacaattcagccagaagataaagttctctcttttcgttctacttgttggagttggcatagcatcagtgacagatcttcagctcaatttcattgggacggttctttctcttctagctatcgccaccacttgtgttggtcaaattctgacaaacacaattcagaagagactgaatgtgtcatcaactcagctactgtatcaatcagcaccattccaagcagctattctgtttgtttctggccctttggtggatcaatacctcaccaaccaaaatgtttttgcctacaaatactcccctattgttttgggtttcattataatgtcatgtttgatcgcggtttcagtgaattttagtacatttttggtgattgggaaaacatcaccggttacatatcaagtcctcggccatctaaagacatgtcttgttcttggattcgggtatacgttgctacatgatcctttcactgagagaaacataattggaatactggtggccattgctggaatgggattgtattcttacttttgtacccttgagaacaaaaagaaacagatgattgattcttcaggatcccagataaaagataaagatagcagtgcaccacttttgggacatgaagagaaaggaagttttgaggttaaaaatgcaaccaaagactcccttgtttaagttgaag

SEQ ID NO: 240 - DNA, 1437 bp, Trifolium pratense
aggaggcacaccaaaaatttcattcactagtactcaactctctctatctctatctcccttgtacatgccaagaatttgaagtgtgatttcttttggagttttagttttcctttcttcaaattaagaagaatcttgaaaaatatattggtggcaaagatgggagagatgtcaaaagttcaattgggggttattggtgcactatttctatctgttgcttcatctgtctccattgtcatatgcaacaaagccttaatgagcaatcttggcttcccatttgctacaacacttacaagttggcatttgatggttactttttgcaccctacatgtggctctacgtttcaatctatttgaggccaaacctgttgacatgaagacagtcatgctttttggtattctaaatggtgtctccattggatttctcaacttgagtcttggcttcaattccattggattctatcagatgacaaaacttgcaatcataccattcacagttatgctagaaactattttcctaaagaagcaattcagccggaacataaaattatctctattcttcttacttattggagttggcattgcctctatcacagatcttcagctcaattttgttggaaccattctttcacttctagctatcattacaacatgtgttggccaaattcttaccaacacaatacagaagaagcttaatgtgacttcaacacaacttctctaccaatctgctccattccaagcagcaattctttttgtttcaggcccttttgtggatcagatgctaaccaagcaaaatgtctttgcatacaaatattcttctatagtcttgactttcatcatcatgtcctgtgtgatagctgtttctgtgaacttcagcaccttcctagttataggaaaaacatctcctgtaacatatcaagtgttaggccatctcaagacatgtcttgttctaggatttggttacacattgctccatgaccctttcactgaaaggaacatcattggaatattagtagcagtttttggaatgggattgtattcttatttctgcactcaagagaacaaaaagaaacaatcagttgatcctcctttatcgtctcaggttaaagataaagatgattcaccacttttgaatggcaaaaacatggacaataaagaaaaagagagccatgagaaattaagcaaggattctcttgtttaaaaaaaacattatttgtgttatttttaagatcttttatattttgagggttatttcaatgtttaatcatggcacattgtctagtgtaaatcaaattttgtttagagattcattttgatgcactctcttaatgtaaaagaacttgtttaccctttacataatgtcatatcatttgatgattttgacaaattcatgttttattaaactccatcatgtgtcaatgtacctttgaatgatgattcc

SEQ ID NO: 241 - DNA, 1174 bp, Lupinus angustifolius
ctctatctacaaacactgacgtttaatctctcaactcttggtgccatcttgaggtgtgattttctggagttgttgcagcacatacactgagaaggttgtttctgtgttcttcaaattaagtagagatgggagagatgtcaagtatccaattaggagttattggtgcactgtttctctcagtagcttcatctgtctctatagtcatttgcaacaaagctttgatgagcaatcttggcttcccttttgccacaacacttacaagttggcatttgatggttacattttgcacccttcatgtggctcaacgcttcaacctgtttgaggccaagcccgttgatatgaagacagtcatgctttttgggattctaaatggtgtctctattggatttcttaacttgagccttggcttcaattccattggattctaccagatgacaaaacttgcaatcataccatttacagtaatgcttgaaactattttcctcaagaagcagttcagctcaaaaataaagttctccctctttctcctacttgttggagttggcattgcctctatcacagaccttcagctcaattttcttggaaccattctttcacttctagctatcataacaacatgtgttggacaaattctgaccaacacaatacagaagaagctgaatgtctcttccacacagcttctctaccaatcttctccattccaagcagcaattctttttgtttcaggtccttttgtggatcagatgctcaccaagcaaaatgtttttgccttcaaatattctcctattgtcttggggttcattatcttgtcttgtttgatagcagtttctgtgaacttcagcacctttctagttataggcaaaacttctcctgtaacttatcaagtacttggccacctcaaaacttgtcttgttctagcatttggcttcacattacttcatgaccctttcactgagaggaaccttattggaatacttgttgctatttttggaatgggtttgtattcttatttctgtactaatgagaacaaaaagaaacactcaattgatctcacattggcatctcaggttaaggataaagataattcaccatttttggctgggaaaaatatgggcaatcaagaaaaggaaagtcatgagcctaagaaattaagcaatgagtctcttgtttaaaa

SEQ ID NO: 242 - DNA, 1552 bp, Medicago truncatula
attttatgttatgttcttcttcttttttgcttcaaatggtcgttaactcaaccaaaccaacaaacataaactcaatgaattgaacttcttctacatcaaaaataaaaaggcctcaccaaaaattgcattccccaacaagatagtcactacttctcttctctctttctctctctctctcttggacttgagaagaatttcagaaaaagtatattggtggcaaagatgggagagatgtcaaaaactcaattgggggttattggtgcactattcctttctgtggcttcctcagtctccattgtcatatgcaacaaagccttaatgagcaatcttggttttccattcgccacaacacttacaagttggcatttgatggttactttttgcacccttcatgtggctctacgtttcaatctgtttgaggccaaacctgttgacatgaagactgtcatgctttttggtattctaaatggtgtctccattggatttctcaacttgagccttggcttcaattccattggattctaccagatgacaaaacttgcaatcataccattcacagttatgctagaaacccttttcctaaagaagcagttcagccggaatattaaactctctctattcttcttacttgttggagttggcattgcttctatcacagaccttcagctcaattttgttggaaccattctttcacttctagctatcataacaacatgtgttggccaaattcttaccaacacaatacagaagaagcttaatgtcacttccacacaacttctctaccagtctgctccattccaagcagcaattctttttgtttcaggccctcttgtcgatcggatgctaaccaagcaaaatgtctttgcatacaaatattctcctctagtcttgactttcatcatcatgtcatgtgtgatagctgtttctgtgaactttagcacttttctagtaataggaaaaacatctccagtaacgtatcaagtgttgggccacctcaagacttgtcttgttctaggatttggctacacattgctccatgatcctttcactgaaaggaacattattggaatactagtagcagtgtttggaatgggtttgtattcctatttctgcactcaggaaaacaaaaagaaactcgtagtcgatcctcctttgtcgtctcaggttaaagataaagatataaattcaccacttttgaatggtaaaaacatggatgatcatgaaaaggagagtcatgagtctaagaaatcaagcaaggactctattgtttaatagaacatgttctttgtgttttttttttcaagatctttcataatttggggttattgtaatgttcactcagggtaccttgtttagtgtaaatcaaattttgtttatagattcatttttatgcactctttcaatgtaaaagaagttgtatacccttgtgcaattatattttgtcatatcatatgattactttgacaattcatgtgtcatcaaacaacatcatgtgtcaatgtacctttgaatgatgatgtaaaactattatatgctactatagtagttcata

SEQ ID NO: 243 - DNA, 1336 bp, Glycine max
gtccaatccactatcactcactctctcttctcctaccattatttctctctaccttaaacttccacaatacaactctctcttcctataaacgctgttgtttaacgtgagaacttgggtgatctttttggagttgtaggagcccttacaccttgcagaatcatctctacattcccaagggctcctactacgcaataactccaagcccgatctcaaattaatatttcatttactcatcttaatcaatattaaataagaaaagatgggagagatgtcaaacttccaattgggtgtgattggtgcactatttctctctgtggcttcttctgtctccattgtcatctgcaacaaagccttgatgagcaatcttggcttcccttttgccacaacgcttactagttggcatttgatggtcacattttgcacccttcatgcggctcaacgcttgaatctattcgtgtctaaatccgttgacttgaaaacggtcatgctttttggtattctaaatggcatctccattggatttctcaacttgagtcttggctttaattccattggattctatcagatgacaaaacttgctatcataccattcactgtattattagaaactattttcctaaagaagcagttcagctcgaaaataaaattcgctttattcctattacttgtgggagttggcattgcttctatcacagaccttcagctcaattttgtgggaaccattctttcccttctagcaatcataacgacatgtgttggccaaattctgaccaacacaatacagaagaagcttaacgtctcttccacacagctactctaccagtctgctccattccaagcagcaattctttttgtttcaggccctgttgtggatcagatgctcaccaagcaaaatgtcttcgcctacaaatattctcctgtggtcttggcattcatcatcttgtcttgcttgatagctgtttctgtgaacttcagcacatttctggtcataggcaaaacatctcctgtaacatatcaagtgctaggccacctcaagacatgccttgttctaggatttggctacacattactgcatgaccctttcaccggaaggaacattcttggaatactaattgccgtttttgggatgggtttgtactcttatttctgcactgaggacaacaaaaagaaacagttagctggtgatctcccattggcctctcaggtcaaagacaaagatagcttaccacttttggccgggaaaaacgtgggtaatcaaaatgaggaaaatcatgagactaataaattaagcaaggattctgttatttgaaaggacaggctcccatttctttttcag

SEQ ID NO: 244 - DNA, 1347 bp, Fagus grandifolia
aacaaaactagacaggctctatacaaaatggcattaggcaccaaccacaaaaaccatccaaaataaaagggtgcaacaactacattgtcatacaagctaatgagattcattctttctccctctctcattctttagctctttgctctcccaatcctctcatccaatccaatcctcaccattgatcatttcccacctgtgatttcacggaactcgccggagcaccaccattgcttggagttgtaggagcccttatagcttgtaaatccatttgtacatttttctaagggctcctaacactccaaggctttcttatcactagcaaagatgggagaaatgtcgcgcttccagttgggtgttattggggcactattcctttcagtggcatcatctgtctccattgtgatctgcaacaaagctttgatgagcaatcttggcttcccttttgctactactctcactagttggcatcttatggtgacattctgcacccttcacgccgcgcaacgcttgaatttttttgagtcgaaatcagttgacacaaagactgtaatgctctttggaattctaaatgggatttcaattggactactcaacttgagtctgggtttcaactccattggattctaccagatgacaaaacttgcaatcataccattcactgtattattggaaactcttttcttgaaaaagcaattcagcaagaagataaagttctctcttttcatcttactagtaggagttggcattgcctctataactgatcttcagctcaatcttgttgggacagttctctctcttttagcaattgtaactacctgtgttggtcaaattctgacaaacacaatacaaaagaagctcaatgtctcttctactcaactgctctaccagtcagctccatttcaggctgcaattcttttcgtctcaggccctctggttgatcagtgcctcaccaagcaaaatgtctttgcctacaaatattctcctctagttttgggattcatcgtactttcgtgcctaatcgcggtatctgtgaacttcagcacatttctagttattggcaagacttcaccagttacatatcaagtactaggccacctcaagacatgcctaattcttgcctttggctatacactactccgtgaccccttcacagaaaggaacattattggaatcctagttgcaatttgtggcatgggactatattcattttttgcacccaggagactaaaaagaaacaacccgctgatctatcgttggcatctcagattaaagataaagatactacaccacttttggctgggaagaacatgggtcatccagataaggaaaatcatgaggctaagaaat

SEQ ID NO: 245 - DNA, 1601 bp, Fragaria vesca
aaatttagctagagcaaaccttaataaaaagcctccaaaaccttgtaaatacatgcatacattctcatacaagccacgacctttctctatctctctctttctccctctcactctatctgagttttgttctctcaatccaatcccatctccagtctctgaagcctgcgttttgtagcaaaaacttgctgcagttctggtgatttagcttcatggagttgtagctagtagccgtacgtattgatacgtacattcggtcatcgagtttcactgaaggatttcatctctttctctgcgatcatatacggtgaagatctttgcaaagcttcagggcttgtaaactgccggtagagatttctggtttctctgaaaggtagcaatacatatcattggagatgggagaaatgaccggcttccaattgggcgttattggtgcactgtttctttcagtggcatcatctgtctccattgttatatgcaacaaagccttgatgagcaatcttggcttcccgtttgcgactacacttaccagttggcatctcatggtaactttctgcacacttcatgtggcaaatcgtctcaatttcttcgagagcaaatcaattgacatgaagactgtcatgctctttggcattctaaatggtgtttcaattggactgctcaatttgagtctgggattcaattctgttgggttctaccagatgaccaagcttgcaatcataccatttactgtgttagtagagactattttccttaaaaagcaattcagccagcagataaagttttctctcttcctattactagtcggagttggcattgcctctgtgacagacctccagctcaattttgttggaacagttctctcgcttctagccatcatcacaacctgtgttggccaaattctaacaaacacaatacagaagaggctcaatgtttcttctactcaactgctctaccactcggcaccttttcaagcagctatccttttcgtctccggacctgtggtcgatcagttcctcaccaagcaaagtgtcttttcccacaaatactcccccatagtcctggtattcatcatactctcttgcctaatagctgtgtctgtgaactttagtacctttttggtgattggcaaaacatcaccagtgacatatcaagtgctagggcacctcaagacatgccttgttctagggttcggctatacattactacatgaccctttcactgagaggaacataatcggaattctggtggccattttcgggatgggactgtattcatatttctgtgcacaggagaacaaaaagaaacaagcagctgacgttaaggatggtgctccacttttgagtcaggataaagatagccatgaggttaagaaattaaccaagaactctcttgtttgagtgattgatatataggagtttcttttacactctttaagttttaagtcccctaagaaattttgttgggtgtaaatgttctttatgcattctttggttgaccacatgggtcatgggtgtggggttaaatgctttaccattagagctacaatatcccacacaaaatttttacacattttggatcaataaatttgtcattttcttgta

SEQ ID NO: 246 - DNA, 1455 bp, Cirsium arvense
tcattgtggttccttccttttcagaatcatcatctgcagctcaactaatccgtcatcgatcaaaacctgcttcaaccgcctcttgtttatcaaaacctatcgctacttacatattattattattccaaggtgccaccaatttaagtctctcagattgcacaccatttccgacgtcaattaaggaaaaagaagatgggagaattgacaggttaccagttgggggttattggagcattgtttctatccgtggcatcatctgtatccattgttatctgcaacaaagccttgatgagtaatcttggttttccttttgctacaacattgacaagttggcatttgatggtaacatattgcacgcttcatgtggctcatcgtttgaatttctttgagaacaagagcattgatatgaagactgtgatcctgtttggcattctaaatggcatatcaattggttttcttaacttgagccttggctttaactccattggcttttatcagatgaccaaacttgcaatcatacctttcactgtcctcttggaaactcttttcttgaaaaaacagttcagccagaaaataaagttatctcttttcctcttacttgttggagttggcatagcatcagtgacagatcttcagctcaattttgttggcacggttctctcaattctggccatcatgaccacctgtgttggacaaattctgacgaacacaattcagaagagactaaatgtgtcatcaactcagctgctgtatcaatcagccccatttcaagcagctattctgtttgtcacaggccctatggtggatcagtacctcaccaagcaaaatgtttttgcttacaaatattcacctctcgttttggggttcataattctatcgtgtgtgattgcggtttctgtgaattttagtacatttttggtgattgggaaaacatcaccagttacataccaagtgctaggccatctcaagacatgtcttgttcttggatttgggtatactttgctacacgaccctttcacagagaggaacatcatcggaatacttgttgccattgtgggaatgggattgtattcttacttttgtacccacgaaaacaaaaagaaacaaatgcttgatctctctccaggttctcagattaaagacaaagatagtagtgcacctcttctgggacatcaagaaaaagaaaaccattttgaggtgaagaaagcaaccaaagactcccttgtttaagctaaagcgattgatagggatttttaatgtgtttatttcctgtaattcaattgagtataaagaaattttgattctttctaataagtctaaatatccgcctcatttgacttgatttagtcttttattctacgattgttgctagttttgtatttttcatggggttcaaatcacaaatataacgtgtaaactgatattttgtatattcaattacatatttcacatttc

SEQ ID NO: 247 - DNA, 1154 bp, Cucumis sativus
aagctttcaatctttctgtaaaaataaaaaactttgcagccattaacacttgttggatgaacctatagcagctccgaattcttgattgcttgtttgtttcaatcattttgatcagaaaatgggagaaatctcaagctttcaattgggtgtcattggagcactattcttatcagtggcatcttctgtctccattgtcatctgtaacaaggcactcatgagtaacctcggcttcccttttgcaactactctgactagttggcatctgatggtcacgtattgcactcttcatgtggctcatcgcttaaacttgtttgaatccaaaccaattgacacgaagacggttgtgctttttgggatgctcaatggcatctccattggatttcttaacttgagcttgggattcaattctgttggattctaccagatgacaaaacttgcaataattccattcactgttatgttagagactattttccttaaaaaacaattcagttccaagattaggctctctctcttcctcttgctagttggagttggtattgcttctatcactgatcttcagctcaattttttgggaactgttctttctctcttggctatcataacaacctgtgttggccaaattctaacgaacactattcagaaaaggctgagtgtatcttctacgcagctactgtatcagtctgctccatttcaagcagccattctgtttgtgtctggccctttcttagaccaatgtctcaccaagaaaaatgtgtttgcttacaagtattctcctgtggttttggcttttatcatcctatcatgtctgatatctgtatcagtcaactttagcacatttttggtgattggaaagacgtcaccggtgacataccaggtgctcggccacctcaagacatgccttgttcttggctttggctatactcttcttcatgatcctttcactgagagaaacctcattggaatcctaatagccatcggtgggatggggttgtattcatatttttgtacccaagagactaaaaagaagcagggtgacctcacgttaggatctcagataaaagacaaggaaacagcagctcttctagcaggagttcttcaagataaagaaaatcatgaagtgaagaaatcaaacaaggattctctggtttaat

SEQ ID NO: 248 - DNA, 1381 bp, Carthamus tinctorius
cgggatccttcccatctgtggtttccttctcagaatcatcatcacctgcaacttcttaatccgccatcagaacctgcctttttaactcatcaaaaacctatccatacatacaggtgatcacagattgtacaccaattctgacgtcaattacgggaaaagaagatgggagaattgacaggttaccagttgggggttattggtgcattgtttctatcggtggcatcatctgtgtccattgtcatctgcaacaaagccttgatgagcaatcttggttttccttttgctacaacattgaccagttggcatctgatggtaacatattgcacgcttcacgtggctcatcgttttaatttctttgagaacaagagcattgatatgaagactgtgatcctgtttggcattctaaatggtatatcaattggttttcttaacttgagccttggctttaactccattggcttttatcagatgaccaaacttgcaatcataccttttactgtcctcttggaaactcttttcttgaaaaaacaattcagccagaaaataaagctatctcttttcctcttacttgttggagttggcatagcatcagtgacagatcttcagctcaattttgttggcacagttctctcacttctagctatcatgaccacctgtgttggacaaattctaacaaacacaattcaaaagagactaaatgtgtcatcaactcagctgctgtatcaatcagccccatttcaagcagctattctgtttgtcacaggccctgtggtggatcagtacctcaccaagcaaaatgtttttgcttacaaatattcacctcttgttttggggttcataatcctatcgtgtgtgattgcggtatctgtgaattttagtacatttttggtgattgggaaaacatcaccagttacataccaagtactacgccatctcacaacatgtcttgttcttggatttgggtatactttgctacatgaccctttcacagagaggaacatcattggtatacttgttgccattgtgggaatgggcttatattcttacttttgtacacatgaaaacaaaaagaaacaagtgcttgatctctctccaggttctcagatcaaagataaggatagtagtgcacctcttttgggacatcaagaaaaagaaaaccattttgaggtgaagaaagcaaccaaagactcccttgtttaagctaaagggattgatagggattttcaatgtgtttatttcctgtaattcaattgagtataaagaaattttgattctttttaataaatctaaatacccgtctcatttgacttgatttagtcttttactctaccgttgttgttagttttgtatttacatgggtttcgatcacaaatatagcgtg

SEQ ID NO: 249 - DNA, 1198 bp, Citrullus lanatus
aagctttcaatcttcctgtaaaaatctaaacttggcagccataaacacttgttgaatgaacctatagcagctccaaattcttgattgattatttgtttcaatcatttgatcagaaatgggagaaatctcaaactttcaattgggtgtcattggagcactcttcttatcagtggcatcctctgtctccattgtcatctgtaacaaagctctcatgagcaacctcggcttccctttcgcaactactctgactagttggcatttgatggtcacatattgcactcttcatgtggctcatcggttaaacttgtttgaatcgaaaccaattgacacgaagacggttgttctctttgggatgctcaatggcatctccattggatttcttaacttgagcttgggattcaattctgttggattctaccagatgacaaaacttgcaatcattccattcactgttatgttagagactattttccttaaaaaacaattcagctccaagattaggctctctctcttccttttgcttgttggagttggtattgcctctatcactgatcttcagctcaattttatgggaactgttctttctctcttggctatcataacaacctgtgttggccaaattctaacaaacactattcagaaaaggctgagtgtatcttctacacagctactgtatcagtctgctccatttcaagcagccattctgtttgtgtctggccctttcttagaccaatgtctcaccaaaagaaatgtgtttgcttacaagtattctcccgtggttttggcttttatcatcctttcatgtctgatatctgtgtcagttaactttagcacatttttggtgatcggaaagacgtcgccagtgacgtaccaggtgcttggccacctcaagacatgccttgttcttggctttggctatactcttcttcatgatcctttcactgagagaaacctcattggaattctaatagccattggtgggatggggttgtattcatatttttgtacccaagaaagtaaaaagaagcagggtgatctctctttaggatctcagataaaagacaaggaaacagcagctcttttggcaggagttcatcaagataaagaaaaccatgaagtgaagaaatcaaacaaggcttctctggtttaattgtaaatgggatatgaagggagaaaatacatagattttcaggacaat

SEQ ID NO: 250 - DNA, 1448 bp, Conyza canadensis
cgtcgatgatgcagatggcagacaacaaaatataaactccattcccttccattccatatacatttaacatccctcaaattctggttcatacctttcttctaagtaaccatcaaccgcagcccagcccgcaacattcaactgccataaggtgatctcgactatatatctccaactgcagacgaactgcgaagctggttaaggtaaaagaagatgggagaattgacagggtaccagttgggggttcttggtgcattgtttctatctgttgcatcatcagtctcaattgttatctgcaacaaagccttgatgagcaatcttggttttccttttgctacaacattgacaagttggcacctgttggtaacatatgctacacttcatgtggcgcaccgttttaatttctttgagaacaaaagcattgatatgaagaccgtgatcctatttggtattctaaatggtgtttctatcggttttcttaacttgagccttggctttaactccattggcttttatcagatgaccaaactagcaatcatccctttcaccgttctcttagaaactcttttcttgaaaaaacagttcagccagaaaataaagttatctcttttcctcctacttgttggagttggcattgcatcagtgacagatctgcagctcaattttcttggaacagttctctcacttttagctatcgccaccacctgtgttggtcaaattcttacaaacacaattcaaaagagactaaatgtatcatcaactcaactgctgtaccaatcagccccgtatcaagcagccattctgttcgtcacaggccctttggtagatcagtacctcaccaagcaaaatgtttttgctttcaaatattcgcctcttgttttgggattcataatactatcgtgtgtaattgcggtttctgtgaactttagtacatttttagtgattgggaaaacatcaccagttacataccaagtcctaggacatctaaagacatgtcttgttcttgcatttgggtatactttgctacatgatccgttcacacagaggaacatcattggaatacttgttgccattgtcggaatgggcttgtattcttacttttgtacatatgaaaacaaaaagaaacaaatggttgacctctctccaaattctcagattaaagataaagatagtaacacaccccttttgggacatcaagataaagaaaatcattttgaggtgaagaaagcaaccaaagactcccttgtttaagctaaagtgacttgtaggttttttaaatgtgtttatttcctttcctttcatcatgtatgcaattcaattgagtataatgaaattttgattcttttaaataatatcttgaaagatactcatttgacttgatttagggtctgttctttcttaagtggctttgtattttagacttgttccaaaattacaaacttgaatatata

SEQ ID NO: 251 - DNA, 1944 bp, Phaseolus vulgaris
aaaacatgtgcaagagtctccaattctcattttttccttatgaaatgaaccaattttttctattctacacacaaaaatcatttatgcctatcatcttgttcagggaaacacactagtatagcagcagcaacagcagcagaagagcagttcagatgtccaaatccctttttcatttgacaatagttatattcttgcttcaaatggccgttaaactcccgccatcccatgaagttaacggcgttaattaggcaccaccaccaccaacccataaaaattataaatcccacaaaagcttcatactcatacaagcttacccttcaatccaattcactatcactcactcttccctctcacaccattatttttctctctaccttacacttccacaatacacctctcccttcctataaacgctgccgtttagactaagaacttggctcatcttttggagttggaggagcccttacatcttgcaatttcatttcaccattccaaggctcctaccaggcaatagcttcaaactcgatctcagattaatatatcattcattcctcttaatcaatattgaataagtgacagaaaagatgggagagatgtcaaactttcaattgggtgtgatcggtgcactatttctctcggtggcttcttctgtctccattgtcatctgcaacaaatccttgatgagcaatcttggcttcccttttgccacaacacttactagttggcatctgatggtaacgttttgcacccttcatgcggctcaacgcttgaatctgttcgtctccaaatccattgacttcaaaacagtcatgcttttcggtattctgaatggcatctccattggatttctcaatttgagtcttggctttaattccattggattctaccagatgacaaaacttgcgatcataccattcactgtattgttagaaactattttcctaaagaagcagttcagctctaaaataaaattctctttattcctattacttgtgggagttggcattgcctcaatcacagaccttcagctcaattttttgggaacagttctttcccttctggcaatcataacgacttgtgttggtcaaattctgaccaacacaatacaaaagaagcttaatgtctcttccacacagctgctctaccaatctgctccattccaagcagcaattctttttgtttcaggccctgttgtggatcaaatgctcaccaagcaaaatgtttttgcctacaaatattctcctgttgtcttggcattcatcatcttgtcctgcttgatagctgtttctgtgaacttcagcacatttctggtgataggaaaaacatctcctgtaacttatcaagtgctagggcacctcaagacttgccttgttctaggatttggatacacattactgcatgaccctttcactggaagaaacattcttggaatactagttgccgtttttggaatgggcttgtactcttatttctgcactgaggacaacaaaaagaaacagttagctagtgatctccctttggcctctcaggtgaaagacaaagatagtgcagcagttttggcaggaaaaaacgtgggtaatcaaaaggaggaaaatgatgaggttaagaaattaagcaaggattcagttatttgaaagaatagggtccatgtctttttcaaatttggtatattttgggtctcttcaatttcttgtagggaagttgtaatgagtgtaaatcaaatttgtttaataagttttctgtatctttaagtcgctgcaattcctttaccaaccatatattccttcaactacaggaaattcaaatttcgtaaaattgtaatccttttttgcttcaatagaaaggtagacatcaattatttttgtgattcacaatagctatgttcttctcaataacaatcacagaaggaggctgttgctttctattttattatcttcattgttt

SEQ ID NO: 252 - DNA, 1520 bp, Echinacea purpurea
cggccgggggaaacaaagaagaattacaattttaggtaccaaccgcagatgcagatggcagaccacaaattataaacccccttccatatcccttcaatctcacattctccttcatttcaactgctcagcaactgtttcttaaatcagttgttacatacagagtcaaaggtgctcctagctctcgaattgcgacttcgtttaacttgaattgtgaaaagaagatgggagaattgacagggtaccagttgggggttattggtgcattgtttctatcagtggcatcatcagtgtcaattgttatctgcaacaaagccttgatgagcaatcttgggtttccttttgctacaacattgactagttggcatctggtggtaacatattgcacactgcatgtggcgtatcgtttgaatttctttgagaacaagagaattgatatgaagacggtgatcctgtttggtatcctaaacggagtttcaattggttttcttaacttgagcctcggctttaactccattggcttttatcagatgaccaaacttgccatcataccttttaccgtcctcttagaaactcttttcttgaaaaaacagttcagccaaaaaataaagttatcacttttcgtcctacttttgggagtcggcatagcatcagtgacagatcttcagctcaattttgttggcacgattctctcccttttagctattgccaccacatgtgttggtcaaattctgacaaacacaatccaaaagaggctaaatgtgtcatcaactcagctgctgtatcaatcagcaccatttcaagcagctattctgtttgtcacaggcccattagtagatcagtatctcacaaagcaaaatgtctttgcttttaaatattcacctcttgttttggggttcatactgctatcctgcttgattgctgtttctgtgaactttagcacatttttggtgattgggaagacatcaccagttacataccaagtattggggcatctaaaaacatgtcttgttcttggttttgggtacactttgctacatgaccctttcacagagagaaacatcataggaatacttgttgccattattggaatgggcttgtattcttacttttgcacccatgaaaacaaaaagaaacaagatctctctccgggttcgcagattaaagataaagatagcaacactgctcttttgggacatcaagataaagaaaatcattttgaagtgaagaaaccaactaaagactcccttgtttaagctaaagcgactgttagggattgttaaatgtgtttatttccttttaaattcaactgagtatagtcaaattttgattcttttaaataaatccaaatctgtcacatttgacttggtttagtcttttgtttttgttgtggttttgtatattgatcgctttccaactttaattttccgtttgaaagattgttagatattgtgtaggaatcggaaataattaggattttacatgtgtttaatgtccaaaacacgaacaaagttataaagggg

SEQ ID NO: 253 - DNA, 1497 bp, Aquilegia formosa
ctccatcagaccaccagtccaccaccttctacctcttcagttcaccaccacccttctcacattattccaaaagatcttggtttttaatcttctgtatcactagctatatctttttcgaccttctgcatgtttttcgtggactcataagattgtcactaatcttgacagagttatagagctcttcgacgaccttctgttttccaagaactcgtaaggtggttgataatctccagaatcgttagttcacttaaggtttttcgttacaaacaagaacaatgggtgaaacaagtgggtaccaattgggagttattggtgctctagctctttcagttgcatcatctgtggccattgtaatttgcaacaaagctctaatgagcaatcttggcttcccttttgctaccacattgactagttggcatcttatggtgacattttgcacccttcatgtggcacaacgattcaacgtgttcgagaccaagtcgatcgaaatgaagaccgtggtgttctttggtatactaaatggtgtatccatcggactactcaatttaagtcttggattcaactccattggcttttatcagatgacaaagcttgcaataataccatttacagttctgttagagacagtttttcttaaaaaacaattcagtcagaagatcaagttatctctttttgttttattacttggagttggcattgcatccattacggatctacaactcaattttgttggatcagttctctctcttcttgccattgcaacaacatgtgttggtcaaattctgactaacaccatacaaaagagactcaatgtaacgtctacacagcttctgtatcactctgcaccttttcaagcagctatactttttgtttccggtcctgtagtggatcagtgtctcaccaagcagaatgtttttgcccacaaatacacccctgtagtcttggcattcattatcctttcttgtttgatttctgtttcggttaacttcagcaccttcctagtgatcggaaaaacatccccagtgacataccaagtgcttggtcatcttaagacatgtcttgtacttggctttgggtatacactattacatgaccctttcacagaaagaaacattcttggcattcttgtcgcgatattcggcatgggtttgtactcatatttttgcacccatgaaaacaaaaagaaacagaacagtgacctcttgatttcatctcagattaaagaaagagaaactacaccacttctggttcaccaagataaagacaaccatgaagtaaagaaatccaatgggattataaacaaggactctgttgtttaagtagcactagcagatacacagatgaagcttccatatatatatcaagaaaaacttctttagatgatttgatgagtgtaaatgacattgattctttaaataaaattcactactcttccttgtaatttctatgcatgcactctggatattttgtacgtatgtggtgaaaattttgttaaaa

SEQ ID NO: 254 - DNA, 1780 bp, Cicer arietinum
cccccatgattttaacatctcatctatctatttgtctgctctatacttttagccattaaaaattaaccattgaaaccttatgttaatgttaatgttatgctcattttattttatttttttgcttaaaattgccgttaagttgagcaaccggccacaccagaacataactcaaccaaaccaacaaacacaaactcaatgaattcaactttttctcatcaaaaataaaaaggccacaccaaaaatttcattctctatctagtcaccactgctcttctctctttctctcttgttcatgctaagaattcaaagtgtgatattttttggagttttaattctcatttcttcaaattaagatatactcttgttgtgcattaagaagaatcttgaaaaataaattgactgcaaagatgggagagatgtcaaaaattcagttgggtgttattggtgctctatttctctctgtggcttcctctgtctccattgtcatatgcaacaaagccttaatgagcaatcttggcttcccatttgccacaacacttacaagttggcatttgatggttactttttgcacccttcatgttgctctaaggttcaatctatttgaggccaaacctgttgacatgaaaacagtcatgctttttggcattctaaatggtgtctccattggatttctcaacttgagccttggcttcaattcaattggattctaccagatgacaaaacttgcaatcataccattcacagttatgctagaaactattttcctgaagaagcagttcagccagaaaataaaactgtctctatgcttcttacttattggagttggcattgcctctatcacagaccttcagctcaattttgttggaaccattctttcacttcttgctatcataacaacatgtgttggccaaattcttaccaacacaatacagaagaagcttaatgtgacttccacacaacttctctaccagtctgctccattccaagcagcaattctttttgtttcaggccctcttgtggataagatgctaaccaagcaaaatgtctttgcatacaaatattctcctatagtcttgactttcatcataatgtcctgtgtgatagctgtttctgtgaactttagcacctttctagttataggaaagacatctcctgtaacttatcaagtgttaggccatctcaagacttgtcttgttctaggatttggctacacattgctccatgaccctttcactgaaagaaacatcattggaatacttgtagcagtttttggaatgggcttgtattcttatttctgcactcaagagaacaaaaagaaactgttagtcgaaccacctttggcatctcaggttaaagataaagataattcaccacttttgagtggtaaaaacatggataatcaggaaaaggagagtcaggagtctaagaaagcaagcaaggactctcttgtttaaaagaaaatgttttaatttgtgctttttattaagatctttaatattttgggggttatttcaatgttcagttcagggtaccttgtctagtgtaaatcaaattttgtttagagattcattttgatgaactctctcaatgtaaaaaaaaaaggaagaaatatgtatacccttattatccaattattatatactgtcatattattgcaatgtatctttgaatgatgatgcaaaactactttatgctatcaactcatacaaaattattttgttttataagtcaaatgtaattgtaagttagtctatatatgtattttcaattcaaatgccac

SEQ ID NO: 255 - DNA, 1394 bp, Cichorium intybus
gatggtggaacacaaaatataaacccctcccttccatgtacattgattcaatctcacacaacactctcacattcttgttgatttggagtaatcttcaactgccggaacgtaatctacgatcacatgctctgttaaccgcctgtggttttgtaaatccaatcgctacatacattttgaaaggtattcctaagtctctcggattacatcagattgtaaaccaattccgacgtcaattaagatgggagaattgacggggtaccagctgggggttatcggtgcattgtttctatcagtggcatcatctgtatccatagttatctgcaacaaagccctgatgagcaatcttggttttccttttgccacaacattgactagttggcatctaatggtaacatattgcacactccacgtggcacatcgtttgaatttctttgaaaacaagagcatcgatatgaagactgtgatcctatttggcattctaaatggtgtttcaattggttttcttaacttgagccttggatttaactccattggcttttatcagatgaccaaacttgcaatcattcctttcactgtcctattagaaactctcttcttgaaaaaacaattcagccagaaaataaaattatctcttttcctcctacttgttggagttggaattgcatcagtgacagatcttcaactcaattttcttggaactgttctctcacttctagctatcatgaccacttgtgttggccaaatcctaacaaacacaattcaaaagaggctaaatgtgtcatcaactcaactcctatatcaatcggctccatatcaagcggctattctctttctcacaggcccaatggtagaccaatacctaacaaagcaaagtgtttttgctttcaaatattctcctcttgttttggggttcataatactttcatgtgtgattgcggtttctgtgaattttagtacatttttggtgattggaaaaacatcaccggttacatatcaagtacttgggcatttaaagacatgtcttgttcttggatttgggtacacattgctacatgatcctttcacagaaagaaacatcatcggaatccttgttgccatagttggaatggggttatattcgtacttttgcacccatgaaaacaaaaagaaacaaatccatgatctttctccaggttctcagattaaagataaagatagtaatacacctcttttgggacaccaagataaagaaaatcatttcgaagtgaagaaagcaactaaagactcccttgtttaagctaaaacgactgatagggaattttatatgtgtttatttccttttatcatgtaattcaattgagtatcatgaaattttgattcttttaaataaaattaaacctaccacatttgacttg

SEQ ID NO: 256 - DNA, 1249 bp, Chrysanthemum coronarium
accattgtgcttcatttctactaaacatcaattgcatgcttgcaatactcaaccgaccaaacgttgtcttacattctgctttaaccgctcgtgttccttgaatttcaatcgctatattcgtatcaagaggttcccccattactctcagatatatatcagactgattccaacgtcaactaagatgggagaattgacagggtatcagttgggaactatcggggcattgtttctatctgtggcatcatcggtgtcgattgttatctgcaacaaagccttgatgagcaatcttggttttcattttgctacaacattgactagttggcatctaatggtaacatattgcacgcttcatgtggcacgtcgtctgaatttctttgagaataagagcattgatatgaagactgtgatcctgtttggaatcctaaatggtgtttcaattggttttctaaatttgagccttggctttaactccattggcttttatcagatgaccaaacttgcaattatacctttcaccgtcctcttagaaactcttttcctgaaaaaacagttcagccagaaaataaagctatctcttttcctcctactcgttggagttggcattgcatcagtgacggatcttcagctcaactttcttggcacagttctctcacttctagctattgccaccacgtgtgttggtcaaattctaacaaacacgatacaaaagagactaaacgtgtcatcaactcaactgctgtatcaatcagccccatatcaagcagccattctgtttgtcacgggtcctgtggtagatcagtatctcactaagcaaaatgtttttgctttcaactattcgcctcttattttgggattcataatactatcatgtgtgattgcggtttctgtgaacttcagtacatttttggtgattggaaaaacatcaccggttacataccaagtattaggacatctaaagacatgtcttgttcttggatttgggtacactttgctacatgacccgttcacaaacagaaacatcattggaatacttgttgccattgttggaatgggcttgtattcttacttttgtacctatgaaaacaaaaagaaacaagatctctctccagggtctcagataaaagataaagacagtaatacacctctattgggacatcaagataaagaaaatcattttgaagtgaagaaagcaaccaaagactcccttgtttaagctaaagcgactgctagggatttttaatgtgtttat

SEQ ID NO: 257 - DNA, 1223 bp, Solanum lycopersicum
attccacaccaacaaagaaaaaaatatatcattttatttcttcaattttttgttgtagtaatcaaacatcatcacaattttgaagagatgggagaaatgacaagttttcagttgggtgtggtgggagcattgtttctatcagtggcatcatcagtttccattgttatttgcaataaagccttgatgagtaatcttggttttccttttgccacaacattaacaagttggcatctaatggttacttattgcacacttcatgtggcactcaaattcaatttttttgagaataagcccattgatatgaagactgtgatgctctttggcatattaaatggtgtatctattggctttctcaatcttagccttggatttaattccattggcttctaccagatgacaaagctagcaattataccttttacagtattagtagaaacccttttcttgaaaaaacaatttagccaaaatattaagtttgcattattcattctacttattggagttggcattgcttctattactgatcttcaactcaattttgttggaacaattctctcccttttggccattgttacaacttgtgttggacaaattcttacaaacacaattcaaaagagactcaatatttcatctacacaattattgtatcaatcagccccatttcaagcagctatactatttgttagtgggcctgtggtggatcaatttctcaccaaacaaagtgtttttgcctacaaatattctcctattgttgtgggatttattgtgttatcatgtttgattgctgtatcagtaaatttcagcacatttttagttattggaaagacatcaccagttacctatcaagtgttaggtcaccttaagacatgtttggttcttggatttggctatacattattgcatgatcctttcacttcaagaaatattattggaattcttgtggcaattattggaatgggattatattcctatttttgtgtacatgaaacaaaaagaaaacaagttggagaccactcttccatggcccaagttaaagagaaagacactactgcaccacttctagctgggaaaaatggacaagttaaagaaaataactcccttgtttaaattttagggttaaaataaagatgtttttttgatgatctaagtacagttcattcatttcgattatttttgtttaaatttcagttatatatcagtgaaattcaattaattttgtacga

SEQ ID NO: 258 - DNA, 1416 bp, Chrysanthemum coronarium
caaaatataaaccctccataccttatacattcatttcattctcacacaatcttctaccattgtgcttcatttctactaaagatcaattgcatgcttgcaatactcgaccgacggaacgttgtctatcattacatgctgctttaaccgctcgtgttccttgaatttcaatcgctatattcgtatcaagaggttcccccattactctcagatatatatcagactgattccaacgtcaactaagatgggagaattgacagggtatcagttgggaactatcggggcattgtttctatctgtggcatcatcggtgtcgattgttatctgcaacaaagccttgatgagcaatcttggttttcattttgctacaacattgactagttggcatctaatggtaacatattgcacgcttcatgtggcacgtcgtctgaatttctttgagaataagagcattgatatgaagactgtgatcctgtttggaatcctaaatggtgtttcaattggttttctaaacttgagccttggctttaactcgattggcttttatcagatgaccaaacttgcaattatacctttcaccgtcctcttagaaactcttttcctgaaaaaacagttcagccagaaaataaagctatctcttttcctcctacttgttggagttggcattgcatcagtgacggatcttcagctcaactttcttggcacagttctctcacttctagctatcgccaccacgtgtgttggtcaaattctaacaaacacgattcaaaagagactaaacgtgtcatcaactcaactgctgtatcaatcagccccatatcaagcagccattctgtttgtcacgggtcctgtggtagatcagtatctcactaagcaaaatgtttttgctttcaactattcgcctcttattttgggattcataatactatcatgtgtgattgcggtttctgtgaacttcagtacatttttggtgattggaaaaacatcaccggttacataccaagtattaggacatctaaagacatgtcttgttcttggatttgggtacactttgctacatgacccgttcacaaacagaaacatcattggaatacttgttgccattgtcggaatgggcttgtattcttacttttgtacctatgaaaacaaaaagaaacaagatctctctccagggtctcagattaaagataaagacagtaatacgcctctattgggacatcaagataaagaaaaccattttgaagtgaataaagtaaccaaagactcgcttgtttaagctaaagcgactgctagggatttttaatgtgtttatgtccttttttatcatgtaattcatttggttataatgaaattttgattcttttaaataaactcaaagctaccgccacatttgacttgatttagtcttttatttcttct

SEQ ID NO: 259 - DNA, 1245 bp, Euonymus alatus
ggttcgtctgtcagtctgtccaggaccccgaacagttctgcccatgagagaactggagtagttgattcacagtggatcattcatcaagtaatttcttctctaggtgggtcagatgggggagatgtcgagcttccagattggtgttattggtgcactctttctttcggtggcatcatctgtctccattgtcatctgcaacaaagctttgatgagcaatctcggatttccttttgctacaactctaaccagttggcatcttgtggtgacattctgcaccctttgtgccgctcagcgcttcagtttgttcgagtccaaaaccattgagatgaagactgtcatgctctttggcatcctaaatggtgtgtccattggacttcttaatttgagccttggtttcaattcagttggattctatcagatgaccaaacttgcaatcatacctttcactgtattagtggagacccttttcttgaagaagcagttcagtgagaagataaagttttctctcctgatcttgctcattggagtaggcattgcctccataactgatctccagctcaattttgttggaacagttgtttcctttctggccattataaccacctgcgttggtcaaattatgacaaacacaatacaaaagaggctcaatgtctcgtcgacacagctgctttaccagtcagccccatttcaagcagcgattctgtttgtctcaggtcctgtagtagataagttcctcaccaaacaaaatgtgtttgcttacaagtattcacctatagtcttggcatttatcatcctatcatgcattatatcagtttttgtgaacttcagcactttcatggttatcggcaagacatctccggttacatatcaagtgcttggacacctcaagacatgccttgtacttgcatttggatacacattgcttcatgatcctttcacaataagaaacattactggaatcctagttgctatggctggaatggtcttgtactcctatttctgcacccaggagaacaaaaagaaacaatctgttgacctttctcttgggcctcaggtgaaagataaagacaccttaccacttttggctcatcaagatgtagaaagtcatgatccaaagaaatctcttgcttaagaattggttgtgccaaattaaggttgctttttggtactctttacataaggcattttgtttgagtgtacatgaatttaattctttataaataagaaaatactcttttttagctc

SEQ ID NO: 260 - DNA, 1030 bp, Euphorbia peplus
tacaaaaaataaagaagaagatgggagaaatgtcaaggttccaggtgggtgttattggtgccctatttctttcagtggcttcttctgtctctattgttatatgcaacaaagctttgatgagcaatttgggatttccttttgcaacaacattgactagttggcatttattggtgacatattgcacccttcattgtgcacatcgtttcaatttatttgagtcaaagcctattgacatgaagactgttatgctttttggaattcttaatggtgtttctattggtttgctcaacttgagtttgggtttcaattccattggattttaccagatgacaaaacttgcaatcataccatttactgttctattggaaacttttttccttaagaaacaattcagccagaaaataaaatgtgctttgtttgtgttgctggttggagttggaatagcttcagtgacagatttgcagctaaatatggtagggacaataatatccctgcttgccatagccacaacatgcgtcggccagattctaacaaacacaatacaaaagaggttgaatgtatcatcaacacagttattataccaatcagcaccatttcaagcagcaattctatttgtatcagggccaatggtggatcagcttcttacaaagaagaatgtgtttgcatttaaatactctccaatagtgataggtttcatagtcttgtcttgtttaatctcagtaagtgtcaatttcagcacatttatggtcatcggtaaaacatctccggttacgtatcaagtccttggtcacctcaagacatgccttgttctcggcttcggatataccttattacatgacccttttacaagtagaaatgttaccggtattttagtagccatttttggaatgggtttatattcctatttctgcacccaagagaataagaagaagcaatcacttgatctttccttgccttctcttcaggtgaaggagaaggataacacaccacttttagcaatgcaagataaagaaaatatagagccaaagaa

SEQ ID NO: 261 - DNA, 1055 bp, Nicotiana benthamiana
ttgatgaagatgggagaaatgacaaggtttcagttgggtgtggtaggagcactgtttctatcagtggcatcttcagtttccattgttatttgcaacaaagctttgatgagtaatcttggttttccctttgccacaacattaacaagttggcatctaatggtgacatattgcacactccacgtagcactgaaattcaatttctttgagaacaagcctattgatatgaagactgtgatgctttttggtattttaaatggtgtatccattggctttctcaatcttagccttggctttaattcgattggcttctatcagatgacaaaactagcaattataccttttaccgtactattagaaaccattttcttgaaaaagcaattcagccggaatattaaatttactttgttcgttctgcttatcggagttggctatgcctccattactgatcttcagctcaattttgttggaacaattctctcccttctcgccattgttacaacttgtgttggacaaattctgaccaacacaatacaaaagaggctcaacatctcatcaactcaattgttgtatcaatccgcccctttccaagcagctattctatttgtatcggggccagtggtggatcaattccttactaaacagagcgttttcgcctacaaatattctcctattgttgtgggatttatattgttgtcatgtttgattgctgtatcagtgaatttcagcacatttttagtaattggaaagacatcaccagttacatatcaagtgttaggccaccttaaaacatgtttggttttagcctttggttatacattgctacatgatcctttcacttcaagaaacatcattggaattcttgtggccattgttggaatgggattgtattcctatttttgtgtcaatgaaaccaaaaggaaacaagttggagacctttctcctatgactcaagttaaagataaagataccactgcaccacttctagccggaaaaaatggccaagtcaaagaaaataactcccttgtttaaatttagagttgaagtgaagatgtttt

SEQ ID NO: 262 - DNA, 1341 bp, Papaver somniferum
gctcaaaaccagaaaaatcctaaccacactttttctttctctagctagctagctatctacaattgcattactcttttctcgatcatttacgtaaacaagtgtaaaagctacgatctccaccgtcaggggatcaccaagacataaaaatgggagaaacaccaaggttacagctcggggtaattggtgctctagcactttcagttacatcttctgttgccattgtaatatgcaacaaagctctaatgagtaatcttggatttccgttcgctacaacattaactagttggcatctaatggttacattttgcacacttcatgtggcacaaagattcaatgtttttgagaccaaggtggtcgacaccaaaactgtgatgcttttcggtatcctaaatggcgtgtctattggacttctcaatttaagtcttggattcaattccattggattctaccaaatgacaaaacttgcaattataccctttacagtactgttggaaaccctgtttctcaagaagcagttcagtcagaatatcaagttctctctttctctattgctactcggagttggcattgcgtcgataacagatctccagcttaatcttgtcggatcaattatctctctactcgcaatcgcaacaacatgtgtcggccaaattctgaccaacaccatacagaagagacttaatgtatcatctacacaacttctctatcaatctgccccatttcaagctggcatactctttgtttccggccctctagttgatcaatgcctcaccaaacaaaatgtctttgcctacaaatactctcctttcgtcttggcatttattattctttcgtgtgtgatatccgtatcggtgaactttagtacatttttggtgattggaaagacatctcctgttacatatcaagtattgggtcatttaaagacatgccttgttcttggattcggctacacattactacatgatcctttcacaaaccgaaatatcatcggtattttagtcgctatgtttgggatggggttgtactcttacttttgtactcatgaaaataaaaagaaacagattaatgatctctccatctctcagatcaaagagacaacaccatttttagggaataaaaacatggggcaccaagatatggaagaggtgaaaaaaccaaacaaggattctcttgtttaatatacgtacctactagctagttatgtctatgtatccatgtgtatacggaggagtataaaacaaacaagaccttgcttacctcttttgagatacattatttttccctttttggattcaaaatgagtgtaaatgatttgataattcttttaaataaagttcataa

SEQ ID NO: 263 - DNA, 1279 bp, Petroselinum crispum
taaacaaatagaaaataaatgtaccaaaccaccatacaacagacaattcctcaattaaaaagcctgcaattttttcatctcatacaagcctccctctccttctcttccccacccctaaagtgacagccttccagccactctcaggctccgatcattggcggcatttgtttgatatctgcaagtgtcagctagtgaactataaaatggagaagatgatgatggggtttcaattgggagtgatcggtgcattgtttctttctgtggcctcgtcggtgtccattgtgatttgcaacaaggccttgatgagcaatcttggctttccatttgctactacattgacaagttggcatctcatggttacatattgcacattacacgtggctcaacggttgaatttcttcgagactaaatctattgatatgaagactgtcatcctctttggcatccttaatggagtttccattgggtttcttaatttgagccttggcttcaactctataggtttttaccagatgaccaaactagcaattataccgtttacggtgttattggaaactattttcttgaacaagcaattcagccaaaaaataaagctctcccttctcctcttacttttaggagtcggggtggcttcggtgacagatcttcagctcaatttagttggaacaattctttctcttctagcaattgcaactacctgcgttggtcaaattctcacaaacaccatacaaaagaggcttaatgtgtcttccactcagcttttgtaccagtcagccccatttcaagcagcaattctatttgtaacaggccctctactggaccagtacctcacaaagcaaagtgtttttgctttcagttattctccccttgtcttgggctttatcgttctttcctgcttgattgctgtatcagttaacttcagcacctttttggtcattggaaaaacatcaccagttacataccaagttttgggacatttgaaaacatgccttgttcttggctttggatacactttactccatgaccctttcactgctaggaacattatcggaatcctcattgcgattcttggcatgggcttgtattcttacttttgtacttatgaaaacaaaaagaagcaactggttgatctctcctctcctcaggttaaagacagagacagtaatacaccacttttgggacatcaggatagagaaagtgaagttaagaaactaaacaaggattctcttgtctgagatgttaggattttgatattaagatttctttcaagacctttgtg

SEQ ID NO: 264 - DNA, 1610 bp, Papaver somniferum
aaaccagaaagatcctaaccacagtttttctttctcgagctacctacaattgcattattcttctcttgatcatttacataaacaagtgtaaaagctacaatctccaccgtccggggatcgccaagacataaaaatgggagaaacaccaaggttacaactcggggtaattggtgctctagcactttcagttacatcttctgttgctatcgtaatatgcaacaaagctctaatgagtaatctcggatttccattcgctacaacattaactagttggcatctaatggttacattttgcacacttcatgtggcacaaagattcaatgtttttgagaccaaggcggtagttgacaccaaaactgtgatgcttttcggtatcctgaatggcgtgtctattggacttctcaatttaagtcttggattcaattccattggattttatcagatgacaaaacttgcaattatacccttcacagtactgttggaaaccatattccttaagaagcagttcagtcagaatatcaagttctctctttctctattgctactcggagttggcattgcgtcgataacagatctccagcttaatcttgtcggatcaattatctctctactcgcgatcgctacaacatgtgtcggccaaattctgaccaacaccatacagaagagacttaatgtatcgtctacacaactactctaccaatctgccccatttcaagctggcatactctttgtttccggccctctagttgatcaatgcctcaccaaacaaaatgtctttgcctacaaatactctcctttcgtcttggcatttattattctttcgtgtgtgatttccgtatcggtgaactttagtacatttttggtgatcggaaagacatcccctgttacatatcaagttttgggtcatttgaagacatgccttgtcctaggattcggctacacattactacacgatcctttcacaaaccgaaatatcatcggtattttagtcgctatgtttgggatggggttgtactcttacttttgtactcatgaaaataaaaagaaacagattaatgatctctccatctctcagattaaagagacaacaccatttttagggaataaaaacatggggcaccaagatatggaagaggtgaaaaaaccaaacaaggattctcttgtttaatatacgcgcctactagctagttatgtctatgtattcatgggtatatcgaggagcataaaacaaacaagaccttccttacctcttttgagatacattatttttcctttttttggatttaaaatgagtgtaaatgatttgataattctttcaaataaagttttatataatttcttgcggttctatataaagtattaatgatttgacattgttacctcgcaacaatgtcattgtcacgtgctaaataggagacttaatgttgattgtggtttttaattcagggataaaactgtaaaactatatatttatgtgccttcgttctataaagaagcagagacatttaaagttgatgagtgtacttaaatatgtccttaaatatgtactgagtaattcaatgtctctatatacgaaatttattaaaataatattggtgcatgttgcaaaa

SEQ ID NO: 265 - DNA, 1164 bp, Castanea mollissima
caactacattgtcatacaagccatgagactctttctttaagctcaggcctctcccaaccaattctctcatcactcttcatttcccagctctgatttcaataaaacttgccggagccaccaccattgcttggagttgtaggagcccttataccttgtaaatccatttgtacattttccaagttctaagggctcctaacactccaagactttcttatcacttgtaaagatgggagaaatgtcgagcttccagttgggtgttgttggcgcactgttcctatcagtggcttcatctgtctccattgtcatctgcaacaaagctttgatgagcaatctgggcttcccttttgctactacactcactagttggcatcttatggtgacattctgcacacttcacgcggcgcaacgcttgaattttttgagtccaagtcagttgacacaaaaactgtaatgctctttggcatcctaaatggggtttcaattggacttctcaacttgagcctgggtttcaactccattggattctaccagatgacaaaacttgcaattataccattcactgtattattggaaactcttttcttgaacaagcaattcagccgcaagataaagttcgctcttttcctcttactagtaggagttggcattgcctctgtgactgatcttcagctcaatttagttggaacaattctctctcttttagcaattgtaactacctgtgttggtcaaattctcacaaacacaatacaaaagaggctcaatgtctcttctactcagctgctctaccagtcagctccatttcaggccgcaattcttttcgtctctggccctctggttgatcagttcctcaccaagcaaaatgtctttgccttcaaatattctcctttagttttgggattcatcgtactttcatgcctaatcgccgtatctgtgaacttcagcacctttctagttattggcaagacatcaccagttacatatcaagtgctaggccacctcaagacatgcctcattcttggctttggctatacactactccatgaccctttcacagaaagaaacattattggaatcctaatagcaatttgcggcatgggactatattcattcttttgcacccaggagagtaaaaagaaacaatcccctgatctatcattggtgtct

SEQ ID NO: 266 - DNA, 1095 bp, Daucus carota
ctctctccaaagtgacagccttccagcaactctccggctccgactgtcggcggcgtttgtttgatatctgcagtgaaacataagatggagaagatgatgatgggatttcaactgggtgtgattggtgcattgtttctatcggtggcctcatcggtgtcaattgtgatttgcaacaaggccttgatgagcaatcttggttttccatttgctactacattgacaagttggcatctgatggtaacatactgcacattacatgtggcccaacgcttgaatttcttcgagactaaatctattgatatgaagactgtcatcctctttggcatccttaatggcgtttccattggatttcttaacttgagccttggcttcaactccattggtttttaccagatgaccaaactagccattataccatttacagtgttactggagaccatcttcttgaacaagcaattcagccaaaaaataaagctctcccttctgctcttactcatgggagttggggtggcttcagtgacagatcttcagctcaatttagttggatcaattctttctcttctagcaattgcaactacatgcgttggacaaattctcacaaacacaatacaaaagaggctaaacgtgtcttccactcagcttctgtaccagtcagccccatttcaagctgcgatcctttttgtaacaggccctctactggaccagtacctcacaaagcaaaatgtttttgctttcagttactctcctcttgtcttgggctttatcattctttcctgcttgattgctgtatcggttaacttcagcacctttttggttattgggaaaacatcaccggttacatatcaagttttgggacatctgaaaacatgtcttgttcttggcttcggatatactttactacatgatcctttcactgctaggaacattattggaatcctcattgctattgttggcatgggtttgtattcttacttttgtacctacgaaaacaaaaagaaacaattggttgatctctcctctcctcaggttaaagacagggacactaatacaccacttttgggacatcaggagaatgaggtcaagaaatcaaataag

SEQ ID NO: 267 - DNA, 1170 bp, Solanum phureja
atatatatatagcaccaatatattttcattcaattccacacccaacaaaagaaaaaaagatctcattctatttcttcaattttttgttgtataatcaaacatcatcacaaattttgatgaagatgggagaaatgacaagttttcagttgggtgtggtgggagcattgtttttatcagtggcatcatcagtttccattgttatttgcaataaagccttgatgagtaatcttggttttccttttgccacaacattaacaagttggcatttgatggtcacttattgcacacttcatgtggcattcaaattcaatttctttgagaataagcccattgaaatgaagactgtcatgctctttggcatattaaatggtgtatctattggctttctcaaccttagccttggatttaattccattggcttctaccagatgacaaagcttgcaattataccttttacagtattagttgaaacccttttcttgaaaaaacaattcagcaaaaatattaaatttgcattattcattctacttattggagttggcattgcttccattactgatcttcaactcaattttgttggaacaattctttcccttctggccattgttacaacttgtgctggacaaattcttacaaacacaattcaaaagaggctcaacatctcatctacacaattattgtatcaatcagccccatttcaagcagctatactatttgttagtgggcctgtggtggatcaattcctcaccaaacaaagtgtttttgcctacaaatattctcctattgttgtgggatttatagtgttatcatgtttgattgctgtatcagtgaatttcagcacatttttagttattggaaagacatcaccagttacatatcaagtgttaggccaccttaagacatgtttggttcttggatttgggtatacattgttacatgatccattcacttcaagaaacattgttggaattcttgtggcaattattggaatgggattatattcctatttttgtgtccatgaaacaaaaaggaaacaagttggagaccactcttccatggcccaagttaaagagaaagataccaccgcaccacttctagctgggaagaatggacaagttaaagaaaacaactcccttgtttaaattttagggttgaaatgaagatgttttt

SEQ ID NO: 268 - DNA, 1944 bp, Eucalyptus grandis
gagtaaagccacgatgatggagaagagtggcaatgtcgtatgaagaagaactcttaacctcattcgcaaaagagcctactagagagagtcatcgaccatggatgacgggtagtccttgcttcaagtggccgtcaactcttacttgtgaaagtgatgagccattgcctaaccgttaacaccattctcctatcatcaccaacctctctttgtacaccccacttaaatacatgcctttcaatgctcctcttacaagccaatctctctctatctctctctctctctctctctctctctctctgagggttggcttcaaagaagggcctgatctggtgcttgagtggtgatcgaggacgaagttcttggagctactgctatctcctcaacatcctagccttttgccttctcggttttggtttccttgaaaatattgcagcatgggggagatgacaggcttccagttgggtgtgattggagctctctttctatcagtggcatcatccgtgtccattgtcatctgcaacaaggctctaatgagcaatctcggcttccctttcgccacaactctcaccagttggcacctgatggttacattttgcacactacacgcggctcaacgtttgaacttcttcgaatcaaaggcgattgacttgaagactgtgatgctgtttggcattttgaatggaatttcaattggctttctaaacttgagccttggtttcaactccgtcggattctaccagatgacaaaactggctattataccattcaccgttctactggaaactcttttcctcaaaaagcagttcagccagaagataaaattctctctgtttgtcttgattttgggggtgggcatcgcgtccattaccgatctacaacttaattttgtggggacagtgctctctgctctggccatcgtcacaacctgcatcggccaaattttgacaaacaccatacagaagaagctcaatgtctcctccacacagctgttgtaccagtcagcacctttccaagcagccattctctttgtctcaggccctctagtggatcaatccctcaccaagcaaaatgtctttgcttataagtactctcccatagtcttggctttcatcatcctttcctgcctgatagcagtgtcggtgaacttcagcacgttcttggtgatcgggaagacatctccggtgacctaccaagtgctgggccacctcaagacgtgcctcgtcctgggcttcggctacacattgctgcacgaccctttcaccgagaggaacatcatcggcatcctcgtcgccatgcttgggatgggcttgtactcctacgtctgcacccaagagagcaagaagaagcagtcaacagatctctccaattctcaggttaaagagaaggatactgaaccgcttctcgatgggaagagcctgggctatcaagataaagaaaatcaagatgccaagaaatctagcagagactcctttgtctgagattcagcaagaaagctggcattttctttttcactttcgcttttgacggggttccctttctctctctctctctctctctctctctccatttccttaagactcaatttcgagtgtaaatgaattttatcaagtgcaataatattctttccccacatttcagggttcatgcaatgatatcttaacactgaatgattgccatcttgcatattaacttagataataaattctcaatcttagaaagttgtatttctgagactcgaaggagttagataaatacccatagttaatagggcatgctttgtaaattaatattttcaatgtctagataaatttcatgtcattaggaaaattttaattctaatttaattttgggacaagtgaactagtagtcctaaaatttatcatataagtataattgaatcctaaaacttttaaaatgtgcaattaagtacctaaaaatttatta

SEQ ID NO: 269 - DNA, 1103 bp, Heritiera littoralis
tagtagttggccattacggccggggaaacaagccacaatcaactctctctctatctctctctattctccaagcttctatagctcaaaatctctctgaaacatctcttcttaaccctctcgttgttgatttttccggtcactgcttgttgtaacttggtgcgctttctggtgatcttatggagctgtaggagccctctgtcaagaatattgtagacatacttgtactcttttaaagatgggagagatgtcaagcttccaattgggtgttattggcgccctgtttctttcagttgcatcatctgtctccattgtcatatgcaacaaagctttgatgagcaatcttggcttcccttttgctacaacactcactagctggcatctcatggtgacattttgcacccttcatgcggcacaacgcttcaatctgtttgagaataaaccaattgacatgaagactgtgatgctctttggcatcctcaatggtgtttccattggatttctcaacttgagccttggctttaactccattggattctaccagatgaccaagcttgcaatcataccattcacggtattactggaaactatcttcctgaaaaagcaattcagccaaaagataaagctgtcgctttgccttttacttgttggagttggctttgcctctgtaactgatttgcaactcaattttgttgggacaatcctttctctccttgccattgcaacgacctgtgttgggcagattctgacaaacaccatacagaagagactcaatgtctcttcaacccagctgctgtaccagtcagctccatttcaagcagccattctttttgtctcaggccctttggtagatcagttcctcaccaagcaaaacgtgtttgcttacaaatattcccccattgtcttggcatttatcatcctctcatgcattatttctgtatctgtcaacttcagcacatttctggtgattggcaaaacatccccagtcacataccaagttcttggccacctcaagacttgcctggtacttacctttggctacacactgctgcatgaccccttccacagacaggaacatcattggaatcctcatagccatttttggg

SEQ ID NO: 270 - DNA, 1309 bp, Ambrosia trifida
tatacccctcccatttcccactatacccttctacaataacattctaactactcatcaactgctgtcttgtttcctttaaacaactgttacatattgtggtactagctcttgagttgtagacgattttcgacgtttcgggtaaagtacattgtggaaagaagatgggagagttgacagggtaccagttgggagttattggtgcattgtttctatcagtggcatcatcagtgtctattgttatatgcaataaagctttgatgagcaatcttggctttccttttgctacaacattgactagttggcatctggtggtaacatattgcacgcttcacgtcgcgcatcgtttgaatttcttcgagaacaagagaattgatatgaagacagtgatcctgttcggtatcctaaacggggtttcaattggttttcttaacttgagcctcggttttaactccatcggcttttatcagatgaccaaacttgcaatcataccttttaccgtgctcttagaaactctcttcttgaaaaaacaattcagccaaaagataaagttatcacttttcgtcctacttttgggagtcggcatagcatcagtgacagatcttcagctcaattttcttggcacaattctctcccttctagctattgccaccacatgtgttggtcaaattctgacaaacacaatccaaaaaagactcaatgtgtcatcaactcaattgttgtatcaatcagcaccatttcaagcagccattctatttgtctcaggccctttagtagatcaatacctcactaagcaaaatgtttttgctttcaaatattcccctcttattttgggattcatactactatcatgtgtgattgcggtttcggtcaactttagtacatttttggtgattggaaagacatcaccagttacataccaagtgttgggccatctaaaaacatgtcttgttcttggatttgggtatactttgctacatgaccctttcacagaaagaaacattattggaatacttgttgccattcttggaatgggcttgtattctatttttgtacccatgaaaataaaaagaacaaatgattgatctctctcaaggttcgcagattaaagataaagatagtaacacccctcttttgggtaatcaagataaagaaaatcattttgaagtgaagaaagcaaaccaaagactacccttgtttaaagctaaagcgaactattagggattgttaaaatgtgtttatttccttttaaattcattatagtcaaattttgattctttaaataaatataaagctagtcacatattgactt

SEQ ID NO: 271 - DNA, 1096 bp, Papaver somniferum
accagaaaaatcctaaccacagattttctttctctagctagatacaattgcattatttctctctcggtcatttacgtaaacaagtgtaacatctacaatctccaccgtcaggggatcaccaagacttaaaaatgggagaaacaccaaggttacaacttggggtgatcggtgctctagcactttcagttacatcttctgttgctattgtaatatgcaacaaagctctaatgagcaatctcggatttccattcgctacaacattaactagttggcatctaatggttacattttgcacacttcatgtggctcaaagattcaatgtttttgagaccaaggtggtcgacaccaaaactgtgatgcttttcggtatcctaaatggcgtgtctattggacttctcaatttaagtcttggattcaattccattggattctaccagatgacaaaacttgcaattataccctttacagtactgttggaaaccatattccttaagaagcagttcagtcagaatatcaagttctctctttctctattgctactcggagttggcattgcgtccataacagatctccagcttaatcttgtcggatcaattatctctctactcgcaatcgcaacaacatgtgtcggccaaattctaaccaacaccatacagaagagacttaatgtatcgtctacacaacttctctaccaatctgccccatttcaagctggcatactctttgtttccggccctctagttgatcaatgcctcaccaaacaaaatgtctttgcctacaaatactctcctttcgtcttggcatttattattctttcgtgtgtgatatccgtatcggtgaactttagtacatttttggtgatcggaaagacatcccctgttacatatcaagtattgggtcatttgaagacatgccttgtcctaggattcggctacacattactacatgatcctttcacaaacagaaatatcatcggtattttagtcgctatgtttgggatggggttgtactcttacttttgtactcatgaaaataaaaagaaacagattaatgatctctccatctctcagatcaaagagacaacgccatttttagg

SEQ ID NO: 272 - DNA, 1020 bp, Echinacea purpurea
tgtggctttgttgattccggtgatatcaagttgtttactcatttttgcaggtcctgctaatctctagaattgcataccaatttcatagtcaattaaggaaaaaagatgggagaactaacagggtaccagttgggagttattggtgcattgtttctatcagtggcatcatcagtgtcaattgttatctgcaacaaagccctcatgagcaaccttggttttccttttgctacaacattgactagttggcatctgatggtaacatactgcactcttcatgtggcacaacgtttaaatttcttcgagaacaagagaattgatatgaagacggtgatcctgtttggcatcctaaatggtgtttcaattggttttcttaacttgagcctcggctttaactccattggcttttatcagatgaccaaacttgcaatcatacctttcactgtcctattagaaaccgttttcttgaaaaaacagttcagccagaaaataaagttatcacttttcctcctacttcttggagttggtatagcatcagtgacagatcttcagctcaattttgtcgggacgattctctcggttctagctatcgcgaccacctgtgttggtcaaattctgacaaacacaattcaaaagagactaaatgtgtcatcaactcagttgctatatcaatcagcaccatttcaagcagctatcctgtttgtctcagggccgttagtagatcggtacctcaccaagcaaaacgtattcgctttcaagtattcacctgttgttctgggattcataatactgtcatgtgtgattgctgtttctgtgaattttagtacatttttggtgattgggaaaacatcaccagttacataccaagttctaggacacctaaagacatgtcttgttcttggatttgggtatactttgttacatgaccctttcacagaaaagaacatcattggaatacttattgccattcttggtatggggctctattcttacttttgtacccatgaaaacaaaaagaaacaa

SEQ ID NO: 273 - DNA, 1117 bp, Papaver somniferum
caaaactcaaacccagaaatatcctaaccacagattttctttctctagctagctacaattgcaatatttcttctctcgatcatttacggaaacaagtgtaaaagttacaatctccaccgtccggggatcaccaagacataaaaatgggagaaacaccaaggttacaactcggggtaattggtgctctagcactatcagttacatcgtctgttgctattgtaatatgcaacaaagctctaatgagtaatctcggatttccgtttgctacaacattaactagttggcatctaatggttacattttgcacacttcatgtggcacaaagattccatgtttttgagaccaaggtggtcgacaccaaaactgtgatgcttttcggtatcctaaatggcgtgtctattggacttctcaatttaagtcttggattcaattccattggattctaccagatgacaaaacttgcaattataccctttacagtacttttggaaaccatattccttaagaagcagttcagtcagaatatcaaattctctctttctctattgctactcggagttggcattgcatccataacagatctccagcttaatcttgtcggatcaattatatctctactggcaatcgcaacaacatgtgtcggccaaattctaaccaacaccatacagaagagacttaatgtatcgtctacacaacttctctaccaatctgccccatttcaagctggcatactctttgtttccggccctcttgttgatcaatgcctcaccaaacaaaatgtctttgcctacaaatactctcctttcgtcttggcatttattattctttcgtgtgtgatatccgtatcagtgaactttagtacatttttggtgatcggaaagacatcccctgttacatatcaagttttgggtcatctgaagacatgccttgtcctaggattcggctacacattactacatgatcctttcacaaaccgaaatatcatcggtattttggtcgctatgtttgggatggggttgtactcttacttttgtactcatgaaaataaaaagaaacagattactgatctctccatctctcagatcaaagagacaacgccatttttagggaataaaaa

SEQ ID NO: 274 - DNA, 1312 bp, Medicago truncatula
ttcaacatccattgcatactcattctctcttctctctacctataaacgctgaggcatttctccatcttcccaagttaagggcctcctaccacaaactagcttcaaggttgatctcaaattaatatataagccagaaaatgggagagatggggaagttccaattgggtgttattggtgcattgtttctctcagtagcttcttctgtctccattgtcatatgcaacaaagccttgatgagcaagcttggcttcccttttgctacaacgcttacaagttggcatttgatggtcacattttgtacacttcatgtggctcaacgtctaaacttgttcgtcaccaaatccattgacatgaaaacgatcatgctttttggatttttaaatggtgtttccattggatttctcaacttgagtcttggattcaactctgttggcttttatcagatgacaaaacttgcgatcataccattcacagtaatgttagaaaccattttcctaaagaaacaattcagccagaaaataaaattcactctattcctattacttgttggagttggtgttgcctctatcactgatcttcaactcaattttgtgggaaccattatttcccttctagcaatcataacaacatgtgttagccaaattctaaccaacacaatacaaaagaagcttaatgtttcttccacacagttgctctaccattctgctccattccaagcagcaattctttttgtttctggccctattgtggatcaattgctcaccaaccaaagtgtgtttgcctacaaatattcttctacagtcttggcattcatcatcctatcatgcttgattgctgtttctgtgaacttcagcacgtttctagttattggcaaaacatcacctgtaacttatcaagtactaggccacctcaaaacatgccttgttataggctttggctacacattgctccatgaccccttcaatggaaggaacattattggaatattgattgctatttttggaatggttttgtactcttatttctgcttagaggagaataaaaagaaacaattattaggtgatctttcattggcctctcaggttaaagacaaagatagctcaccccttttggttggaaaaaacatggataatcaagaagaggaaaatcacgaggctaaaaaatttagcaaggattctactaattaaaacaattggcttattatcttttataatttcgtatattttgggtgttttagctcaaggaaacttgaaatgggtgtaaattaaattttgttaataaaatttatgtaactttaagtaagtgagttatc

SEQ ID NO: 275 - DNA, 1514 bp, Orobanche aegyptiaca
caaagccaactgaaacccaaaacaaactatatttgcaccaaccggatggtaatagtcaataaaagactcaatattttttgcattctaatacaaaccaatgcctctctctatctaggaactccatcaaccaccaccccacttatccctcttcaccacctgccgccaccgactgccactgcagacatctcaccccaacttgccgggtgtccatttttttggagcacatatacacttctttgaaagcgatgggagagatggcaggcttccagctaggggttattggggcattatttctttcggtggcgtcgtccgtctccatagtcatctgcaacaaggccttgatgagtaatcttggttttccatttgccacaacacttactagttggcacctgatggtaacatactgcagtcttcatgtggcattgcgcttaaatttctttgaaaacaaacctattgacatgaagacggtcatccttttcgggattttaaatggcatttccattggatttctcaaccttagcttgggatttaactccattggcttctatcagatgacaaaacttgcaatcatacctttcactgtcctgttggaaactcttttcctgaaaaagcaattcagtcagaagattaaattctctctatcagtcttgctgctaggagtcggcattgcatctgtaactgaccttcagctgaacgtcgtcggatcaattctatcgcttctagccatcataacaacttgcattggccaaattttgacaaacacaatacagaagaggctaaatgtctcatcaactcaactgctgtatcagtctgcaccatttcaggcagccattctattcgtctcggggccttttttagatcaatgccttaccaaacagaatgtcttcgcttacaaatattctcccattgttttgggatttatactactctcatgcttgatagctgtgtttgtgaacttcagcacattcttggtgattggcaagacgtcaccagttacctatcaagttttaggccatcttaaaacatgtctggttcttgcatttggctacactttattacatgatcccttcacttcaagaaacattgtaggaatacttattgccattattggaatgggtttgtattcttacttttgcaccagtgataccaagaggaaacaaggtggagatgtatcaactttgtcccagattaaagagaagaatactacacctcttctggtgatccagcaagacaaagaatccaaaacctctcttgtttgagctaggtctatttgattattaatttttgtttcttccttttcttcttcttcttcttctcttttttcttgtttatttcttgtttaaacaagaaactcctccctttcttgaaatgtttttaattctttcaattaataactcccacggggacactctttgtagtcatttccaaaagagaacaaaatttgtttggaaaaattacacttttctttaattatcgccagttttcattttgtaaccttaataatgcattttttt

SEQ ID NO: 276 - DNA, 1123 bp, Helianthus annuus
gtggtactagcggttggatcgcagacgattttcgacttcgggtaattgtgcaaaagaagatgggagaattgacagggttccagttgggtgttattggtgcattgtttttatcagtggcatcatcagtgtctattgttatatgcaataaagctttgatgagcaatcttggttttccttttgctacaacattgactagttggcatctggtggtaacatattgcacacttcatgtcgcgcatcgtttgaatttcttcgagaacaagagaattgatatgaagacggtgatcttgttcggtatcctaaacggggtttcaattggttttcttaacttgagccttggctttaactccattggcttttatcagatgaccaaacttgccatcataccttttaccgtcctcttagaaactcttttcttgaaaaaacagttcagccagaaaataaagttatcgcttttcgtcctacttttgggagtcggcatagcgtcagtgacagatcttcagctcaattttgttggcacaattctctcccttctagctattgccaccacatgtgttggtcaaattctgacaaacacaatccaaaagagactaaatgtgtcatcaactcaactcctgtatcaatcagcaccgtttcaagcagctattctgttcgtcaccggccctttggtagatcaatatcttactaagcaaaatgtttttgctttcaaatattcgcctcttgttttgggattcataatactatcatgtttgattgcggtttccgtaaactttagtacatttttggtgattgggaagacatcaccagttacatatcaagtgttggggcatttaaaaacatgtcttgttcttggttttgggtatactttgctacatgaccctttcacagagagaaacatcataggaatacttgttgccattcttggaatgggcttgtattcttatttttgtacccatgaaaacaaaaagaaacaaatagattgatctctctccgggttcgcagattaaagataaggatagtaacacccctcttttgggaaatcaagataaagaaaatcattttgaagtgaagaaagcaaccaaagactcccttgtttaagataaagtgactgttagggattgtt

SEQ ID NO: 277 - DNA, 1298 bp, Panax ginseng
ctctctccatatctctctctggatttttctctgttcaaaaattaccaccggccggccagtctccggcgccgttgatcatcggtggcatttgtttcattgtggaattaaagatggagaagatgatggggttccaattgggtgtgattggtgcattgtttctttctgtggcatcatcagtgtccattgtcatatgtaacaaggccttgatgagcaatcttggcttcccatttgctacaacattgactagttggcatttgatggtaacatattgcacacttcatgtggcacaaagactcaatttctttgagaataagtctattgacatgaagactgtcattctttttggcattctaaatggtgtttccatcggatttcttaatttgagcctcggctttaattccattggtttttatcagatgaccaaactagcaatcatacccttcacagtactactggaaactattttcttaaacaaacaattcagccaaaagataaggctctcccttctcctcctacttctcggagttggtgtggcctctgtgactgatcttcagctcaatttagttggctcaattctctctcttctggcaattgcaaccacctgcgttggtcaaattctcacaaacacaatacaaaagaggcttaatgtctcgtccactcagctgctctaccagtcggccccatatcaagcagctattctttttgtaacaggccctttgctagatcagtacctcaccaagcaaaatgtctttgctttcaattattctcctatggtcttgggtttcatagtgctttcgtgcttgattgcggtttgtgtgaatttcagcacctttttagtgatagggaaaacatcgccagttacatatcaagtgttggggcatttgaagacatgccttgttcttggatttggctatactttactgcatgaccctttcactgcgaggaacatcattggaatcctgattgccatacttggaatgggcttgtattcttacttttgcacctatgagaacaaattaaagaaacatgaattgggtgatctcatctcatcatcatcagctcaggtgagagataaagatagtacaccacttttgggtggaaagaatatgggacatcaagataaagaaagcgaggttaagaaatcccttgtttaattaacaaggaaagatatacgtaggatatgattaattttggctggctctttaatttcttttttttattcagacaattacaaattgattgttgattcttttccaaataaaaaggcaggctagcactattcaattaattacccgttt

SEQ ID NO: 278 - DNA, 1052 bp, Solanum phureja
atgggtgagaagacaagcttccaattgggtgtggtgggagcattgtttctctcagtggcatcctcagtctccattgttatttgcaacaaagctttgatgagcaatcttggtttcccatttgcaacaacattaacaagttggcatctgatggtgacatttgttacacttcatgtggctctcaaattcaatttgtttgagaacaaacccattgatatgaagactgtgattctctttggtatcttaaatggcatttccattggctttctcaatctcagccttggttttaattctattggcttttaccagatgacaaagttagcaattatacctttcactgtacttttagaaactatattcttaaaaaaacaattcagccgaaatgtgaaattctctctattaattctgctgctcggagtgggtattgcctccattaccgatcttcagctcaattttgttggcacaatcctctctctactagccattattacaacttgtgtcggacaaattctcacaaatacaattcaaaagaggctcaacatttcatctacacaattattgtaccaatcagcccctttccaagcaggtattctatttgtgacaggccctttggtggatcaattccttaccaacaagaatgtttttgctcacaaatactccaatgttgtattgggcttcatattgttgtcgtgcttgattgctgtgtcagtgaatttcagcacatttttagtgattgggaagacatcaccagtgacataccaagtgttaggtcacttaaaaacatgccttgttctaggattcggctatacactgctgcatgatcccttcacattaagaaacattgttggtatacttgttgccattgttggcatgggattgtattcctatttttgcacacatgaaactaaaaagaaacagcctggcgatcattcttccatttctcaagttaaagagaaagatactagtaccccactcctgggtgggaaggatggttatcaagataaggaaaatcatgaatctaagaagttatccaaggactcacttgtttaaatttt

SEQ ID NO: 279 - DNA, 1281 bp, Brassica oleracea
cattccacaatcattctctttctctcatcagcatatcagtttctattcctctctcttcatattgacatattttgaagggttgcgaagagagagaagagagggaaaaaatgggagagatgaagagtatgcaaatgggagtgattggagcattgtttctatctgttgcatcttctgtctccattgtcatttgcaacaaagctttgatgaccaatcttggattcccttttgcgacaacactaacaagttggcatttgatggtaacatattgcacacttcatgtggcatatagactgaacttctttgagaataaaccaatagacacgaaaactgttgttctctttggcctcctcaatggcatctccattggtcttctcaatctcagcctcggcttcaactccatcggcttctatcaaatgaccaaacttgctatcataccatttactgttctattagaaactctcttcctcaacaagaagtttagccaaaagataaagttctcattatttttgctgctggttggtgttggaatagcatcaataacagatcttcagctcaactttgttggttctgttctgtctctccttgccatcgcaacaacttgcgtcggccaaattctaacaaacacaatccagaagaaactgaacgtgacatcaacacaactcctttaccaatcagccccgtttcaagccgcaatactcttcgtctctggtccctttgtcgacaaatacctcactcgcctcaatgtcttctccttccagtactctcctatcgtcgtggggttcataacgttgtcatgtttgatagcggtttcggttaacttcagcacgtttttagtgattggaaagacatctccggtgacgtaccaagtcttggggcatctcaaaacgtgtttggttctcgcgtttggttacactctcctccacgatccttttactcctcgtaacatcgcaggaatcctcatcgctgtccttggcatgcttctctactcctatttctgctctgttgcttccaaatccaaacaaggctcctccgaatccgcttttattgggaaagacaaggatacgacgccgcttttgagccaagaaaaagagaatcatgaagccaagaagctagacaagcattctgcagtgtgattgattacaaaatataattaaaaaagtacagtaactctttctttctgtttttgcttgtatacttctgtattttttttcaattcattgataaaagttttttgttattgagaaaaagtgatgcagacaatggccttttatatattcacag

SEQ ID NO: 280 - DNA, 1294 bp, Brassica rapa
ttcctctctattcatattgacagattttgaagggttgcgaagagagagagagagagaggagaagaggaaaatgggagagatgaagagtatgcaaatgggagtgattggagcattgtttctatctgttgcatcttctgtctccattgtcatttgcaacaaagctttgatgaccaatcttggattcccttttgcgacaacactaacaagttggcatttgatggtaacatattgcacacttcatgtggcatatagactgaacttctttgagaataaaccaatagacacgaaaactgttgttctctttggcctcctcaatggcatctccattggtcttctcaatctcagcctcggcttcaactccatcggcttctatcaaatgaccaaacttgccatcataccattcactgttctattggaaacttttttcctcaacaagaagtttagccaaaagataaagttctcattatttttgctgctggttggtgttggaatagcatcaataacagatcttcagctcaactttgttggttctgttctgtctctccttgccatcgcaacaacttgcgtcggccaaattctaacaaacacaatccagaagaaactgaacgtgacatcaacacaactcctttaccaatcagccccgtttcaagccgcaatacttttcgtctctggtccctttgtcgacaaatacctcactcacctcaatgtcttctccttccagtactctcctatcgtcgtggggttcataacgttgtcatgtttgatagcggtttcggttaacttcagcacgtttttagtgattggaaagacatctccggtgacgtaccaagtcttggggcatctcaaaacgtgtttggttctcgcgtttggttacactctcctccacgatccttttactcctcgtaacatcgcaggaatcctcatcgctgtccttggcatgcttctctactcctatttctgctctgttgcttccaaatccaaacaaggctcctccgaatccgcttttattgggaaagacaaggatacgacgccgcttttgagccaagaaaaagagaatcatgaagccaagaagctagacaagcattctgcagtgtgattgattacaaaatataattaaaaaagtacagtaactctttctttctgtttttgcttgtatacttctgtattttttttcaattcattgataaaagttttttgttattgagaaaaagtgatgcagacaatggccttttatatattcacagctacctccttcacttatgttcgtattggatattaaatgaaactaggtgga

SEQ ID NO: 281 - DNA, 1304 bp, Capsicum annuum
gttaacttccctctctatgcacctcaacccccaaaaggaaaggctcttcaaattttcttgacattttgtctgagtttcttggagctgtagggggccaataagttcatcttgaagagggctcctcaagtccaagttacttagacataattaagagatgggtgagaagacaagcttccagttgggggtggtgggagcattgtttctctcagtggcatcctcagtatccattgttatttgcaacaaagctttgatgagcaatcttggtttcccatttgcaacaacattgacaagttggcatctgatggtgacatttgttgcactgcatgtggcactaagattcaatttctttgagaacaaacccattgacatgaagactgtgattctgtttggcatcttaaatggcgtttccattggctttctcaatctcagcctcggttttaactctattggcttttaccagatgacaaagttagcaattatacctttcactgtacttttagaaaccattttcttgaaaaaacaattcagccggaatatcaaattctctctgttgattctgctgctcggagtcggcatcgcctccattaccgatcttcagctcaattttgttggcacaatcctctctctactagcaattgttacaacttgtgttggacaaattctcaccaatacgattcagaagagactcaacatctcctctacacaactgttgtaccaatcagcccctttccaagcagctattctatttgtgacagggcctatggtggatcaattccttactaaaaagaatgtttttgctcacaagtattctaatgttgtgttgggattcatattgttgtcgtgcttgattgctgtgtcagtgaatttcagcacatttttggtgattgggaagacatcacccgtgacatatcaagtgcttggccacttgaaaacatgccttgttcttggatttggctatacactgctgcatgatcccttcacatcaagaaacattgttggaatactagttgccattgttggcatgggattgtattcttttttttgcacacatgaaactaaaaggaaacagcttggagatcattcttccattcctcaggtcagagaaaaagattctagtacgccacttctagctgggaaggatggttatcaagataaggaaaatcatgaatccaagaagttatccaagatctcccttgtttaaattttgaagttgagatgaggatgtttcaaacaaaaagaaaatctgaatttggagacattccaccggatgtaaatgatttttggttgattcaataatattttca

SEQ ID NO: 282 - DNA, 987 bp, Nicotiana benthamiana
tcgatgaagatgggagaaatgacaagctttcagttgggtgtggtgggagcactgtttctatcagtggcatcttcagtttctattgttatttgcaacaaagctttgatgagtaatcttggttttccctttgccacaacattaacaagttggcatctaatggtgacatattgcacactccacgtggcactgaaattcaatttctttgaaaacaagcctattgatatgaagactgtgatgctatttggtatcttaaatggtgtatccattggctttctcaaccttagccttggctttaattccattggcttctaccagatgacaaaactagcaattataccttttaccgtgttattagaaaccattttcttgaaaaagcaattcagccgaaatattaagttggctctgttcgttctgctggttggagttggctatgcctctattactgatcttcagctcaattttgttggaacaattctctcccttctcgccattgttacaacttgcgttggacaaattctgaccaatacaattcaaaagaggctcaacatctcatcaactcaattgttgtatcaatcagccccttttcaagcagctattctatttgtatcagggccagtggtggatcaattccttaccaaacagagtgtctttgcctacaagtattctcctattgttgtgggatttatattgttgtcatgtttgattgctgtatcagtgaatttcagcacatttttagtgattggaaagacatcaccagttacatatcaagtgttaggccaccttaaaacatgtttggttctagcatttggttatacattgctacatgatcctttcacttcaagaaacattattggaattcttgtagccattgttggaatgggattgtattcctatttttgtgtcaatgaaaccaaaaggaaacaagttggagacctttcttccatgactcaagtaagtcattcttcctcttcgtagaaacgacaccag

SEQ ID NO: 283 - DNA, 5190 bp, Sorghum bicolor
gggggaaagaactagcgaaagggtaaacagccaaacgccaaacgcgttttttttttttttctggttttgttttctctcgctcgctgaattcgccagcggcggcggcctcctctcgcataaaccctaaaccactccattccccactcatcttgccatggaagcagacgaggcctcgccgcctcccccgccgtgggcgcagaacaagtcggccgcggccatcgaggcctcgtcgggcccgctcgccgccgcgtcctcccgcctctccgcccgctcccgtgcgctcccctcgtcccgcgacttccacttctacaacaacttcccgaccttcaaatcccccgtcggcgccgcggccgccaaggccgacgcctccctcggcgtgctcggcgcggccccgcttcttccgacgcggcagcagcagctgttccccgggggcggcgacctcgacgacgcgcacgactggctcgtcgccctcaacgacgacctgctcgagcggttcggcgccgccacggatgagttcaaggcgctccgggagaaggaggaggcctccgggcggagggcggcgcctgaggctggggacgggttccaaatggtgtgcgggaagaagaaaaagaaggtgggcgatggggatgaggaacgcgttggaagagttgaggcatttgggggttctggctctgtgaagatggtaaccaaggacaaggcggccgcaccgggggtgaaggctaaggtgcccttccacatccgcaccatcccacggccgcaggatgtgtaccgcattgtggtggacaactccagcaagccgttcgagcatgtcttgcttgagcgcagcgaggatggtactcgtgtcatgcacccattggaaaaactccctgttgaacaacaaatcaacagaaatgttcttgatagtgagccagtaaagccacctgctttagttgacactccttttacatttgttgaagacctgaaaaccttggaggtgctagccacaaagctgaaggatgcaactgagtttgctgttgatttggaacacaaccattataggacgtttcagggtttgacatgcttgatgcagatttcaacaagaacagaggactttattgttgacactcttaagcttcgtaaatatcttggtgattatcttagagaatttttcagagatccaaccaagaaaaaggtaatgcatggcgcaggtcgtgatattatatggcttcaacgagacttcagcatatatgtctgcaacctttttgacacaggccaggcttcaaaggtcttacagatggaccgtaacagcttggagcatcttttgcaccatttctgtggagtaactgcaaacaaagaataccaagctgcagattggagattgaggccccttcctgatgaaatgatcaaatatgctagagaggatacacactatctgctgtatatatatgacctgatgagattgagactagtgaatgagtcatcaggggaaaatgatcttcttttagaggtttgcaagcgcagcaatgaaatttgcttgcaactatatgagaaggagcagctgactgatacatcatatctacatatacatgggttgaaagaaaatgaactgaatgcaagacagctgtcagttctttctagtctatatcgatggagagatggcattgcccgtgctgaggatgagagcactggctatatattacccaataaaactctacttgagatagcaaaggagatgcctgtgacaagtgggaagttaaaaagaattgttaaatcaagaaatttgtttcttgagcgccatctcggccatgttattaacaatataagggatgccatagcagcttctggtgcttttgaaagtgtagcggagcagctgaagaagggaaagcttgaagagttaacagtggcagatgtgaagaacagcagtgaggacattgaaatgattcctgctgttgatgttggtaacattgaagatccgaatgatgaatctgctgtagtttctgcagtgattacaaatgttggtgctgctccctgtatggggactattacaagcgaagcttctttgggtaatatgcatttagaggatgttgtgcctgaaacaaaggactctggtacttcatcagggtttactggactggcagatacagaaaaactgagcaatgaccagcagcaagcagcaaaggctactgttcaagtatcaaagaggcctacagcttttggagctctgtttggaaaaccagctgctggacgaaagccagatcttttcctagggtttccaaatgttcagggtaagactaaggtggacaagataacgtcttctgtggtacttccttttcatcatttctctggtggtgcaaaaccttcatcacccatccttccagcaaaagaatcgttgcattctgaaccagaaaacatccaacacggtgatccagcttgtcggttggaagaagtgatacagttggacatggaaacagacgagccacaaccaccagaaaatggcaacgaggatggacactgtgagactgaagacactgagatgtcaaagtccccttcagatgacccgtctggtactgagcaacgattccgaacactcaacgaagaaagaaacattcagcagaatcagaagacacctcgagaatttgaattgagtgttccggtggtgccttttgattatgcggaagccagaaagaatctcgtgtctagtcagcctaaagctgagaggagaaaagacgatgcggttgcaagggctataaatacagactctggagataagcggattgcttcaaaaaagccaggtgggggagaggacgagggaaatttccagcatccaaggagacggcaggctttcccgccttctggcaatagaagtgctacatatcactagacgctatctgttccccacctcgccgccatcggtgtcggttcgacgattggcgccggcatctatgtcctggtcggaactgtggctcgtgagcacaccgggccaggcctgacgctctcctttctgatagccggcgtcgccgcggcgctgtcagcattgtgctacgccgagctctcctgccgtttcccttcggcagggagtgcctatcactactcctacatctgcattggagagagcgttgcttggctgattgggtgggcattgatccttgagtacaccattgggggatcatcagtggcacgtggcatgtcgccaaacttggctctgtttttcggtggccaagataagttgccgttctttctagcacaagtgcatgtcaaaggccttgataccccacttgatccatgtgctgctattcttgttctgatagttactgcattactctgtctgggaattaaagagagctcatctgtggaaggcatcatcaccactgcaaatatcatagtgatgctctttgtcatctgtgctggtggatggctaggattcaggaatggctgggttggttataaagtgccagaaggttatttccctaatggtgtcagcggagttctctctggatcagcgaccctcttcttcgcattcattggcttcgacacagttgctagtacggccgaggaggtgaagaatcctcgacgcgatcttccattgggaatggccctgaccttgtccctgtgttgcttcctctacatgatggtttctgctgttgtggtcggtttggtgccctaccacgcgatggatccggacacccctatttcttctgcatttgcgcgatatgggatgcagtgggctgagtatgttgtttccagtggagctgttcttgctcttgtggcatcccttataggcggtattcttccccagccaagaattataatggctatggctagagatggattgctcccgccactgttctcagatgttaatcgaagaactcaggtgccaatcttgagcacagtcttaattggcatatgtgctgctatcctggcttttttcatggatgtctcccaattggcagggatggtaagcgtgggaaccttattggcatttactacggttgccatttctgttttagtagtaagatatgctcctccatatgagatgccaatggaagtggctcttgcaggatcatctgagtcactagcttcattctctgggaacttagagcacgatgagcaaaattcagaagatccttttggcaatgttcaagaagcacttactgtcattgagggagccagcaaagtaaggcgacagaaagccattggaagcatagtattgatatgcgtcggagccatcatcttgatttctgcggtttctgtctcctttttgccattttctgtgcaaacaattgcatgcactgtaggcgggctggttgtgttgagttcttctattgtgcttttgtgcattggacaagacaagagatttttggggcaaactggaggtttcatgtgcccgttggtcccattgcttccaatttgttgcatcatcgtcaacttatacctgcttatgaacctcgggagtcacacatggattcgtgtttccatatggctagtggctggggccctcatatacttcttctatggcctgaagcatagttcactggcaggcatggcctaccatcgcatatcgcctttgtagttcaacgttgggtggagttcttttgcatttttgatagcagaaaatgagagcacatgttttgaaggacagaaggaccagaagaatgaacataggcttgtttagttctaaaaaatttcaaaatttctcgtcacatcaaatctttgaacacatgtacgaaagtgctacagtagcaaaattgaaaaattttcgcggactaaacaaaggccttgtttagttccaaatttttttttaggaaaacgacactgtagcacttttatttttatttgataaacattgtccaatcatggagtaactaggcagatttgtctcgcgatttacagacaagctgtgtaattaatttttattttcatctatatttaatactccatgcatgtgccgcaagattcgatgtgatgagaaatcttgaaaagttttgggtttttggggtgaactaaacaaggccaaagccatagataggcacgtgtacaaaaaaaaaagaagtacacaagtgcccagtctcgtatgagcttgtttttctttctctggcaattgcacaaactactggaacagttacctctgatgtttttttttggttaaagaggaaaactacggctgggtgtttggtttgtgaaataaagcagttcatcgtcatctcatttctt

SEQ ID NO: 284 - DNA, 1792 bp, Setaria italica
cagtccatccatcccatccccgttccattgctctgttctgcttgagtcagccttcagttccatttcattccagagtgccttgattggcggagaaggaaacggaggggggcgagatgccgtgggtgggtgcggtcttgcggttggtggtgttcttccgcgtcatcctgtgatctcgcgccggtccgtccgtcgagcgatcgcgattcgaggtcaacgcctgcttggagcccgggtgataccaccggctgctgaggaggacatgtgctttgggttcaaccggaggagccttgacgccatcgttatgacaagtggcgccgtcgcgtactactacagattgatgcaagtttgccaggctgaatacttccgccagcttctgaagcccgtgacgtagatttggccatcagtccccatctccctctccttcccaaaaatctcaaacccaaacaaaactaaatgatacaattttgaattcaaccacaagaaaacaccagctccaagtccagataaaaaaattctcccaaattcctgttcaatttcattccaatcgaaagcctcaaatctccctagaattcccgcacaaacactgccagaaatcaagcatcacttcaagagcggccctatgcagggagaccccggatacgggtacggtggctacgggtacgggtacggctatggctacggcgccggcgccggtggctatgactacgacgtggccggctacggtggtggaggcgcgtactacacggccaacgaccggtaccccgccgcgccggctgcctatgggaacccgctgtccggtcggaggcagcacgacttcccggcgccactcacgggcctggagttccagccgtcggacacctgccccaagaactatgtcatcttcgaccagacgtacgaccggagccgggtcatgttccacccctccttggccaacaagatcggctcgtccggtggcgggtacgactacgaccactgctgctacggctacgatcagaactacgccggcaagagcgcctactacggctgcggagatgacggcggcgctgcctcaattcggcagaaagaggacacggacgagatcgacgcgctgatgagcacggaggacggtgaggacgaggacgacgtgctgagcactggccgcacgcctgggtgccgcgccgggggatccccagactccacgtgctcgtccgagtacggggctagcggcagcgggcggaagcacgagaccggtggcggaggcggcgagaagaagaaggagcggatgaagaagatggtgcggacgctcaaggggatcatccccggcggcgaccggatggacacgccggccgtcctcgacgaggccgtgaggtacctcaagtcgctcaaggtggaggtcaagaagctcggcgcgcgcgggtcaagcagttagctagccagctcacatcggcatccggcagtgaccacaatggctgccgaaatctcccactctacatcggtagataagatgagatcggcgatcgatgatggcaacgacagcctcccatcttggcatcagatgccacgaaccagttggtgcgtgctctgtttgcgctgataggattagagcatggcatgggagagagctcaattgccgcgcgctttcgcgctttattttgtcagcgtcttgtggtgcctctgcctctaggctctagcgtgcgtgggtgcgtgcatggattgttgcttttctttcttagaagttgcagccttttcctctttcgtatctcttgatagtggctggtgttgtaactatcacgatgatgatatatatacaccg

SEQ ID NO: 285 - DNA, 2214 bp, Sorghum bicolor
cgatatcactgcgctcggcactgctgctcgcttcgccgctccaccttctcctctccccctctctctgtatcacgctcaaaagaagtgccgcgaaaggaaacgagggtgaggagggaagggaccaatcggagcacgagcatccaatccaatccggtccaccgcctgcttgctgttcatccgttatataaaaccttgtgcccctcctttgccggctcagtccatcccttcctgtccagtccgttccattgctcagcctccgccgctgtgtcagtgatttcattttcagaaagaaagccttgattggtataggcggaggcgaaggaagcagacgggccggatgccgtgggtggtgaccatcgtgcggctggcggtgttcttccgcgtcatcctgtgacctcgcgatcgcgcggttgacgcctgcttggcaaccccggcgataccaccggttgctgaggaggggcatgtgttttgggctcaaccggaggaggcttgacgccgtccttattatgacaagtggcgcagtcgcgtgctactgcagattgatgcgagtttgccaggtcagcgccctgacgacaacaacacatcaacaattcaggccgaatactttcgccagcttctgaagcccgtgacgtagattctgccatcactacccaccccaccaccctccttccaaacaacctcaaactcaaaccaaactaaccgaaaacaattttgtattcaaccacaaaaatagcccagcttccatcttcagttcacaacaacctctcaaatttgttgatttctttccaaccaaaagcgaaaaagttcctcgatttcccacacacaggccagaaatccagcaacactgcacgagtgccccgatgcagggagatcctgggtacggcttcggtagctacggctacggctacggctacggctatggcaccggcgccggcgccggcggctacgactacgacatggccggctacggtggcggaggcgcctactactcggcgaacgaccggtaccctgccgcgccggctgcctatgaggacccgctcgctggtcggaggcaggacgacttccccgctccgctcacggggctggagtttcagccgtcggacacctgccccaagaactacgtcatcttcgaccagacgtacgaccggagccgggtcatgttccacccctcgctggccaacaacttcggctcctctgctggcggatacgactacgatcgccattgctacggttacgagcagaattacgccggtaagagcgcctactacggctgcggcgacgatggcggcggggcctccatccggcagaaagaggacaccgacgagatcgacgcgctcatgagcacggaggacggtgaggacgaggacgacgtgctgagcacgggccgaactcctgggtgccgtgccggtggctccccggattctacatgctcgtccgggtacgccgccactggcggtggcggtgcgaagcacgagatgggcggctgtggcggcgaaaagaagaaggaacggatgaaaaagatggtgcggacgctcaaggggatcatccctggtggcgaccggatggacacgccagccgtcctcgatgaggccgtgaggtacctcaagtctctcaaggtggaggtcaagaagctcggtgcgcgcgggtcaagcagctagctaagctggcatcagtatgcggcagcgaccataatggcagtcgaaatctctctctacctgtctcagcatcagcagatatacgatgatccggtgaacaatacactgcggtgatgatgacaacgacagtttctcatcagatgccacgtccacaccagttggtgcgtgctctgtttgcagacaggatcagaacatggcttcggagagagctcagttgcagcgcgctttattttaccggcatcttgtggtggctccacctctagcctctagagttcgtgcgtgcatggcttgttactttacttcgttgctagatagaagttgctgccttttcctctttcgtatctcttgatacctagtggctggtgttgtaactatcacgctgatgatatacaccgtggttttttgctatcttgggcactgcaccttggagccatcttcttgattctttttaatttggtgcctgttctcggatggagcattattaaaagatacggagtataagtttcagaatgttgcataattttaagtttccgttaccaagagtgctgataaatcaatt

SEQ ID NO: 286 - DNA, 1187 bp, Saccharum officinarum
aagttccaaaatttcccacacaggccagaaatcaagcaacactgcacgagtgccccgatgcagggagatcctgggtacgggtacggtagctacggctacggctatggctacggctatggcaccggcgccggtggctacgactacgacatggccggctacggtggcggaggcgcctactactcggcgaacgaccggtaccctgccgggccggctgcctatgaggacccgctcgctggtcggaggcagcacgacttccccgcgccgctcacggggctggagttccggccatcggacaactgccctaagaactacgtcatcttcgaccagacgtacgaccggagccgggtcatgttccacccctccctggccaacaacttcggttcctctgttggaggatacgactacgatcgccattgctacggctacgagcagaattacgccggtcagagtgcctactacggctgcgacgacggcggggcctcgatccggcagaaggaggacaccgacgagatcgacgccctcatgagcacggaggacggtgaggacgaggacgacgtgctcagcacgggccgcacacctgggtgccgtgccggtggctccccggactctacatgctcgtccgggtacgccgccgccggcggtggctgcgggaagcacaagatggccggcggaggcggcgaaaagaagaaggaacggatgaaaaagatggtgcggacgctcaaggggatcatccccggtggcgaccggatggacacgccagccgtcctcgacgaggccgtgaggtacctcaagtctctcaaggtggaggtcaagaagctcggcgcgcgcgggtcaagcagctagctaagctagcttcggtatgtggcagcgaccataatggcagtcgaaatctctctctgcctttctcagcatcggcggatgcgatgagccggtgaacaatactgtacatgcggtgatgatgacaacgacggtttctcatcttggcatcagatgccacgtaccaggtggtgcatgctcggtttgcactgacaggattggctttggagagagctcggctggagggcgctttattttatcggcatttttgggtgggctccacctgaaccttatacggtcgggccggcctggcttgttacttttcttggttagaagatgaaagtggtggcttttccttttttctaactctt

SEQ ID NO: 287 - DNA, 1446 bp, Panicum virgatum
cggaaaagatttcgaaacttatcatctgatacatgcaactatcactctaatttgttttccaatgatttcttcttgcaggccgaatacttccgccagcttctgaagcccgtgacgtagattcagccatcagttccttcctcattctgcttccagaaaacctcaaactcaaaccaaactaaccaaaacaattttgaattcaaccacaagaaaaagctagctcccaagtccagttaacaaaatgccgtcgaattcttgttcaatttcattccaaccaagagcctaaaatcttcccagatttccgacacaaacacttccggcggcccgatgcagggagatcccgggtacggctacggctacgggtacggcgcaggcgccggcggctatgactacgacatggccggctacggaggtgaaggcggcgcgtactacacggcgaacgaccggtatcccgtcgcgccggctgccaatgaggacccggtcgccggtacgaggcagcacgacttcccggctccactgacggggctggagttccagccgtcggacacctgccccaagaactacgtcatcttcgatcagacatacgaccggagccggatgatgttccacccctccctggtccccaacaacttgggctcctccgtaggcgggtacgactacgactacgaccaccgctgctacggctacgatcagaactacgccggcaagagcgcgtattatggctgcggcgacgacggcggcgctgcctcgattcggcaggaggacacggacgagatcaacgcgctgatgagcacggaggacggcgaggacgaggacgacgtgcgcagcacggggcgcaccccggggtgccgcgccgggggatccccggactccacttgctcgtccgccgggtgcagcgccggccggaagcacgaggccggcggcgagaagaagaaggagcggatgaagaagatggtgcggacgctcaaggggatcgtcccgggcggcgaccggatggacacgccggcggtcctcgacgaggccgtcaggtacctcaagtccctcaaggtggaggtcaagaagctcggcgcgcgcgggtcaagcggttagccagccaccagctgacatcggcatccggcggtcgatgatggcaaggacgacaggctctcgtcatggcatccgatgccgcgaaccatgagttggtgcgtgccctgtttgcacgggcaggttcagaacgcgatggcatgggatgggagagctcagttgccgcgcgctttattttgtcagcgttccttgtgtgcctctgcctggctcaagcgtccgggcgggggcgtgcacggtgcacagattgcttcttttgtttgttagatatatagaagttgttgccttttcctctttcgtatctattgattgatagaggctggtgctcggtaacgatcacgctgatgtactagtgcagcagaaggatga

SEQ ID NO: 288 - DNA, 1879 bp, Setaria italica
aagtgccgcaaaaggaaaccttgcgacaggagagaggaccaatcggagcatccaatccggcgccggccgctggctgttcagccgttatataaaaccccgtgcccctcctttgccggctcactccatccattccatcccttccctgccccgtttccattgctctgttctgctctgctctcagctcagcttccatcggcgtcgttgttgtctcaatccacacagcttgatttgcggcagaggaggaagcggaggggcaggatgccgtaggtgcccggccgctgcccgccggtggtgtttttccgcgtcatcctgcttggagctccggcgataccataccaccggccgctgcagaggacatgtgctttggtgcaagcttgccaggccgaatacttccgccagcttctgaagcccgtgacataaattcggccatcagtccccacaccaccctccttccaaagaacctcaaacccaaaacaaactaactgaaacaattttgaatctaaccacaagaacagccagctcccaagtccagttaacagaatttcctcgaattcttgttcaatttcgttccagtcagagcctaaaattttcctagacttcccacacaaacacgaccagaaatcaagcggcccgatgcagggagaccccgggtacgggtacggtggctacggatacggctacaccgccggcgccggcggttataactatgacatggcctcctacggaggcggtggcgcgtaccacacggcgaacgatcagtaccccgccgcgccggccacctacgaggacccgctcgccggccggaggcagcacgacttcccggcgccgctcacgggcctggagttccaggcgacggacacctgccccaagaactacgtcatcttcgaccagacgtacgaccggagccgggtcatgttccacccctccctggccaacaacttgggctcctccggaggcgggtacggccacgaccacggctgctacggctacgaccagaactacgccggcaagggcgcctattacggcgacggcggcggcactgcctcggtccggcagaaggaggacacggacgagatcgacgcactgatgagcacggaggacggcgaggacgaggacgacgtgcggagcaccggccgcaccccggggtgcggcggcgccggggggtccccggactccacgtgttcgtccggcggcggcggccagaagaagaaggagcggatgaagaagatggtgcggacgctcaaggggatcgtccccggcggcgaccggatggacacgccggcggtgctggacgaggccgtcaggtacctcaagtccctcaaggtggaggccaagaagctcggcgcgcgcgggtcaagcagctagctaaacagctgacatcggcattcggcggcgatagatgatgacaagacaggctctcgggctctctcggaatggcatgagatgccacgaaccagttggtgcgtgctctgtttgcaatggcaggatcggagagagcttgctgatgagttgccgcgcgctttcgcgctttattttgtcaacgtccttttggtgcctctgcctctctaggctccagcctgccgcctgcgtgcgtgcgtgcatggattgctgcttttctttgttagaagttgctgcctttttcctcttttcgtatctctcgatggtggctggtgttggaagttgtaaccatcacgctgagtcgctgatgatgtagcagtgcagcagaacgctgagtcgctgactgccgagcccgcgcgccaagctcgtaaccagtgaaaactctagcgaacaaattgcaagtctgaattgctgcgcctagcagtgactctgattagttccaactgacatcagaagcagatcattataagggaattgtgtg

SEQ ID NO: 289 - DNA, 1908 bp, Panicum virgatum
cccatcgagtgcgcacgccacctcattcattcggctcccgccactccccatccatccactccctcaaaaggagtgcctcctccctccctcgcgcaacaggaccgaccggcaatccgaggggagggagggagggagcatccgcccaatccggcaccggccggcctgttcctccgcccgctgtataaaaccggaccctgtgcccctctcctgccctcctcctctcatcctcatccatctcgctccagtccgtccgttccatcgctctcttcccagcccaagctgctctgctccatcggagctgtcgcttcgattcagattgtccagccttgatttgattgctatgtatgtctggccctgatcacctaccgcatgctgccatgctgctgctctttcttctgttccatgctggtttatcccatccgagctgatcgagcgtttgattggtttcagaattccaggcggacgcccaaggaagcagggcagcatggtcgcgcggctgctgctggcgacggtgttcttccctgttgtgatctcgcgcctgcaagtgcaagtttgacgcaagactactttgccaggccaaatacttccctccagctttctgaagctcgtggcatcgattcagcaacaatccagtccccacctcactccccttcaaacacaattttgaattcaaccactagataaagccagctcccaactccatccaacaaaattccctcgaattcttgttcgaccccattccaatcagaagctcttcctagcacgggcagaagcagcacttcaccggccgatgcagggagaccccgggtacggccacggtggctacggccacggtggctacggccacggcgccggcggctacggcagcgacatggccgggtacggcgcgtactacgcggcgagcgacctgtaccccgcggcgccggctgcctacgaggacccgctcgccgggcggcagcagcacgacttcccggcgccgctgacggggctggagttccagccgtcggacacctgcccgaggaactacgtcatcttcgaccagacgtacgaccgcagccgcgtcatgttccacccctccctggccagcaatttcggcgggtacggctacgaccaggcctgcgccggcaacagcggcggcggcggcggcggcgcgtcggttcggcagaaggaggacacggacgagatcgacgcgctgatgagcacggaggacggcgaggacgaggacgacgtggtgagcacggggcgcaccccggggtgccgcggcgggggctcctccccggactcgacgtgctcgtccgggtgcggcggcgggcgcaagcaggaggccggcggcggcgagaaaaagaagaaggagcggatgaagaagatggtgcggacgctcaaggggatcatccccggcagcgagcggatggacacgccggccgtgctggacgaggccgtccggtacctcaagtccctcaaggtggaggtcaagaagctcggcgcatgcgggtcgagcagctagcttcgctacccagctgcacggccacttctgcagacaggcttctttcgttgttgttccgatgccggctttctgtactgtacctacccactctgcatgcttcagactgcattacgcgagaacgagaattcagatagaacgagtactacttagtacgcaattagatgcatgttcccgatgcaaacttgagtagtgtcaacaatcttcttataagaaacaaacatggggtaatgcagtctgaagcaacaccttgtaactgcaccttgtttgctcagtcagatctttcaccaacaagaaaactcgaagaaatcttttctgccaacttgggagtgacgaggatgggcaatgtcttaagtgatgaacaaacaagtacaggtccatctgtctgcaaaagatcaggcgtctct

SEQ ID NO: 290 - DNA, 2008 bp, Zea mays
cgccacctcattaattcgtctccagctccgcgccccatccatccattcccatcactgcgctcggcactgccgctcgccctcgccgctccaccttctccctccctctctctctgtatcacactcaaaagaagtgcctcgaaaaggaaacgagcaacaggagacagtgaaggggaaggagggggagcgaccaatcggactatcggagcatccaatccaccaccggccgctcgctgttcatccgttacactagcagtataaaacaaaaccctgtgcccctcctttgccggcgcgcagtccagcggcctttccttccttccttcctgtccggtcgcgttccattgctcaccctcctcctccattctccactggtgtcgtcgtttcgttccagagagccgtgaaaggcgtaaggcgaaacgaagcgcgaggggcaggatgccgtaggtggcgaccgtttgtgccgctccgatcgtcgggaggtcggcgcctgaggaggccgtgctttgagttcgactggaggagagccttggcgccggtcgttacggcaagtggcgccgtcgccttctacgcaactttgccaggtcagcgcagcctcacgtcgtcgtcgacgattcaggcccgaatacttccgccagctgctgaagcccgttgccgcacgccttccgagcaacctcaaacccgaaccaaactaaccgaaacgcaatttttggattcagttcctagcaatccaaacacaaacacagccagggatcaagcaacacgactcgagtggtccaatgcagggagaccccggttacgggtacggtggctacggcgccggcgccggcggctacggctacgactacgacgtcgccgccaactgcgccggaggcggctactactcggcggcgaacgaccggtaccctgccgcgcctccgcctgctgcagcctatgaggatccgctcggtggtcggaggcagcacgacttcccggcgccgctcacggggctggagttccagccgtcggacacctgtcccaagaactacgtcatcttcgaccagacgtacgaccggagccgggtgatgttccacccctccctggccaacaacttcggttcctctgccggcggatacgactacggcaaccactgctacggctacgaccagacctaccccggcgagagcgcctaccacggctgcggcgacgacgccggcgccggcgccggcggcgtctcggtccggcagaaggaggacaccgacgagatcgacgcgctcatgagcacggaggaaggcgacgaagaggacgacgtgctcagcaccggccgcacacccggatgccgcgccggcggctccccggattccacgtgctcatccggcgggtacgctgggaacagcagcggcggccggaagcacgagacgggcggcggtgagaagaagaaggagcggatgaagaagatggtgcggacgctcaaggggatcatccccggtggcgaccggatggacacgccggccgtgctcgacgaggccgtgaggtacctcaagtcgctcaaggtggaggtcaagaaggccggcgcgcgtgggtcaagcagctagctttccagctgcaactggtagtctggctttgggctttggcagtcgaaataggagttatctccccgcgcaccggcagataagatgagaccggcggtcgtacacgcgaccgcctctcattttgattttggcatcagatgccattctgtgtatctgactactacctagcttggccgctgggcctcccaactcaacggcgtctgcgagaagatggtcaaggaggccaacggtgggcaggcttggacgcggtcatccatgagtggttccgacagtggtgattgttggatactcaatctgttatgagaatctacggaacaggaggaaggagtctgcatgaggtctaggaaggaagtggtggattcttcctcttgccgtgacgaatcgatggattctacataaagttgattttatcggttttcacataaacgattttttacataagc

SEQ ID NO: 291 - DNA, 1866 bp, Panicum virgatum
gagccacgagagctcagctgcactgcacctgcaccaaccaccacacatggaaacggagggagagcgagagtgagactgggcaactggctatgcttcttccttcctggtagctttgccaccgccatccatccatgcactccttcatacacatacacatactgccatggagtagatcgtattcaaccttggggttggttgcccagctgaagatgggagctggagagcaacgagacaagcgcggcggtgtgcgcgcatcgcgacagctctagaagaagagaggagaccgcagcagaagcagccagccacgctcctcctaaccctctctcccctcatcctaatacaaaattcagggcgcctccaaaagagatccgccctgatagatggatcgtcccccacgctgcatcgtcgtcagcccaatcattgcctcatttgttcccttcctcctcctcctcctcgtctcatcctccgtcgtcatcccggcctcggctggaggcggcggcggcaacggcacggcggcgccgttccggtcgggcgaggagctgctccggctccagaggatcaaggcccggctcgccaggaccagggacgcctccgtcaagactatccagagccccgatggcgatgtcatcgactgcgtgccgacgcagctgcagcccgcgttcgagcatcccaagctcagggggcacagaccagagagagagccagcggagaggccggggagcagcagtggccgcgtcgacgctgatgatcgagacgacgaggacgcattgccgcaggtgtggcggcgctccggcgagtcgtgcccggaggggacgataccggtgcggcggaccacggaggccgaagtgctccgggccagctccgtcggccggttcgggatgaaggcccggggtggcggcggcggattcgcgcggcgcgactccaccggcagcggccatgagcacgcggtggggtacgtgtcgggggggcagttctacggcgccaaggcgagcctgaacgtgtggccggcgcaggtggcgtcgccggcggagttcagcctctcgcagatctgggtcatctccggcgccttcggcaacgacctcaacaccatcgaggctggctggcaggtaagccctcagctgtacggtgacaacaacccaaggttcttcacatactggacagacgacgcgtaccgggagacgggctgctacaacctgcactgctcggggttcgtgcagacgagcagccgcgtggccatcggcgccgccatctcgccgatctcgtcctccggcgggcggcagttcgacatcaccgtgctcatctggaaggacccgcggcggggccactggtggctgcagctcggcgccggcgcgctcgtcggctactggccgtcctcgctgttcacgcacctgggctcccgcgccgacatggtgcagttcggcggcgaggtcgtgaacgcgcggccggccggcgcgccgcacacgcccacgcagatgggctccggccgcttccccggggaaggctacgcgcgcgccgcctacttccgcaacgtgcaggtcgtcgactgggacaacagcctcgtgcccgccgccgggctccggctcctcgccgaccggccgggctgctacgacatcgccggcggcagcggcggtgcctggggcacctacttctactacggcgggcctggccggaacgcgcggtgcccataggcctgcaggagcaagctaggaagtaggaacggaaccggatgggtgtttgtgtttctttctttacgtagtacgtgctgatcactgatcaagaacaaggcaaatataaaaattcaaaaaaaaagaacaaggcaaatatatgtggcaaaattaaatttttgattctttttttttctccttc

SEQ ID NO: 292 - DNA, 2301 bp, Sorghum bicolor
ctgaatagacagtcggttgataaggtcaagcgaagaattcggacacccttatgaatttccacggaacatggaaggcagggcagtggcagcgaccttcaaatcgaaaggctgcacctcggctcggcatggccggaattggttttaatttgcgcgcagggtgcgtatttcgagagctgacgagacgatccaggccactggccacgagctagtgcttagcttagcgtagcgtagcttcttcagtgcttcaccaaccaccacacaagcagggagagaagccgagtgaggtcaggctggggctgggccggccgtgcttcactgctgctgctgcttcttcttcttcttcttcttgctggctttggcagtagcgcatacacacacatatactgccatggtagattagaatgtgtatttaacctgctttggtcgaggttcttcaggtggccggccttcgacgcctcgtgttgaaggaaacaagggaaaagagtgagctgcagagcaaccagacaagaagggcggtgtgcgcacaggcactagagacagctcatcctctagaagctagctagctagagccgcaagccgccatcgccgccgccgcaggatcagaagcggccaggcgcctccaaaagagagatccactgctccatctcctcccccccggatggccgcttcttgctcctgctttgttcccttcctcctcctcctcctcgcctcggcctcggccttgacgacgacggagcggcgcggcaataatggcacgcggcggccggcgttcagctcggaggaggagctccgcgggttccggagcatcacggccaggcttgccaggctcagggacgcgtccgtcaagacgatccagagtcccgacggcgatgtcatcgactgcgtgccggcgcacctgcagccggcgttcgagcatcccaagctgaggggccagaagccagagagcgagcctgcggagaggccgaggagcagcagtggcagtttctccgacgctgctgatcgaggcgaggacgacgatgacgacgacccgttgccgcaggcgtggcggcggtccggcgagtcgtgcccggatgggacggtgccggtgcggcggacgacggaggacgacgtgctcagggccagctcttcctccgccacccgcttcgggatgaaggcccgtggcggcgtgttcgcgcggcgcgactccaccggcggcggccacgagcacgcggtggggtacgtgaccggcgggcagttctacggcgccaaggcgagcctgaacgtgtggccggcgcaggtggcgtcgccggcggagttcagcctgtcgcagatctgggtcatctccggcgccttcggccacgacctcaacaccatcgaggccggctggcaggtcagccctcagctctacggcgacaacagccccaggttcttcacctactggactgacgacgcgtacaaggagacggggtgctacaacctgcactgctcggggttcgtgcagacgagcagccgcgtggcgatcggcgccgccatctcgcccatctccacctacgccggccgccagttcgacatcacggtgctcatctggaaggacccgcgcaggggccactggtggctgcagctcggctccggcggatccgccggcgggctcgtcgggtactggccctccgcgctcttcacgcacctcggctcccgcgccgacatggtgcagttcggcggcgaggtcgtcaacgcgcgccccgccggcgcgccgcacacgcccacgcagatggggtccggcaggttccccgccgaagggtacgcccgcgccgcctacttccgcaacgtccaggtcgtcgactgggataatagcctcgtcccggcggctgggctccggctgctcgccgaccgaccggggtgctatgacatcgccggcggcagcggcggcgcatggggcacctacttctattacggtgggcccggcaggaacgcacggtgcccgtaggaacgacggaacgccggaatgggtgttgtgcgtgtgttacatacgtgctcactcaagcacacctatagcagaggctgattgctatattactactaatgaaagctttccgttttttttttaaaaaaaaatctctccatgtaaatttgatgcagttgtgatcatctaacaatttttgttaatttagctttctctgatttgtttcattgtttgtgcccttgtaccgatgagtttggtacaaaggttcggaatttcaactgaatttcacgattttcaattctatctagcttatttgcttggcagaaaagttatagctaaaagtattgtttgctgatttatta

SEQ ID NO: 293 - DNA, 670 bp, Saccharum officinarum
ctgcccaattccaactcagctttgactgcccttgcattgcttgctgctcagttcttttccccctgttcttcctcctcttcttctcgcacctcggcgccttcttcggcaactgcgaccgagatggaggcgcaagacgactgcaagtggcgccagatcccggcgttcggcgactggaacctgtgggacgacatgcccgtcacccagtacttccaggcagggaccttcttcttcgccgcgccggcggagaaggacgacgaggatctcttcaaggtgccccagttccctgccaagccatacagctacaagaagtgcgttgttcgagtgaagggggagaaagaaactgctgtgccgccggcgaggaagggaggcaggaggcgctacgtgaacgagcagcagaagtggaagcccaagggagctgtggacgaggacctgtacaagatttccccgcagcttctctgcaaggtgaagaagaagaagctgctgaggaatttgcttggagggtgcctgggcctgagctgcatcgcctgagagatgcagagcttaataagtttctggggagtttgcttgcttggtgctctggagagttgtatagtgtctacgctaatatggaattaatggaaacttactactgcttttgcactcgtttgaatgtaacacttgcattgcactc

SEQ ID NO: 294 - DNA, 1469 bp, Sorghum bicolor
acactcattgtttatcatgcggtggcaaggacttggtgccaaaagccggcaactttacagtcgttactggagatggagagagacacggacggagacactacacaggcagtgagagacaaacagagagagaatttggtaactaacaatctggcctagcgagtgagagtgaggcggcgagcacagaaaagaagagcatcatcactgcgctagcgctacggacactaggaactcggaaagcaagggccaagggggtggtgctggagctggactgctggtggcctctcctctgcccctgcacaccatgcacggcgcatgagtgactgtggggtgctagtactcattgcctgcctgcctgcctgcctgcccgggctcggctcatcagtaacagctgaacgctagctgctgctttgggcgctcgcttttcctcgacggctttctgaaaagtttgggtacgtgtgcccccacattctcttcggccaagccttttgtgcgctcgggcgctcggctatgtatagaggagcaacccttctgctctgctgcccaattccaactcagctttgactgctcttgcattgcttgctgctcagtttctttccccccctgttcctcctcctcttcttctcccacctcggcgcctgcttcggcaactgcgagcgagatggaggcgcaagacgactgcaagtggcgccagatcccggcgttcggcgactggaacctgtgggacgacatgcccgtcacccagtacttccaggcagggaccttcttcttcgccgcgccggccgagaaggacgacgaggatctcttcaaggtgccccagttccctgccaagccctacagctacaagaagtgcgttgttcgagtgaagggggagaaagaaactgctgtaccaccggcgaggaagggaggcaggaggcgctacgtgaacgagcagcagaagtggaagcccaagggagctgtggtggacgaggacctgtacaagatttccccgcagcttctctgcaaggtgaagaagaagaagctgctgaggaatttgctgggagggtgcctgggcctgagctgcatcgcctgagagatgcagagcttaataagtttctggggagtttgcttggttggtgctctggagagttgtatagtgtctacgctaatatggaattaatggaaacttactactgcttttgcactcgtttgaatgtaacacttgcattccatctttactggtgttgctttactgcctcacttttttactagcacgtcttaaagcagttagggcaaaatagaggtaaaaaaatcaaactggaatttagaatattatcttatctgataacgacataacgttaattttctgattccagaacctactaggtacaaaatcaaccttgattaactcatgtcttcagcaagacttgttagggcaagctcaatgattaagccaagctcttgtaaaccaattcaagttctcgatgtaatag

SEQ ID NO: 295 - DNA, 1540 bp, Zea mays
ccaccgcgctagcgctgcggacactagctagggactcggaaagcaagggcccctggcgcgcagcatgcacggctgctgcactgcactgcactcctgcggcatgagtgactctcagtgactgtggggtgctagtactcattgcctgcctgccggggcgggcctcggctcatcagtaacagctgaacgctagccgctgctttgggcgctcgcttttcctcgaccgcttttctctgaacagtttgggtacgtgtgcccccgcattctcttcggccggctatgtatagatgagcgaccctctgctgcccaattccaacactcaggcaacccagctttggctgcccttgcttgctgctcagttctttgccccctgttcctcctcctcctcttttcgcacctcggcgcctgcttcggcatcaactgcgaccgagatggaggcgcaagacgactgcaagtggcgccaggtcccggcgttcggcgactggaacctgtgggacgacatgcccgtcacccagtactttcaggcagggaccttcttcttcgccgcgccgacggcagagaaggacgacgacgaggatctcttcaaggtgccccagttccctgccacgccctacagctacaagaagtgcgttgttcgagtgaagggggagaaaggaactgctgtgcctccggcggcgaggaagggaggcaggaggcgccgcgtgaacgagcagcagaagtggaagcccaagggagctgtggacgaggacctctacaagatatccccgcagcttctctgcaaggtgaagaagaagaagctcctgaggaatctgctgggagggtgcctgggcctgagctgcatcgcatgaccgagagacgcatcgcttaataagtttctggggagtttgttgttcggtgggtgctctggagagttgtatagtgtctacgctaatatggaatcaatggaaacttactgctgcttttgcactcttttgaatgtaaacactagctcgcattccatctctcttggtgttgttttggtgactcactttgttactagcagtacattaaagcggttagggcagagagcggtaaaaaaaatggaatttacagtactatcttatctaatagcgttaaaatttcggattccggaaactaccccgatcgagagtacgagtaaggctgtttggaaaatgcataattttttagctttattatcttagcacagtcacaaatttgaccttggttaactaatgtcttcagcaagacttgttagggcaagttcaatgattcagccagtgtgatagacgagccatataacgttttaatgctataagaatataaaaaatgtgaacagggcacgtgtagaaagcaaaactctgcatatgaagctatatcagcatcacctgctgtagtgctgctcctgctcccattctgaattcatttcagcccatatttttctctgaaaatttgtcgtcatcatgaccaagtgtgccatggttctctaggtcatttggatcaggcagaaaggtaaatggatttgaggtatcattgtatcttgggc

SEQ ID NO: 296 - DNA, 1133 bp, Setaria italica
agtggctaggcagagagtgagagagcacagaaaagaagagcatcatcactgcactacggacactaggacctcggaaagcaaggggtggtgcgcccctgaccctgcactccctccctgcggcatgagggtggagtgctggtactcattgcctgcccgctgcccgggcgaggctcatcagtagcagctcgacgctagctgctgctttgggctcttgcttttccctggagggctttctgaaaaggtccggtacgtgtgcccccacattctcctgcggccgagcctttgggcggctatgtatagagatggagctcatcctcttccagctgcccaattccaacacagctctctttgactgccattgctaggttctcccctgttcctcttcctcttctcacaactcggacacctgcttcacagcttcagcaactgcagagatggaggcgcaggacgactgcaagtggcgccagattccggcgttcggcgactggaacctgtgggacgacatgccagtcacccaatacttccaggcagggcccttcttcttcacagcaccggtggacaaagacgacgaggacctcttcaaggtgccccagttccctgccaagccctacagctacaagaagtgtgtcgtgcgagtgaagggagagaaagccaacgctgtgccggcgaggaagaagggaggcaggaggcagtatgtgaacgagcagcagaagtggaagccgaagggagcagtggacgaggacctgtacaagatctctccgcagcttctctgcaaggtgaagaagaagaagctactgaggaatttgctgggagggtgcctgggcctgagctgcatcgcctgagtgaggcgaagcttaataagtttatgagggatttggttgcttctctagagagctgtatagtgtctatgctaatatggaatttatggaaacttactactgctttgcactcgtttgaatgtaacacttgcagtccatctttcctggtgctgctttagtatttcacttcagtaaaagcctcctgttccttcaaaaaaaaaagggcagagagcgctaaattaaaaaatctcgaactggaaatctgatcacgttgctttcgaatttccgaaacctattatataactaggcctttta

SEQ ID NO: 297 - DNA, 644 bp, Zea mays
ctaaaacgtgacaaacaaaaaagaatagagatagtagtagttatctactgttaatctaagagacatactatgctcttaacagtgtttattttcttttcaaacaagcacgtatgtgtcatacattcacacactgtctttcttgcttccaagactggcttccaagctttcaccagagtccagaggagtaagctttgttccgtttcgttttttctgataggcgcaagacgactgcaagtggcgccaagtcccggcgttcggcgactggaacctgtgggacgacatgcccgtcacccagtactttcaggcagggaccttcttcttcgccgcgccgacgacagagaaggacgacgacgaggatctcttcaaggtgccccagttccctgccacgccctacagctacaagaagtgcgttgttcgagtgaagggggagaaaggaactgctgtgcctccggcggcgaggaagggaggaaggaggcgccgcgtgaacgagcaacagaagtggaagcccaagggagctgtggacgaggacctctacaagatatccccgcagcttctctgcaaggtgaagaagaagaagctcctgaggaatctgctgggagggtgcctgggcctgagctgcatcgcatgaccgagagacgcatcgc

SEQ ID NO: 298 - DNA, 576 bp, Echinochloa colona
gcccaattccaacacaactttctttgactgaacttgctgctcccctgttcatcttcctcttctccagcactcctgcttcaaggcttcagcaactgcagagatggaggcgcaggacgactgcaagtggcgccagatcccggcgttcggcgactggaacctgtgggacgacatgcccgtcacccagtacttccaggcaggacccttcttcttcacagcgccggtggacaaagatgacgaggacctcttcaaggtgccacagttccctgccacaccctacagctacaagaagtgtgttgtgcgagtgaagggagagaaagccaaagccgtgccggcgaggaagaagggagggaggaggcagtatgtgaacgagcagcagaaatggaagcccaagggagcagtagacgaggacctgtacaagatttccccgcagcttctctgcaaggtgaagaagaagaagctgctgaggaatttgctgggagggtgcctgggcctgagctgcatcgcctgagcgaggcaaagcttaataagtttatgaggaatctggttgcttctttagagagctgtatagtgtctatg

SEQ ID NO: 299 - DNA, 1315 bp, Panicum virgatum
cggggagacgaccgccatccgtctcgctccgcgggcggattggatggacggacgaaagcacgcgcgcgcgacaggcacgcacacacactcattgtttatcatgccgcgggtgccaaaagccggcaactttacagtcctcactggagtgaccctgcgtctctctctctctgctgtgcgagtgtgtgtctctgtgactgcgtgtgagagagaaagaggcaccaacacacacacacacacttgcacacagagacagacagagagaaataggtaactaatctggcccagtgagaggcagcgagcacaggaaagacgagcatcatcactgcactagggacactccctgccgccccttcgctgcgctctcctctcagcgagcggagtgctggtactcattgcctgcccgctgcccgggctcggctcatcagtagcggctgaacgctagctgccgctttgggctcttgcttttcccctggagggctttctgaaaaggtccggtacgtgtgcccccacattctcctcggcccgagcctttgggggcggctatgtatagagcagaaccccccagctcctccggcctcctctgcagctgcccaatcccaacacagccttctttgactgcgcctgttcatcttcctcttctcgcgcctcggccacacctgcttcagcaactgcagggatggaggtgcaggacgactacaaatggcgccagatcccggcgttcggcgactggaacctgtgggacgacatgcccgtcacccaatacttccaggcaggacccttcttcttcacagcgccggttgacaaagacgacgaggacctattcaaggtgccccagttccctgccaagccctacagctacaagaagtgtgtcgtgcgagtgaagggagagaaaaccaatgctgtgccggcgaggaagaagggaggcaggaggcagtatgtgaacgagcagcagaagtggaagccgaagggagcagtggacgaggacctgtacaagatctccccacagcttctctgcaaggtgaagaagaagaagctgctgaggaatttactggggggctgcctgggcttgagctgcatcgcctgagagtagtggcaaagcttaataagtctatgaggaattcggttgcttctttagagagctgtatagtgtctatgctaatatgggattaatgaaaacttactactgctttgcactcgtttgaatgtaacacctgcattcgatctctcctgatgttgctttagttttagtacttcactttagtgacaaaaaggcctccacatattcaagcaattaaggcgcatagggattaaaaaa

SEQ ID NO: 300 - DNA, 553 bp, Cenchrus ciliaris
caactgcagagatggaggcacaggacgactgcaagtggcgccagatcccggcgttcggcgactggaacctgtgggacgacatgcccgtcacccaatacttccaggcaggacccttcttcttcacagcaccggtggacaaagacgacgaggacctcttcaaggtgccccagttccctgccaagccctacagctacaagaagtgtgtcgtgcgagtgaagggagagaaagccaacgctgtgccggcgaggaagaagggaggcaggaggccgcagtacgtgaacgagcagcagaagtggaagcccaagggagcagtggatgaggacctgtacaagatctctccgcagcttatctgcaaggtgaagaagaagaagctactgaggaatttgctgggaggctgcctgggcctgagctgcatcgcctgagtgaggcgaagcctaataagtttatgagggatttggttgcttctctagagagctgtatagtgtgtatgctgatatggaatttatggaaacttactactgctttgcactcgtttgaatgtaatacttacatt

SEQ ID NO: 301 - DNA, 1339 bp, Panicum virgatum
gagagacagatagagagaaataggtaactaatctggcccagtgagaggaaagacgagcatcatcactgcactagggacactaggaactcggaaagcaagggggcgtggtgcgccctgccgcccctgcgcctgcgctctcctctcagcggagtgctggtggttctcattgcctgcccgctgcccgggctcggctcatcagtagcggctgaacgctagctgccgctttgggcccttgcttttcccccggagggctttctgaaaaaggtgcggtacgtgtgcccccacattctcctcggcccgactgcccgagcctttgggcggctatgaatagagcagagccctcagctcctcctccggtctcctctgcagctgcccaattccaacacagccttctctgactgcgcccctgttcatcttcttcctcttctcgcgcgctcggccgcctgcttcacagcttcagcaactgcgagatggaggcgcaggacgacggcaaatggcgccagatcccggcgttcggcgactggaacctgtgggacgacatgcccgtcacccaatacttccaggcaggacccttcttcttcacagcgccggttgacaaagacgacgaggacctattcaaggtgccccagttccctgccaagccctacagctacaagaagtgtgtcgtgcgagtgaagggcgagaaaaccaatgctgtgccggcgaggaagaagggagccaggaggcagtatatgaacgagcagcagaagtggaagccgaagggggcagtggacgatgacctgtacaagatctccccacagcttctctgcaaggtgaagaagaagaagctgctgaggaatttactggggggttgcctgggcttgagctgcatcgcctgagagtagtggcaaagcttaataagtctatgaggaatttggttgcttctttagagagctgtatagtatctatgctaatatggaattaatgaaaacttactactgctttgcactcgcttgaatgtaacacctgcattcgatctctcctgatgcatgttgctttagttttagtacttcgctagttcgctttagtgcaaaaaaaggcctccacatattcaaccaattaagggtgcatagggattaaaaatcaaactcaaatttgaaatgcctggacacgttacttttctaattcccaaaacttattataagtacttttaaaaatgtacgaactcgaccttatcgcaagtatactaggattaaagatcggtatgatttcttccttatgtgataccttcggcagggattgtaaactaggctcgttacaagcaaaaatcattccggctttcttctggaatggaattggg

SEQ ID NO: 302 - DNA, 605 bp, Pennisetum glaucum
ccctgttcctcttctcgcgactcggccacctgcttcacagcttcaccagcagctgcagagatggaggcgcaggacgactgcaagtggcgtcagatcccggcgttcggcgactggaacctgtgggacgacatgcccgtcacccaatacttccaggcaggacccttcttcttcacagcaccggtggacaaagacgacgaggacctcttcaaggtgccccagttccctgccaagccctacagctacaagaagtgtgtcgtgcgagtgaagggagagaaagccaacgctgtgccggcgaggaagaagggaggcaggaggccgcagtacttgaacgagcagcagaagtggaagcccaagggagcagtggatgaggacctgtacaagatctctccgcagcttatctgcaaggtgaagaagaagaagctactgaggaatttgctgggaggctgcctgggcctgagctgcatcgcctgagtgaggcgaagcctaataagtttatgagggatctggttgcttatctagagagctgtacagtgtgtatgctgatatggaatttatggaaacttactactgctttgcactcgtttgaatgtaatgcttacattcta

SEQ ID NO: 303 - DNA, 2064 bp, Sorghum bicolor
ttttgacgcgaatgatgggagtgtttagggtagcgcaaaatgcgatgacaagcgaagcgagcctatgaacgggcgtcgccgtctctgccgcagaccctaatctccgagcctatcgaagcgtcaaactccatccatcaccaaccctccgatgagtccaataatgcgccatcgatatcctatcctacccttcctcttggtcgcaactcgcaacaaggccgcgcccaatccaatctgcactgccaaaggccacaagagcacaccactagcgctcgcgcgcgcgggcgggccgtctggctggcaattagttcgccttggcagcttcttggcttcccagttcccaccaccgcgccgcgcgcgcgcacctgctgccgatcgcctgatcgatctatttcccggcgggagacggccggacagcgcggcgaggagcagaggacgcgtggaggaggaggaggaggaggaggaggaggaggacagaggtccaaggaagggaggagagggctagtaatcaatggcgccgccggacgagggtgcgggtgcggcagcaggcggcgcgcggcgccggtgggtgcggcgggagacgctgctgggcctcgcgctggggcagttcgtctcgctactcatcacggccaccggcttcgcctcctccgagctcgcccgccgagggatcaacgcgccgacatcgcagtcgctcctgaactacatcctcctagctgtggcctacggcggcgttctcctctaccggcggcagcccctcacgataaaatggtactactacttaattcttggaattatcgatgtggaagctaattatattgttgtgaagtcataccagtacacatctttgacaagcgtgatgctgttggattgctggtcaattccgtgcgtcattgttcttacttgggtatttctgaagacaaagtatgggttgaggaagttccttggcgtcggagtttgtgtggttggccttatactagttgtattttcagacgtccatgcctctgatcgagctaaaggacctaatccattgaagggtgatctgtttgtaattcttggttcaatgctttatgcttgcagtaatgttactgaggagtttgttatcaagaaaagcaacagagtggagttgatggcaatgttgggactttttggagcaattgtcagtggcatacaaattagtatactcgagcgaaaagaacttcactcgatcacatggacttctggtgctgtgctcccttttgttggattcgcagtagcaatgttcctgttctactcaactgtaccaataattttaaagatatgtggcgcaaccatgctgaacctctcgctcctgacttcagacatgtgggctgttctgatccgcatctttgcttaccatgagaaggtcgattggatctacttcgttgctttcgccgccacggcgggcggcatcgtcttatactcatacaagggctccaatgaagtggaggagacggcccaggtcgccggggccagcgacgagcatggcaaggacagggacgaggaggctggaacgcggaacccagtgtgaagctctggtgccagcaatggctgccagacatccaggaggctactagattagctgtgatgagtagttgcatggcttggaaggcgatcgagcgcatatagcactaggataataggaagagcttgggagttcaggcttggactgcttgagagcggcaatattttcagagaatttgatgaagtgtagcaggacttacttgagacttgacggaaatagtgatattatactcctatttacgtaaaagaacaatcggtaaaacaccaatggtgaaccgtcagaagcttaggctgagacattgccaattcttcaaactttaaccaatttgaccttatatacttcacgaaagctaaggactctatttgacgtaagaaggaagaaccaaacatactagacaaggtgatctttgtttattacccacggctgtagtgtttgcagatgtatattgtatcagtggataacgtaaggaaaaaaaaaattaagaaagaggattcgaggatagatctgtttgttagtttagataggag

SEQ ID NO: 304 - DNA, 1997 bp, Panicum virgatum
ctgatgcgtccaataatgccccgcgccaaccccatccatgtcgcctgtcaaacctcctcatcccctgctccgcctgctcgcaaccgaccaatccaatctcaactgtgaagaccgcagcgcgcgcgcgcccgggctggctgttagttaggcttggcttggcttgcagcttccagcttgttcgcttcatcccgcagccccgcgcccgcgcacctcgccgagatatcaatggcgccgccgcctgaagatgagagtggcggcgcaggtgttggccgctgctgcgtcgggggcgcgcggtgggtgctgctgggcctcgcgctggggcagttcgtctcgctgctcatcacctccaccggcttcgcctcctccgagctcgcccgccgaggcatcaacgcaccgacatcgcagtcgctcctgaactacatcctcctctccctcgtctacggcgtcgtcctcctctaccggaggcagccactcacgataaaatggtactactatttgatccttggaattatcgacgtcgaagcaaattacatcgttgtgaagtcataccagtacacatcattgacaagcgtgatgctgctggattgctggtcgattccatgcgtcattgttcttacctgggtatttctcaagaccaagtatgggctcaggaagttcctaggcgttggagtttgtgtggctggccttatactggttgtgttttcagacgtccatgcctctgatcgagctaaaggacctaaccctctgaagggtgatttgcttgtcatttttggttcgatgctttatgcttgcagtaatgttaccgaggagtttgtggtcaagaagagcaacagagtggagttgatggcaatgctggggctttttggagcaattgtcagtgcaatacaaataagtatactcgagagaaaagaacttcattcgatcacatggaatgctggtgcagtgctcctttttcttggatttgtagtagcaatgttcctattctactcaaccgtgccaacagtattgaagatatgtggcgcgaccatgctaaacctctcgctcctgacttcagacatgtgggctgtcctgatccgcatcttcgcttaccatgagaaggtcgactggatctacttcgttgcttttgcgtgcacggcggctggcatcatcatatactcatacaagagctccagggaagtggaggagacggcgcaggtcactggggccagtgatgagaagggcaaggagggggatgaggaggctggagcacactacccagtgtgaaactgagctggcggcaatggcggcttggtctatagcaaggaagtgccatactgccatcagctgcaagaacatccaggagagtactaggttagctctaagttgtagcatgccttgaacggcggatgcatatggcactggctgaatatataggaagaccttgagaaagtttaggcctcagagcaggaagtgtatcagaaacaatttgatgaatagtagcagcacttagttgagacttgatagaggtggtggaatttctgtaaacaggagcagttggtagcccatcaacagtccaccaccagaaatttaggctgaggtattgcttattcttctttttcttttcgaaaaggagtattgcttattcttcaaactttactgattttaccttatatagctcatcagtttccagcaccatcagatttaccaaactactgctacgaaaatgaagtacttaacagttaaatggcctgtccagagataaatataggtaaaatttggtagttttctgaggatttatacagaatgttgctcgccgacaaagttctccatagtcacataatgtttcacaaaccatttgggaaacttgcctagaccctagggctataaagctgaatgatctcaatgtgctccggaagtgatatctcatccaaaaagccatctataagtctataacccatccttggcctcgatgcgcattgataatgaatgtaaaactttaaggcaccaactgtaaattt

SEQ ID NO: 305 - DNA, 1567 bp, Setaria italica
ccctcctcttgttcgcaagcgcgccccccgggccccggctggctggctgttaggcttggcagcttgttcgcctcccacagccgcacgcgcaccacgcggagtgaagctgcgcgcggttgcaggggcgccggcgcgggacagagaaggcgcgcgcggggtatagcaagggcgagctgctgatcatcaagtgatcaatggcgccgccgcctgcggatgagggcggcgccggcacaggtggccggtgcggcggcggcgcgcggtgggtgctggtgggcctggcgctggggcagttcgtctcgctgctcatcacctccaccggcttcgcctcctccgagctcgcccgccgaggtgtcaacgcgccaacatcgcagtcgctcctgaactacatcctcctcgccctcgtctacggcagcgtcctcctctaccgcaggcagccactcacgataaaatggtactattatttgatccttggaataatcgacgtggaagctaattatatcgttgtgaagtcataccagtacacatctttgacaagcgtgatgctgctggactgctggtcgattccatgtgtcattgttcttacttggatatttctcaagaccaagtacgggctcaggaagttctttggcgtgggagtttgtgtggctggccttatactggttgtattttcagatgtccatgcctctgaccgagctaaaggacctaaccctctcaagggtgatttgcttgtcattcttggttccatgctttatgcttgcagtaatgttaccgaggagtatgtgatcaagaaaagcaacagggtggagttgatggcaatgcttgggctttttggagcaattgttggtggtatacaaataagtatactcgagagaaaagaacttcattcggttacatggaatgctggtgctgtgctcccttttctaggattcgcggtagccatgttcctgttctactcaactgtgcccacagtattgaagatatgtggagcaaccatgctgaacctctcgctcctaacttcggacatgtgggctgttctgatccgcatctttgcttaccatgagaaggtcgactggatctacttcgttgcttttgcctgcacggcggctggcatcatcatctattcatacaaggactccaaggaagcagaggagacagcacaggtcgctggggccagctatgagcagggcaaggagggggatgaagaggctggagcgcacaactccggtgagggcagtggcagctcggtccatagcaaggaagtaccatcagctgcagggacatccaggaggttactaggttagctgtgagttgtagcacgccttgaatggcgaatgcatatagcaccgggcgaatagaaagagcctgagagagtgtaggcttgagagcagcaaatgtatcagaaacaatttgacaaagtgtagcaggacttactttagacttgacagaagtggtggaatttccataaacgaagaacaccaactgtcagaagtttaggctgaggcattgccgattcttcaaacttaacttgaagatttgaccttatatagctcaccaatttccagcaccg

SEQ ID NO: 306 - DNA, 2098 bp, Oryza sativa
gcgtaaaccgtttttgtcgcctgcaacgcatccaaaaccaacctccaaagtccaaacagctcaacacaaaagcggcgtcaagtcaggaaggaaagaaggatccgacggcccagatggcccccgcacgattcacgagacgtcaacctccatcaccaaccctccgatcctccccaataatttccccccgcgccaacctaatctcctactccctccctatcatccacgactccctcactcctcaacgccatatccaaatctcccgcgaatccctccaaaacccaaccatacattgcacgcgctcgcgccacgcgagagccgagaggtttgcgcccttgcagttgcggggtgggaggggagaatggcgccgccgctgctgccggcggctgaggaagacggtggttgcgtggcgaggtggatgcggagggatgtgctgctggggctggcgctggggcagttcgtgtcgctgctcatcacctccaccggcttctcctcctccgagctcgcccgccgaggtatcaatgcaccgacatctcagtctctgttgaactacatccttctctcccttatctatggaggtatactcatctaccggagacagcccctcacgataaaatggtactactatttgatccttgggattattgacgtggaagcgaattatatagttgtgaagtcttatcagtacacatctttgacaagcgtgatgctcttggattgctggtcaattccttgtgtgattattcttacatggatatttttgaagaccaagtatgggctcaggaagttcatcggtgttggagtttgcgtggctggacttatattagtagtattttcagatgtccatgcctctgatcgagctaaaggacccaaccctttgaagggagatttgctcgtaatctttggttccatgctttatgcttgcagcaatgttacagaggagtacctggtcaagaaaagcaacagaattgagttgatggcaatgttgggactttttggagctattatcagtggaatacaaataagtatacttgagcgaaaagaacttcattcaatcaaatggaatgctggcgcagtgcttccttttcttggattcgcattagcgatgttcctgttctactcaactgtacctacagtactgaagatatgtggggcaacgatgctgaacctctcactgctgacttcagatatgtgggctgttctgatccgcatctttgcttaccatgagaaggttgactggatctacttcgttgccttcgccggcacagcggctggcctcctcatctactcatacaagagctccaaggaggcagaggagacggcgcaggtcgccggagctagtgacaagcagggcaaagcgggcgatgaagaggccggaatgcagaactcctcgtgaattgaagctccggtgcctgcatctgcatcggcatcggcacgatctctctctaacaagggatcatcgttaactgcgtgcgagtacacgtacttacagggaaatatgttagttgttgatgaattaacatcaggtttagtgcgggtggagtgagggaggacaggcagtaattgattgagcagatgggtagaagagatcaaacgatggactgaaggagccgaactgaggaccagaaaaactgggcaggaagctttcctcaccttttattattttataaaatatatacatcaataattttacaataaatagatgtgccaatttcttttgtttttgtctttgcaactggcagtgaaatggcaatggtattacaaagtttcacgaggaaactaaaacttatacacttaaagcgagtggtacatgaggagacaaaagggagtaaaacttaatgctgaaattttcagaattatagataattatgaaacgctacttgaatgatacaatgccacatatttgagtatggagggagcgacttctatgcataaccagtacagttttttttttttaccaaggctgtgtttagatccaaagtttggatccaaacttcagtccttttccatcacatcaacctgtcatacacacacaacttttcagtcacatcatctccaatttcaaccaaaatccaaactttggatccaactaaacacagcc

SEQ ID NO: 307 - DNA, 1707 bp, Pennisetum glaucum
cgggataatgaggtttgaggcgcccccccggctggctgttcagtttgttcccttcccttgttcgcaagcgcgcccccccggctggctgttcagtttgttcccttcccacagccgcacgcgcaccacgcggggggaagctgcggcggcgcgcgggacagagaaggcgcccgccggccgtagcaggggcgagctgcgcgctgatcaggtgatcaatggcgccgccgcctgcggatgagggcggcgccggcgcaggtggccggtgcggcggcgtcggcgcgcggtggctgctggtgggcctggcgctggggcagttcgtctcgctgctcatcacatccaccggcttcgcctcctccgagctcgcccgccgaggtgtcaacgcgccaacatcgcagtcgctcctgaactacatcctcctcgccatcgtctacggctgcatcctcctctaccgcaggcagccactcacgataaaatggtactactatttgatccttggaatcatcgacgtggaagctaattatattgttgtgaagtcataccagtacacatctttgacaagcgtgatgctgctagactgctggtcgattccgtgtgtcattgttcttacttggatatttctcaagaccaaatacgggctcaggaagttctttggtgttggagtttgtgtggctggccttatactggttgtattttcagacgtccatgcctccgatcgagctaaaggacctaaccctctcaagggtgatttgcttgtcatccttggttccatgctttatgcttgcagtaatgttaccgaggagtatgtggtcaagaaaagcaacaaggtggagttgatggcaatgcttgggctttttggagcaattgttagtggtatacaaataagtatgctcgagcgaaaagaacttcattcgattacatggaatgctggtgctgtgctcccttttctaggatatgcagtagccatgttcctgttctactcaactgttcccacagtactgaagatatgtggtgcaaccatgctgaacctctcgctcctaacttcggacatgtgggctgttctgatccgcatctttgcttaccatgagaaggtcgactggatctactttgttgcttttgcctgcacagcggctggcatcatcatctattcatacaaggactccaaggaagcagaggagacagcacaggttgctggggatgaggaggctggagcgctcaactccagtgagggcaatggcagctcggtccatagcaaggaagtaacatcggctgcagggacatccaggaagttactaggttagctgtgagttgaagcaccccttgaatgccggatgcatatagcaccaggcgaatagaatgagcctgatgcttgagagtagcgagtgtatcagaaacattttgacgaagtgtagcaggacttactttagacttgacagaagtggtggaatttccataaacaaagaacaccaactgtcagaagtctgaggcattgccgattcttcaaacgaaggctgaggcattgccgattcttcaaacttaacttgaagattttgaccttgtataactcaccaatttccagcaccattagatttaccaaactcctgatatgagaacaaagtacttcaatgttaaatgcactatccagagatagaggtcagatttgctaattttctgaggatttctacagcatcttactcaatgcattgtaaacat

SEQ ID NO: 308 - DNA, 1301 bp, Sorghum bicolor
ggaaaaccttaaccaaaatccccccgcccctccacaccttccgcctcggctctctctctttctctctctcatcaggaggaggtctcgtgcgcgcccggctttcctctcctcgccgcacgacgcgtgcccggtcgctgatggccaaggcgcgcaggccgccgttctccgccgccgagcggttcctcggcttcccccgcggcgggccgtctccgggggccgtggcgccggcgcccgccgccgacttcgacgacctgccggacctcgccgaggccgacgtgtggtacacggccgccggcggcggcggcgacccggggagcccctgccccgcggcgtcccgccaggtggaggtggagggcaggagcgccggcgggcagcgcggggccccgcggcgcggcgtgcagggcgggctgagccaggcgttcggggacgggcccggcgggcggcaggtggcggcgtcggcgcccgtcgaggttcccgcgtggcccgcccgcttcgccgtcccggacgcggagccggcgctgctgttcgagatggagatgggggacgacgacgacgagggcgacggcaagcggggcgccggcgggtgggtgccgccgcacgtgtacctggcgcggcggcaggcgcgggcgtccgtggtggagggcgccgggcggacgctcaagggccgcgacatgtcgcgggtgcgcgacgccgtctggagccggacgggcttcgacggataacgatgaatgagcaagcgagcctggtggacagattttgatctgcttttgcttcctcctcctcctcctcctcttcgttttcattgcctctcagatttctctccttgttttattttttttttctctggatgaaatgaaaattttgtaacatggccggtgtgcttgttttggcctccgatccatcggcggttttaatcaatggcaaaggaagtagctaagctcagctgctgtgaagaatgtggtgtgtcatgtgtagtagtagtgccagagtacaacattgattggttgatgaatgatcgataatctggttgctgattgggcagttgggtactgcctgctgtggcctgcggctggctccaactcaaattggttggctgattctcttggatactcttctctaattttctagtacaaggggggaaaaaagagccatgtgttgtgatccaaagctgaaatttttatatgttttctttctctcctgctgatgcgcatggacttgtccagttaattcctctcactcatagttttgaagatgccaagcaccgtttaattaatgatttttagagataaaaatgatgaggg

SEQ ID NO: 309 - DNA, 2219 bp, Hordeum vulgare
cgccactttcattcccctgccgccgtagctcaacgccgcattccccgctcgctttattactcccgccgtcctcctccatttataccctttcctttcgccccgcaacttgcatcccagcatactttcccttccaattccggtttgttaacgcaaagcacgagcacagctgcggccggcgaaagatagcagctccagctataataagggccatctccttctctttctctttctgcgactccactcactccttccagatctagagcttcttcccgggccgccttccatgcctcccaggccttctctgccattggcattcctgctcctcctggcggcgaggctcgccggcgctgatgacccctaccgttacttcacctggattgtgacgtatggccccatcaacccgctcggcaccacccagcagggcatcctgatcaacgggcagttcccgggccctcgcatcgactgcgtcaccaacgacaacctcatcgtcaacgtggtcaacaacctcgacgagccgttcctcatcacatggaacgggatcaagcagcgcaagaactcatggcaggacggcgtggcggggaccaactgccccatcccgccaggcgccaactacacctacaagttccaggccaaggaccagatcggcaccttcacctacttcccctccgtggcgctgcaccgcgccgccggggggttcggcgccctcaacgtctaccagcggccctccatccccgtcccctacccgctccccgccggcgacttcacactcctcgtcggtgactggtacctcgccggacacgaccagctccgccagacactcgactccggcgcgccgctcccgttcccggacgcgctgctcatcaacggcatgccctccgccaccttggtgggcgaccaagggaggacgtatctgttgagggtgtccaatgtcgggatgaagacgtcgatcaacttccggatccagggccattctctgaggctggcggaggtggaaggcacgcacccggtgcagaacgtgtacgactccctggacgtgcacgtcggtcagtctgtggcgttcctcgtcaccctcgaccagccgcccatggactacgccgtggtggcgtcgacgcggttcaacccggccgacaccaccccgctgacggcggtcgggacgctgcattacagcagcgccacctccatggcgcctggcccgctcccggcagggccgccggaggagatcgagtggtcgatgaaccaggcaaggtcgttccggtggaacctgacggccagcgcggcgcggcccaacccgcaggggtcgttccactacggcaccatccagacgtccaggacactggtcttggccagctccgctcccgtcgtcgctgggcagagacggtacgccgtgaacggcgtctcgttcgtcgtcccggacacgcctctgaagctgctggacaactacaacatcgcaaacatgatcgagtgggacagtgtcccggagaggcccgacggcggggcaccccggccagggacgccggtggtgaggctcaacctgcacgagttcgtggaggtggtgttccagaacaccgagaacgagatgcagtcctggcatcttgacggatatgatttctgggtcgtcgggtacggcaatggtggccagtggacggagaatgagcgcctgaactacaacctggtcgacgcgcaggcgaggcatactgttcaggtgtatccgaatggatggtcggcgatcttggtgtcgctggacaaccaagggatgtggaacctgaggtcggcgaactgggaccggcaatacctcgggcagcagctgtacctgagggtctggacggcggagcagagcttctccaacgagtacagcatcccgaccaacgccatactctgcggcagagctgccggccttccacactgaggaacaacaaaggctcaataccactgctgcttctactactactactatatatatggctgaaatgaaggtcatagttgttacgatttcttggaaatatatatgtactgccactctagctaaaaactgatgtactagtactcgtatattattctttggtggtgtcggtatttcaagtccttatgtttggtctgtggacaagaccacaggccctgtgaatgctggtgagtgctcttgtttctgaaatgtaatctgttatggtgtgtcattgggacttctcaggtaaagcaagccttgttttccaaagacggtgaat

SEQ ID NO: 310 - DNA, 2058 bp, Secale cereale
ctagctcctttcactttcccttcccttccaattccgttttcttaatgcaaagcacgagcactgctgcgaccggcgaaagctagcagcagctccagctataacaagagccatctctttctctttctctttcactttctgcgactccactcactccttccagatctagaggttcttcccgggccgccgtccatgccaatgatgccttctctggcattggcgccgtgggtgctgctgctcttcctggcggcgagccacgccggcgccgatgacccctaccgctacttcacctggactgtgacgtatggtcccatcaacccgctcggcaccactcagcagggcatcctcatcaacgggcagttcccgggccctcgcatcgactgcgtcaccaacgacaacctcatcgtcaacgtcgtcaacaacctcgacgaaccattcctcatcacatggaacgggatcaagcagcggaagaactcatggcaggacggcgtggcgggcaccaactgccccatcccgccaggggccaactacacctacaagttccaggccaaggaccagatcggcaccttcacctacttcccctccgtcgcgctgcaccgtgccgccgggggcttcggcgccctcaacgtctaccagcggcccgccatccccgtcccctacccgctccccgccggcgacttcacactcctcgtcggtgactggtacctcgccggccacgaccagctccgccagacactcgactccggagcgccgctaccgttcccggacgcgctgctcatcaacggcatgccctccgccaccttggtcgccgaccaagggaggacgtatctgttgagagtgtccaatgtcgggatgaagacgtcgatcaacttcaggatccagggccattctctgaagctggcggaggtggaaggcacgcacccggtgcagaacgtctacgactccctcgacgtgcacgtcggccagtccgtggcgttcctcgtcacccttgaccagccgcccatggactacgccgtggtggcgtcgacgcggttcaatccggaccacaccagcccgctgacggcggtcgggacgctgcattacagcagcgccacctccatggcacctggcccgctcccgacagggccgccggaggagaccgagtggtcgatgaaccaggcaaggtcgttccggtggaacctgacggccagcgccgcgcggcccaacccgcaggggtcgttccactacggcaccatccagacgtcgaggacgctggtcttggccagctccgctgccgtcgtcgctgggcagagacggtacgccgtgaacggcgtctcgttcgtcgtcccggacacgcctctgaagctcctggacaactacaacatcgcaaacgcgatcgagtgggacagtgtcccggagcggcccgacggcggggcaccccggcccgggacgccggtggtgaggctcaacctgcacgagttcgtggaggtggtgttccagaacaccgagaacgagatgcagtcgtggcatcttgacggatatgatttctgggtcgtcgggtacggcaataatgggcagtggacggagaatgagcggctgaactacaacctagtcgacgcgcaagcgaggcatactgttcaggtgtatcctaacggatggtcggcgatcttggtgtcgctggacaaccaggggatgtggaacctgaggtcggcgaattgggaccggcagtacctcggccagcagctgtacctgagggtgtggacggcggagcagagcttctccaacgagtacagcatcccgaccaacgccatactctgcggcagagctgccggccttccacactgaggaacaacaaagcctgaatactgctgctgctactatatatatagctgaaatgaaggttataattattacgatttcttggaaatatgtactgctactctagctaaaaactcatgtactagtagtaatattctttggtgatgtcggtatttcatctgctcgtgtttggtctgtggacaagaccacaggccctgtgaatgctggtcagtgctcttgtttctgaaatgtaatgtcatctga

SEQ ID NO: 311 - DNA, 2669 bp, Setaria italica
tctcggctcctactttccttcgtgttccccgcgtagctttgctcttgtttaatccctcgcgcaagtcgcagagagcagagagcaccccggccgcgagaaagaagaaagctgccgtcccagctagctataaaagctcactctctctctccccgcttcactcactccaccaccgccgcaccctgccattcactgcggccccgtgtgtccccagatctagagatccgccgccatggcgccggccctggcgctgctggtcctgctcgccgtggccgtctccctcgccggcgccgacgatccctaccgctactacacctggaccgtcacctacggccccatcaacccgctcggcaccacccagcagggcatcctgatcaacggccagttccctggcccgcgcatcgactgcgtcaccaacgacaacctcatcgtcaacgtcgtcaacaacctcgacgagcccttcctcctcacctggaacggcatcaagcagcgcaagaactcgtggcaggacggcgtggcggggaccaactgcgccatcccgccgggggccaactacacctacaagttccaggccaaggaccagatcggcaccttcttctacttcccctccctcgccctccaccgcgctgccggcggcttcggtgcgctcaacgtctaccagcgccccgccatccccgtcccctacccaccccccgccggcgacttcaccctcctcgtcggggactggtacgccgccgggcacaagcagctccgccaggcgctcgacgccggcgccgccgccctgccgccgcccgatggactcctcatcaacggcgcccagtctgcaaccttcgtcggcgacctcggcaggacgtacctgttccgggtctccaatgtcgggctcaaggcctccgtcaacgtgaggatccagggccactcgctccggctggcggaggtggaggggacccaccccgtgcagaacgcctacgactccctcgacatccaccccggccagtcgctcgcgttcctcgtcacgctcgacaagccgccgctcgactacgctgtcgtcgtgtccacgcgcttcgccgccgcgaacctcacggcggtggggacgctgcattacgccggcgcgacggcccgggcgccgggcccgctcccgccgccgccgccggggcagttcgactggtccctcaaccaggcgcggtcgttccggtggaacctcaccgccagcgcggcgcggcccaacccgcagggctccttccactacgggaccatcccgacgtcgaggacgctggtgctggcgagctcgtcgtccgccgtgctcgctggccggcggcggtgcgccgtgaacggcgtgtcgttcgtcgtccccgacacgccgctcaagctcgccgacaactataacatcgccaacgtcatggactgggacggcgttccggcgaggcccgtcggcggggcgccgccgcgcgccgggacgcccgtcgtcaggctcaacctgcacgagttcgtggaggtggtgttccagaacaccgagaacgagatgcagtcgtggcatcttgacggatacgacttctgggttgtagggtacggcaatggccagtggactgagatgcagcggcaaacctacaacttggtcgacgcgcaagcaaggcatacagttcaggtgtatccgaacggatggtcggcgatcctggtgtcgctggacaaccaggggatgtggaacctgaggtcggcgatctgggaccggcagtacctcggccagcagctctacctcagggtctggacgccggagcagagcttcgctaacgagtacagcatcccgaccaatgccatactctgcggtagagccgccggcttgccacactgatgaccaagatgcagagcatacacggtcgattcatcctatactacctgtatgtttcgtagaataaatcattctacttatatagctgatgaaatcaagatgataggtgacagagtgttttgttgtagccaaaagctcagaatctgaacttgctattctttgatggtgatgtcagtagtttatttctgcttgtggtttgcctgtgggtaaggacctctcaggctgaagctgtcccatgatcttttccccaatgcattgttgattcagaaatgacagatatgtttggatgtttattagattgtgtgatatcaacagaagtcagcaggtttcagctttatgcaaccaaatttcaaggcacaagatgttgaaccaaactaaattcaggcgggaacaatgtagtggtttgtagtgtttcagtttcaaatgctcgctcattctattttccattcctactaaccaatttcctcttcgactgagaagcacttgaagcaccacctcttggtctctgaattgtaaaagctgctccaaattctgtagggggaaaaacatttttttaagtaaaaccggcaggttctggaatcaaatttccactcaacaacaggggccaacaagttgtagcttcaacaatctaacagcttcaagaatgtaaaacctcatgaaggtggaaaggactttcagaggttcaggagtgaaaaatagaacatgaactagttgaaaacatagtatgatggtggattataaatttttcaaggatctgctggcattttgatattcttaagcactggcactaggcattaacttgtaaggttaaatgatcctgttgaatggc

SEQ ID NO: 312 - DNA, 2462 bp, Panicum virgatum
actcacatcccactataatacttgctctgagagccgggagtcccaaaaacaccataaacacattgggggacgagtgaagagaataatttttaatatttaccaaatattttgctatttttctatgcatctaaaccaagatgtaaaatttgtgggccaaaagatttggtacaaaaactattggccaaaagttttggcactacaaaggcatagtgcttgcaaaaattatgcaaaacttgaatactgtgtgcctgtgtggcgggagcggagggagagactcgacagcagacaggttgtccggcgctgtcccggcgtgtctgtctttactcgggtgcggcggcgacgcggaatggtggtgggggtggtcgtcctctcgtcctcgtcgccgccgctttatccgcagagaggactagcagagaagccgcgaaaagagaaagcaaacgcagctgccctgcccgtgctataaagccaggcacctgctgccctcttcactcactgctgctcctccgtccccaccccagatctagcttgctatctggagagagcgagaggaacgccggccggccggagccatgccggcaatggcagcgctgctggtgctgctgctcgccgttgcggcgcccctcgccggcgccgacgacccctaccgctacttcacctggaccgtcacctacggccccatcagcccgctcggcaccacccagcagggcatcctgatcaacggccagttcccgggcccgcgcatcgactgcgtcaccaacgacaacctcctcgtcaccgtcgtcaacaacctcgacgagcccttcctcctcacctggaacggcatcaagcagcgcaagaactcgtggcaggacggcgtggccgggaccaactgccccatcccgcccgccgccaactacacctacaagttccaggccaaggaccagatcggcaccttcacctacttcccctccctcgcgctccaccgcgccgccggcggcttcggcgcgctcaacgtctaccagcgcccccgcatccccgtcccctacccgccgcccgcgggggacttcacgctcctcgtcggggactggtacagggccggccaccgccagctcaggcagagcctcgacgccggcgccccgctcccgccgcccgacggcctgctcatcaatggcgcccgctcgccgccggcgttcgtcggcgcccgcggcgggacctacctcttccgcgtctccaacgtcgggctcagggcctccgtcaacgtccggatccagggccaccggctccggctggtggaggtggagggcacccaccccgtgcagaacgcgtacgactccctcgacgtccacgccggccagtcgctcgcgttcctcgtcgcgctcgaccagccgccgctcgactacgccgtcgtcgtgtccacgcgcttcgcccccgccaacctcacggcggtggccacgctgcactacgccggcgccaccgccagggcgccgggcccgctgccgcccggcccgccggggcagtacgactggtccgtcaaccaggcgcgttcgttccggtggaacctcacggccagcgcggcgcgccccaacccgcagggctccttccactacggcgccatcccgacgtccaggacgctggtgctcgcgagctcgtcgccggccctcgccggccggaggcggtgcgcggtcaacggtgtgtccttcgtcgtccccgacacgccgctaaagctcgcggacaactacaacatcgccaacgtcatcgagtgggacagcctcccggcgaggcccgccggcggggcgccaccgcgcgccgggacgcccgtcgtcaggctcaacctgcacgagttcgtcgaggtcgtgttccagaacaccgagaacgagctgcagtcgtggcacctcgacggatacgacttctgggttgttggctacggcgatggccagtggactgagatgcagcggcgaacctacaacttggtcgatgcgcaagcaagacatacggttcaggtgtacccgaacggatggtcggcgatcctggtgtcgctggacaacaaggggatgtggaacctgaggtcggcgatctgggaccggcagtacctcggccagcagctctacctcagggtctggacgccgcagcagagcttctccaacgagtacagcatcccgaccaacgccatactctgtggcagggccgctggcctcccacactgatgagcgagatgcagagagcatacacggtcgattcgtggtactacttataatgtctcataggataaatcattctacttatatagctgaaatcaagatgatagttgagagagtgttttgttgtagccaaaagcttagatgaacttgctattctttgatggcgatgtcagtaatttatttctacttgtgatttgcctgagagagagaaaggaggtatcaggctgaatctgtccaatgatcttttccctaattaatgcattgttgattcagaattcgcaaaca

SEQ ID NO: 313 - DNA, 2091 bp, Panicum virgatum
cggcctcaccacacctgtctagtttaatggcagagaagccgtgaaaagagaaagcaatccaccatccccgctataaagccacacggacaccctgcctctccctcccggtcactccactccaccgctgcactctgccattcactgccgcagatctagctagccagctggagagaaacgccggagccatgccggcggcaatggcagcagctgtactgctggtgctgctgctcgccgttgcggcgccgcccctcgccggcgccgacgacccctaccgctacttcacctggaccgtcacctacggccccatcagcccgctcggcaccacccagcagggcatcctgatcaacggccagttcccgggcccgcccatcgactgcgtcaccaacgacaacctcatcgtcaccgtcgtcaaccgcctcgacgagcccttcctcctcacctggaacggcatcaagcagcgcaagaactcgtggcaggacggcgtggcggggaccaactgccccatcccgcccggcgccaactacacctacaagctccaggccaaggaccagatcggctccttcacctacttcccctccctcgcgctccaccgcgccgccggcggcttcggcgcgctcaacgtctaccagcgccccaagatccccgtcccctacccgccgcccgcgggggacttcacgctcctcgtcggggactggtacgccgccggccaccgccagctccgccggaccctcgacgccggcgccccgctcccgccgcccgacggccttctcatcaatggtgcccggtcgccgccggcgttcgtcggcgcccgcggcgggacgtaccttttccgcgtctccaacgtcgggctcaaggcctccgtcaacgtccggatccagggccaccgcctccggctggcggaggtggagggcacccaccccgtgcagaacgtgtacgactccctcgacgtccacgccggccagtcgctcgccttcctcgtcgcgctcgaccagccgccgctcgactacgccgtcgtcgtgtccacgcgcttcgccgccgccgacctcacggcggtggccacgctgcactacgccggcgccgccgccagggcgccgggcccgctgccggccgccccgccgccggggcagtacggctggtccgtcaaccaggcgcgctcgttccggtggaacctcacggccagcgcggcgcgccccaacccgcagggctccttccactacggcgccatcccgacgtcgaggacgctggtgctcgcgagctcgtcgccggccatcgccggacggaggcgctgcgccgtcaacggcgtgtccttcgtcgtccccgacacgccgctcaagctcgcggacaactacaacatcgccaatgtcatcgagtgggacagcctcccggcgagaccaggcgccgccggggcgccgccgcgcgccgggacgcccgtcgtcaggctcaacctgcacgagttcgtcgagatcgtgttccagaacaccgaaaacgagctgcagtcgtggcacctcgacggatacgacttctgggttgttgggtatggcgatggccagtggactgagatgcagcggcaaacttacaacttggtcgacgcgcaggcaagacatacggttcaggtgtacccgaatgggtggtcggcgatcctggtgtcgctggacaaccaggggatgtggaacctgaggtcggcgatctgggaccggcagtacctcggccagcagctctacctcagggtgtggacgccgcagcagagcttctccaacgagtacagcatcccgaccaacgccattctctgcggcagggccgctggcctcccacactgacgagcaaggtgcagagagcattagcggtcgattcgtcatactacttaattataatgtctcataggataaatctttctacttatatagctgaaatcaagatgagtctgacagtgttttgttgtagccaaaatctcagatgaacttgctattctttgatggtgatgtcagtaatttatttctgcttgtgattcgcccgagagtaaaaaaggcatcaagctgaatctgtccaatgatcttttcccttaatgcattataagctgattagcctgggagt

SEQ ID NO: 314 - DNA, 2730 bp, Brachypodium distachyon
gcagtgtaattagaacagttgtggactgacaaaaggaagcagagagagagagagctagctcgggcccgacctgtcttcctcctcagctctttccgccgaggccgccgccggcacacgcctcaacgcgcattccccgctccctttctttaccggctgccacctccatttatatgctctctttgctcctcctgatttccctcccaatttgttaacccaaagcacagccacagctactactacagagtgagagcagagtaatacacggaggaaagcaacggccggggctataaagccgccaccaatctctgtctccttctgcttcaatcactggttccagatctggtgttgttctgtggccatggcgagagaggcggcgccgaggaggaggccatctccggccatggcgatgcggtgggcgctgctcgtcgccatggcggcggcggcgggagcagaggacccgtaccgctacttcacctggaacgtgacctacggccccatcagccccctcggcaccacccagcagggcatcctgatcaacgggcagttccctgggccaaccatcgaatgcgtcaccaacgacaacctcatcgtcaacgtcttcaactacctcgacgagcctttcctcatcacatggagcgggatcaagcagaggaagaactcatggcaggacggcgtggcgggcaccaactgcccgatcccggccaacggcgggaactacacctacaagttccaggccaaggaccagatcggcaccttcatttacttcccttccctcgcgctccaccgcgccgccggtggcttcggcgccatcaacatccgccagcggccctccatccccgtcccttacccaccgcctgcagccgacttcaccctcctcgtcggcgactggtactatgccgccggaggtcatgccgagctccagcagagccttgattctggcgcgccgctcccgttccccgatgcggtgctcatcaatggcgtgccctccggcgccaccttcgccggcgaccaagggaacacatacctgctcagggtgtcgaatgtggggatgaagacgacggtcaacgtgaggatccagggccattctctgaggctggcggaggtggaaggcatgcacccggtgcagaacatctatgactccctcgacgtccacgccggccagtcggtggcgttcctcgtcgaccttgaccagccagccatggactatgctgtcgtggtgtccacgcgcttcaatgctgacggcgcacctccgctggtggcggtcgggacgctgcactacaatggcgccaccgccagggcccccggcctgctcccggcgccaccgccggaggacattgagtggtcgatgaaccaggcgaggtccttccggtggaacctgacggctagcgcggcgcggcccaacccgcaggggtcgttccactatggcaccatcccgacgtcgaggacgctggtcttcgccggctctgggcttgttgtcgtcgccgggcagaggaggtatgcggtgaatggcgtgtcgtttgtcatccccgacacgccgttgaagctcgtggacaactacaacattgccgacgtgatcgagtgggacaacgtcccagcaaggccagatggcagggcgccccggcaggggacgccagtggtcaggctcaacttgcatgagtttatcgaggtcgtgttccagaacaccgaggatgaagtgcagtcttggcatcttgatggatatgatttctgggttgtcgggtacggcaatggccagtggaccgagaatgagcggccaaactataacttggtcgacgcgcaagcgagacatacagttcaggtgtacccgaacggatggtcggcaatcttggtgtcgctggacaaccaagggatgtggaacctgaggtccgcgaactgggaccggcagtacctcggccagcagctctacctgagggtctggacggcagagcagagcttctcaaacgagtacagcatcccaacaaatgccatactctgcggaagagctgccagccttcaacactgaggaagaagaaacaagtcaatactactatatatacagctgaaatgaagatgataattacgattttcaggaaatatgtactctagctaaaactgatgtgccactattctttcatgatttcagtatttctcatctccttctgttttttggcctttggacaaggcctcaggctccacctcaatgctattcaagtgttcagtgctgttgttttctgaaatgaaattaatgtgtctggtaattttcagttcaagccctgtttttgaaagatagtggagctatctttccaagtggcctaaccaagcatgactgcatgagatggacacttgctgaattaagtagagtgcactttgtaactagtactctttgggatctagtgaaatacatagttttcctgcataattttgtttgaagaagaggctggtcaagttccagccgaaaattgaccagtgtcatggagaactcatgagatcaagttgggcagctgccagctttggctagggatcttgtcatcagtgatatatgtcgttccctgcaagctgaaacgtgagcaatccggctagcaagaagcatagcctgagcctggtaatagaagtttttttaataggcttgtttggaaacagctttatggggagacagaggctgaagatgaagaatacacaggcctgctttagaaaaagtattctggagcagtaatttactaatgttaactgcac

SEQ ID NO: 315 - DNA, 1358 bp, Sorghum bicolor
gcccgccaaacccacgctcactggacggcaacggcccggcccgcaaccaccatttccctttccctcgtgcccaactccccaagcgagcgactcccaccgccaccgccaccgccaccgccaccgccgccgtcggccatttccaagcagccatggacgagtgggttcaccaagccgaggtgtgggtgcgccaagccgagagctggatccgccagcagcctacggagcagatctatatcgccgccgcggtggttgccctcacaatcctgctgcttatcgtagcatcttgtctgaaatcctcgaagccaaatactatagtgctatccggccttagtggcagtggcaaaactactattttctaccagcttcgggatggatcatcacatcaaggaactgtgacttcaatggaagaaaacaatgacacatttgtactgcattcagagcaagaaaggaaaggcaaagtaaaacctgtgcatgttgttgatgtccctggccattcaaggctcaagcccaagcttgatgaagtcctgcctaaagcagctggggttgttttcattgttgacgctcaagatttcttgtctagcatgcaagctgctgcagagtacctgtatgacattctgacaaaggcaattgtagtgaagaaaaaggttcctgtgcttatattctgcaacaagacagataaagttacagcccactcaaaggagttcataaagaaacagttggagaaagaaataaacaagcttcgggaatcaaggaatgccatatcatcagctgacatctctgatgaagtccagctcggggtccctggagaggtattcaacttcagccagtgccagaacaaggtggctgttgctgagggtgccggttcgaccggtaatgtttcagctgtcgagcaattcatccgtgaacatgtgaaggcgtagattgttcttattattctcagggctgtgaatggttcacctgatgaggcaagacatccaacagagcttcatcagctcctctgacgatgttttcaggcacaatcatattctgcaccgcttcagctaacccattacccatgttagatgcattccatgttgattgttaattaacgcttggcagtcatcgggtatgaatagaggcaagtaagaaccgtctctggccatgtttattttgcttgctaaggttgatatttccctgatttttaccagtctctgttctaaactctggttgtagttacaagcaaaagtccagatctgatcaaaagcgttggatgtgaatagagcatgttaagaactgactgtgtgtttttctgaagcaactgttttatatggtgagacgcttaaaagcttagcctccctttttggactgtaacaaggaag

SEQ ID NO: 316 - DNA, 1429 bp, Saccharum officinarum
aagcagccatggacgagtggattcgccaagccgagctgtgggtgcgccaagccgagagctggatccgccagcagaccccggagcagatctatatcgcggccgcggtggttgccctcacaatcctgctgcttatcgtagcatcttgtctgaaatcctcaaagccaaatactatagtgctatctgggctcagtggcagtggcaaaactactattttctaccagcttcgggatggatcatcacatcaaggaactgtgacttcaatggaagaaaacgatgacacatttgtgctacattcggagcaagaaaggaaaggcaaagtaaaacctgtgcatgttgttgatgtgcctggccatgcaaggctcaagcccaagcttgatgaagtcctgcctaaagcagctggggttgttttcgttgttgatgctcaagatttcttgtctagcatgcaagctgctgcagagtacctgtatgacattctgacaaaggcaactgtagtgaagaaaaaggttcctgtgcttatattctgcaacaagacagataaagttacagcccactcaaaggagttcataaagaaacagttggagaaagaaataaacaagcttcgggaatcaaggaatgccatatcatcagctgacatctctgatgaagtccagctcggggtccctggagaggtattcaacttcagccagtgccagaacaaggtggctgttgctgagggtgccggttcgactggtaatgtttcagctgtcgagcaattcatccgtgaacatgtgaaggcgtagattgttcttattgttctcagggctgcgaatgattcacctgatgaggcaagacatccattgcatagaccttcatcaggtcctctgatgatgttttgaggcacaatcatattctgcaccgcttcagctaacccatgttagaggcgttacatgttgattgttaattaacgcctgacagtcatcgggtattaatagatgcagttaagaactgtctctggccatggtggttttgcttgataaggttgatatttccctgatttttaccagtctctgttctaaactctggttgtagttacaagcaagagtccagacctgatgaaaagcattggatatgaatagagcctgtaaagaactgtctctgtgtttttcggaagcaactgttttatatggtgagacgctgtaagacaggcctcacctttcggaagcagaacacggaaggcaattggatagttgtggagtattgataatagtctcagaaacatatggtgtctgttgggcggctttgggacagaacaccattcgttttatactggaaaatgagcttttatttgaaaccgaaagctcctgtggtagtttgcaaaaaggaaatggagaaattgtatagttcaaaacccatgtgtttgtgcatcaatattctttagcagtctctcacg

SEQ ID NO: 317 - DNA, 1445 bp, Sorghum bicolor
atagcagctatactttcctatcctgtagtcttccactgccgcaattcgccacatctcgccgtcggcggcgaggggcagggagacaggatcccctgtcgcgcggcgacgtagccctcctcctgctcgtgctgtccccgccaccctctgcttatcgtgcacctgggattagatctatttctggtatccgagagatcgagcgaaatcgatctagccaaggtgcggcggacgcggcttattctcaataattcttctgcgttgtttggaaagcagccatggacgagtggattcgccaagcggaggtgtgggtgcgccaagccgagagctggatccgccagcagcccccggagcagatctatgtcgcggccgcggtggttgccgtcacaatcctggtgcttatcgtagcatcttgtctgaaatcctctaaactaaacaccatagtgctatccgggcttagtggcagtggcaaaaccactcttttctaccagcttcgggacggatcatcacatcaaggaactgtgacttctatggaagaaaacagtgatacctttgtgctgcattcggagcaagaaaagaaaggcaaagtgaaacctgtgcatattgttgatgttcctggtcatgccaggctcaaacccaagcttgatgaagtcctgcctaaagctgctggggttgtttttgttgttgatgctcaagatttcttgtctagcatgcaagctgctgcagagtacctgtatgacattctgacaaaggcaaccgtagtgaagaaaaaggttcctgtgcttatattctgcaacaagacagataaagttacagcccactcgaaggaattcatcaagaagcagttggagaaagaattgaacaagctccgggaatcaaggaccgccatatcctcagctgacatctctgatgaagtccagctcggggtccctggagaggctttcaacttcagccagtgccagaacaaggtggctgttgcggagggcgccggttccgctggtaatgttttggccgtggagcaattcatccgtgagcatgtgaaggcataggtggttgttattatcgttcccagggctgcaaatgtttcagttgattgatgaggcaagacgtgcattgcgtcaatgtggttacccttcatgcatatatacctccgttcaggtcctcggacattgctttccttagaggtgcagtcatattccgccgcactgcttcagctgacccttgttatagttatagaggcaggcattacatgttgcattgttgacgcctggcagtcatcggatatgaatagatcgatcctgttaaaagttgtctctgctggccatggacccatggttttgctgcataagttgtatatttcccagattttctcgacgtctcggttttaaactctttccgttatagttgcaacaagcaaaatgtggatgcagctccacggtggagctggagca

SEQ ID NO: 318 - DNA, 1436 bp, Saccharum officinarum
ctgcaattcgccacatctcgccgtcggcgacgagggacagggagacaggatactcctgtcgcccggcgacgtagccctcctcctcctctcgctctcccagccaccctctgcttatcgtgcacctgggattagatctatttcttggtatctgagcgatcgagcgaaatcgatctagccaaggtgcggcggacgcggcttattctcaagaattcttctgcgatctttggaaagcagccatggacgagtggattcgccaagccgaggtgtgggtgcgccaagccgagagctggatccgccagaagcccccggagcagatctatgtagcggccgcggtggttgccgtcacaatccttgtgcttatcctagcatcttgtttgaaatcctcaaaaccaaacaccatagtgctatccgggcttagtggcagtggcaaaaccactcttttctaccagcttcgggacggatcatcacatcaaggaactgtgacttctatggaagaaaacagtgatacttttgtgctgcattcggagcaagaaaggaaagaaaaagtaaaacctgtgcatattgttgatgttcctggtcatgctaggctcaaacccaagcttgatgaagtcctgcctaaagctgcgggggttgttttcgttgttgatgctcaagatttcttgtctagcatgcaagctgctgcagagtacctgtatgacattctgacaaaggcaactgtagtgaagaaaaaggttcctgtgcttatattctgcaacaagacagataaagttacagcccactcgaaggaattcatcaagaagcagttggagaaagaattgaacaagctccgggaatcaaggaccgccatatcctcagctgacatctctgatgaagtacagctcggggtccctggagaggctttcaacttcagccagtgccagaacaaggtggctgttgcggagggtgccggttccgctggtaatgtttcggccgtggagcaattcatccgtgagcatgtgaaggcgtaggttgttattatcgttctcactcagggctgcaaatgtttcacttgatgaggcaagacgtgcattgcgccaatgtggttacccttcatgcatatatacctccgttcggggtcctctgacgttgctttgcttagaggcgcagtcatattccgcactgcttcagctgacccttcacccttgttattatagtttatagattacatgttgcattgttgacgactggcagtcatcgggtatgaatgaatagatcatgttaaaaactgtctctggccatggttgttttgctccatatatgttgtatatctcccagattttcacgacgtcggttttaaactctttccgttccagttgcaacaagcaaaagtggatgcagctccacggtggagcatgggtgttgtctttgcacctgatgttgcctagtcttgctttccc

SEQ ID NO: 319 - DNA, 1283 bp, Zea mays
ctggcctccctagcagcttatactttcttatagtcttccacggccgcagttagccacatctcgccgtcggcgacgagggacagggaggcaggatactcctgtcaggccgcgacgtagccctcctcctcttgctctccccgccatcctctgcttctcgtccacctgggattagatctatttcttggtacctgagcgatcgagtgaaatcgatctagccaaggtgcggcggacgcggcttattcacgaattttctgtgttctttggaaagccgccatggacgagtggattcgccaagccgaggtgtgggtgcgccaatccgagagctggatccgccagcagcccccggagcagatctatgtcgcggccacggtggtcgccgtcacaatcctgctgcttatcgtagcatcttatctgaaatcctctaaaccaagcaccatagtgctatccgggctcagtggcagtggcaaaaccactattttctaccagcttcgggacggatcatcacatcaaggaactgtgacttcaatggaagaaaacagtgatacttttgtgctgcattcggagcaagaaaggaaaggcaaagtaaaacctgtgcatattgttgatgttcctggtcatgctaggctcaagcccaagcttgatgaagtcctgcctaaagctgctggggttgtctttattgttgatgctcaggatttcttgtctagcatgcaagctgctgcagagtacctttatgacattctgacaaaagcatctgtagttaagaaaaggatccctgtgcttatattctgcaacaagacggataaagttaccgcccactcgaaggaattcatcaagaaacagttggagaaagaattgaacaagcttcgggaatcaaggaacgccatatcttcagctgacatctctgatgaagtccagctcggggtccctggagaggcattcaacttcagccagtgccagaacaaggtggctgttgcggagggtgccggttcaactggtaatgttttggccgtggagcaattcatccgtgaacatgtgagggcgtaggtcgttcttattgttctcagggctccaaatggctctcttgatctaatgaggcaagatgtacattgcgtcaatggggttgcctttcaatgtgactcttcatccggtcctctgaagttgcttaagaagcagtgaggcgcaatcatattctgcactggttcagctgacccatgtttacatgttgcaatgtgtatgcctgacagtcatcggatatgaatagagcatggtataactgtctggct

SEQ ID NO: 320 - DNA, 1134 bp, Setaria italica
ctgctccgcctcgcctcctcctgtgctcctttcctaatctgccactgccgcaactcgccgcgctcctcgccgtcggcgaggcacgggagatcattccgccggaattattctcgtatttggcacgcagcttcctctccctaatttttcgggcgctctagggttcaaggagccatggacgagtggattcgccaagcggagtcgtgggcaggccaagccgagagctggatccgtcagcagcccccggagcagatctacgtcgcggccgcggtggttgcgatcacaatcctggtgcttatcgcagcatcttgtctaaaatcatcaaaaccaaacactatagtgctatccgggcttaatggaggtggcaaaactactcttttctaccagcttcgggatggatcatcgcatcaaggaactgtgacttcaatggaagaaaacaatgatacgtttgtgctgcattcggagcaagaaaggaaaggcaaagtaaaacctgtgcatattgttgatgttcctggtcatgcaaggctcaaacccaagcttgatgaagtcctacctaaagctgctggggttgtttttgttgttgatgctcaagatttcttgtctagcatgcaagctgctgcagagtacctgtatgacattctgacaaaggcaattgtagtgaagaaaaaggttcctctgcttatattctgcaacaagacagataaagttacagcccactcaaaggaattcatcaagaagcagttggaaaaagaaataaacaagctccgtgaatcaaggaatgccatatcatcagctgacatcaccgatgaagtccagcttggggtccctggagaggcattcaacttcagccagtgccagaacaaggttacggttgcagaaggtgccggttcgaccggtaacgtttcggctgtcgagcaattcatccgtgaatgtgtgaaggcgtagacccttatcggagctgcgagtggctcataggtagagggcaagaggcaaggcgtccattgtgtcaatgtgctattcctgcatataccaaaccaggttttcgctgacccttttttagagaggcattgcactgctaacttctgacagtcattggatatgaaaaatatgcagcttgttaagaactatccctggtca

SEQ ID NO: 321 - DNA, 1086 bp, Zea mays
agttcgccactctcgccatcggggacgagggactgggagccaggatacttctgccgcgcggcgaccggtcgagcgaaatcgatctaccccaggtgcggcgggcgcggctttattctcaagattttttctgtgttctttagagagcagccatggacgagtggattcgccaaaccgaggtgtgggtgcaccaaaccgacagctggatccggcagcagcccccggagcagatctatgtagcggccgcggtggttgccgtcacaatcctgttgcttatcgtagcatcttgtctgaaatcgtctagaccaaacaccatagttctatctgggcttagtggcagtggcaaaaccactatttactaccagcttcgggatggatcatcacatcaaggaactgttacttcaatggaagaaaacagtgatacttttgtgctgcattcggagcaagaaaggaaagacaaagtaaaacctgtgcatattattgatgttcctggtcatgctaggctcaaacccaaacttgatgaagtcctgcctaaagctgctgcggttgtctttgttgttgatgctcaagatttcttgtctagcatgcaagctgctgcagagtacctttatgacattctgacaaaggcaactgtagtgaagaaaaaggtccctgtgcttatattctgcaacaagacagataaagttaccgcccactcgaaggaattcatcaagaagcagttggagaaagaattgaacaagcttagggaatctaggaacgccgtatcgtcagccgacatctctgatgaagtccagcttggggtccctggagaggcattcaacttcagccagtgccagaacaaggtggctgttgcggagggtgctggtttgacaggtgatgtttcggccgtggaacaattcatccgtgaacatgtgaaggcataggttgttcttattgtttttggggctccaaatggctatcctgatgagataagatgtacattgcgtcaatgtggttgttacctttcatgcatgtacaccttcatccggtgctctgaagttgcttagagacagtgaagcacagtcatattttgaactggttcagctgacc

SEQ ID NO: 322 - DNA, 1107 bp, Setaria italica
gcacgtcgcaggcaaccaacgctgcggctggccggctgcgcttggggttctcgctactagccgtaggtgtgaccgcctttgtacccatccatcagggattggattgatttcttcctccgttggttcttgggctcgcgcgcgcgatggatgagtggattcggcaagcagaggcctgggtaggccaagcggagagctggatccgtcagcaacccccggaacagatctacgtcgccgccgtggtggttgccgtcacaatcctggtccttattgcagcttcttgtctgaaatcttcgaaaccgaacaccatagtgctatctgggctcagcggcagtggcaaaactactcttttctaccagcttcgggatggatcatcacatcaaggaactatgacttcaatggaagaaaacaatgatgaatttgtgctgaactcagagaaggaaagaaaaggaaaagtgagacctgtgcatattgttgatgtccccggtcatgcaaggctcaaacccaagctcgatgaagtgctgcctaaagcagctgggattgtttttgttgttgacgctcaggacttcttgtctagcatgcaagctgctgcagagtacctgtatgacactctaacgaaggcctctgtagtgaagaaaaaggttcctgtgctaatattctgcaacaagacagataaagttacagctcactcaaaggaattcatcaagaagcagttggaaaaagagataaacaagcttcgggaatcaaggaacgccatatcatcagctgacatctctgatgaagtcaagcttggggtacccggagaggcctttaacttcagtcaatgccagaacaaggtgacagttgctgaaggtgctggtttgactggtaatgtttcagctgttgagcaattcattcgcgaatatgtgaaggcctagtagactcattggatcatttatctgagctgtgaatgattcacctgatggcaagacaccttcataggttctgctgaccatgttgggtccagtacattttgcgttgattctgctgaccttgttagtggcattacatttttcttgcattgctaactcgtgatgagcgttgcatatgcaaatatagccttttaaagaa

SEQ ID NO: 323 - DNA, 1309 bp, Pennisetum glaucum
cgttcctttcttcttcgcgcagccagaccaccccgagcccaaaccccggaggcccggactcgaatccccccgccgtcaccgcctccctaggctccggcggcctccgccaccgcccggcgctaacccatttaatccatttgcacccgccacctccaccgcccagctccggcggcgtgcccgccgccttcgctcccccgctgtatcttccgcggttccgccaccaccgccggccagcctcccgaagcttcctctagttccggagggaacagggttcaagcagccatggatgagtggattcgccaagccgagctgtgggtacgccatgccgagacctggatccgtcagcagcctccggagcagatctatgtcgcgattgcagtggttgccttcacaatcctggtgcttatcgcagcatcttgtctgaaatcctcaaaatcaaacactgtggtgctatccgggcttactggcagtggcaaaacaactcttttctaccagcttcgggatggatcatcacatcaaggaactgtaacttcaatggaagaaaataatgatacgtttgtgctgcattcagagcaagaaaggaaaggcaaagtaaaacctgtgcatattgttgatgttcctggtcatgcaaggctcaaaccgaagcttgatgaggttctgcctaaagcagctgggcttgtttttgttgttgatgctcaagacttcttgtctagcatgcaagctgctgcagagtacctctatgacattctgacaaaggcaactgtagtgaagaaaaagattcctgtgcttatattctgcaacaagacagataaagttacagcccactcaaaggaattcatcaagaagcagttggaaaaggaaataaacaagcttcgtgaatcaaggaacgccatatcatcagctgacatctccgatgaagtccagcttggggtccctggagaggcattcaacttcagccagtgccagaacaaggtgactgttgcagaaggtgctggtttgactggtattgtttcagatgttgagcaattcatccgtgaaaatgttaaggcgtaggcccttattatcggagctgcaagtcgctcataggtagagggcaagaggcaaggccgtccatcgtgttgatgtggaattcctgcttatacattcatcggttttttgctgaccttttttttttgggtgaggcattgcactgctaacttatgagttatgacaaccattgggtatgaaatatacagcttgttaggaattatatccttggtcatggttttcttccgctcccaacgttggtattcccttgctgttggaattt

SEQ ID NO: 324 - DNA, 1335 bp, Panicum virgatum
aatctgctcggtctctgttcccctccccctatctccctttccttctctgccactgccgccgcctctcgccgcgtcgccggcggcggacgacgcggaggctcattccgccgattttccagtcgagcggcggcggcggcggcggcggcggcgtaaccctcctgctcatccccgccggccctccgttctccaacgcccgtcatcggccgcgcagatccgatccaagcagccatggatgagtggattcgccaggccgagttgtgggggcgccaggcggaggcctggatccgtcagcagcccccggagcagatctacgtcgcggccgcggtggtcgccctcacagtcctggtgcttatcgcagcatcttgtctgaaatcctcgaaaccgaacaccatagtgctatctgggcttagtagcagtggcaaaactactcttttctaccagcttcgggatggatcatcacatcaaggaactgtgacttcaatggaagaaaacaatgatacatttgttctgcattcggagaaagaaaggaaaggcaaagtaaaacctgtgcatattattgatgttcctggtcatccaaggctcaaacccaagcttgatgaagtcctgcctaaagcagctggggttgttttagttgttgatgctcaagatttcttgtccagcatgcaagctgcagcagagtatctgtatgacattctgacaaaggcaagtgtagtgaagaaaagggttcctgtgcttatattctgcaacaagactgataaagttacagcccattcgaaggaattcatcaagaagcagttggaaaaagaaataaacaagctccgcgaatcaaggaaggccatttcatcagctgacatctctgatgaggtccagcttggtgtccctggagaggcattcaacttcaaccagtgccagaacaaggtgacggtcgcagaaggcgctggcttgaccggcaatgtttcggctgtcgagcaattcatccgtgactatgtggaggcgtagatcctaattggctcacaggaagacggcaagactcaaagacatccattgcgccaatctggagttcctgcatatacctacctttatctggtttgctgacctttttagagaatcttagcattgcattgctaacacctgacagttaatgggtatgagtgtacacagcgtgttaattaagaactatacctggctgtatggttcttctttttcactatccaactttgatacttccttggtactgttttgttgcagctggaattacactgagggtatgcaattttttagctacaaaaagtttgtgttatgcaatgtgttggtgtcttggtttggatccaacaa

SEQ ID NO: 325 - DNA, 1358 bp, Panicum virgatum
aatctgctcggtctctgttcccctccccctatctccctttccttctctgccactgccgccgcctctcgccgcgtcgccggcggcggacgacgcggaggctcattccgccgattttccagtcgagcggcggcggcggcggcggcggcggcgtaaccctcctgctcatccccgccggccctccgttctccaacgcccgtcatcggccgcgcagatccgatccaagcagccatggatgagtggattcgccaggccgagttgtgggggcgccaggcggaggcctggatccgtcagcagcccccggagcagatctacgtcgcggccgcggtggtcgccctcacagtcctggtgcttatcgcagcatcttgtctgaaatcctcgaaaccgaacaccatagtgctatctgggcttagtagcagtggcaaaactactcttttctaccagcttcgggatggatcatcacatcaaggaactgtgacttcaatggaagaaaacaatgatacatttgttctgcattcggagaaagaaaggaaaggcaaagtaaaacctgtgcatattattgatgttcctggtcatccaaggctcaaacccaagcttgatgaagtcctgcctaaagcagctggggttgttttagttgttgatgctcaagatttcttgtccagcatgcaagctgcagcagagtaattttctgccttctgtttttattttttttagcaagtatctttggtgtctatttcatctgcttttaccttccattgtactggatttaaatttgctgtgtgattatgaaccttcttcatatcccaaacatttcagaaattactctgtttgatcaattcttaatgtagatagcattgtgcgactaggaggcttcatatcccaacattgcagaaatttttctgtatttgatcatttcttagaccgtcgtgagacaggttagttttaccctactgatgaccgtgccgcgatagtaattcaacctagtacgagaggaaccgttgattcacacaattggtcatcgcgcttggttgaaaagccagtggcgcgaagctaccgtgtgtcggattatgactgaacgcctctaagtcagaatccaagctagcaaccggcgcctgtgcccgccgctcgccccgacccacattagggcgttcgcgccccaagggcccgtgccattggctcagtctgcccggccgatgtgccgtggcaggccgcctcgaagctcccttcctcacgggcggcgggctgaatcctttgcagacgacaatccgtgcgacgcggggctggatctcagtggatcgtggcagcaaggccactctgccacgatccactgagatccagccccgtgtcgcacggattcgtcc

SEQ ID NO: 326 - DNA, 1284 bp, Pennisetum glaucum
gatgcaacatgccccttcgtccttcttcttccccaactcagacgaagcacggggggcgcacgtcgcaggcgacaacgctggcggctggcccgctgcgcttgggtggggttctcgctactagccgtaggtgtgacgacggcctctgtacccatccatcagggagtgggttgatttcttcctccgttgtgcgttcttgggctcgcgcgcgcgatggatgagtggattcggcaagcagaggcctgggtaggccaagcggagagctggatccgtcagcaacccccggagcagatctacgtcgccgccatggtgcttgccgtcacaatcctggtctttattgcagcttcttgtctgaaatcttcgaaaccgaacaccatagtgctatctgggctcagtggcagtggcaaaactactcttttctaccagcttcgggatggatcatcacatcgaggaactgtgacttcaatggaagaaaacaatgatgcatttgtgctgaactcagagaaggaaaggaaaggaaaagtgagacctgtgcatattgttgatgtccccggtcatgcaaggctcaaacccaagctcaatgaagtcctacctaaagcagctggggttgtttttgttgttgacgctcaagacttcttgtctagcatgcaagctgctgcagagtacctgtatgacactctgacaaaggcctctgtagtgaagaaaaaggttcctgtgctaatattctgcaacaagacagataaagttacagctcactcaaaggaattcatcaagaagcagttggaaaaagagataaacaagcttcgggaatcaaggaacgccatatcatcagctgacatctctgatgaagtcaagcttggggtacccggagaggtctttaacttcagccaatgccagaacaaggtgacagttgctgaaggtgctggtttgactggtcatgtttcggctgtcgagcagttcattcgcgaaaatgtgaaggccttgtagactccttggatcatttagctgagctgtgaatgattcacctgatcacaagacaccttcataggttctgctgaccttgttgcgtccagtacattttgcgtcaattctactgaccttgttagtggtatttacatttcgcttgcattgctaacttgtgaagagtgttgggtatgctgtatgcagatataggcatatagctatgtacattttgaattggattctgctgtgtttgttcccagctttgatctttggctgtctatgaaacatagtgctgagcttggcgctgtcacccttgcacgcttc

SEQ ID NO: 327 - DNA, 1127 bp, Secale cereale
gcgtcccaccgctcctagaggctagagcccccggcaccaccgccgctcgctcccctcgccctccgcgcggcgctcacggcgatggatgagtgggttcgccaggccgaggcgtgggcaggccaggccgagcgctggatccgccagcagcccccggagcagatttacgtcgccgtcgccgtgattgccgtcacaattctggtgctcctcgcagcttcttgtctgaaatcatcgaaatcaaacaccattgtgctatctgggctaagtggaagtggtaaaactattcttttctaccagcttcgtgatggatcatctcatcaaggaactgtgacatcgatggatcctaacaatgatacgtttgtgctacattcagagcttgaaaggaaaggcaaagtaaaacctgtccatgttgttgatgttcctggtcatgcaaggctgaaacccaagctggatgaattcctgcctcgggcagctggagttgtttttgttgttgatgctcaggatttcttgtctagcatgcaagctgctgcagagtacttatatgacattttgacgaaggctactgtggtgaagaaaagggttcctgttcttatattctgcaataaaacagacaaagttaccgctcactcgaaggagttcatcaagaagcagctggaaaaagaattgaacaagcttcgggaatcgaggaatgccatatcatctgctgacatcactgatgaagtcgagcttggtgtccctggagaggcattcaacttcagtcaatgccagaacaaggtgacagttgctgaaggcgctggtctcaccggcaatgtttcagcagtcgagcaattcatccgcgagcacgtcagggcttagatttgtctcgtcctttcagagtagtgtttatgtctctctttagaattgctgtctgagttcgcgactagttttacctgatgaaagaagggctgtcttggatgtgctgactctgtagagctgtaacgatttgcactgctagctcctgactgacgttgactcacatgattggtggttttcacatgaacatttcacaagtttcagaggaaactgccatgttccgaaaagggcatcaatgatttcgaaactattggttattctgtcaatgatatccagtt

SEQ ID NO: 328 - DNA, 1314 bp, Triticum aestivum
ctccgcgtcccgccgctccgagaggctagagcccccggcgccaccgccgctcgctcccctcgccctccgcgcggcgctcacggcgatggatgagtgggttcgccaggccgaggcgtgggcgggccaggccgagcgctggatccgccagcagcccccggagcagatttacgtcgccgtcgccgtgattgccgtcacaattctggtgctcctcgcagcttcttgtctgaaatcatcgaaatcaaacaccattgtgctatccgggctaagtggaagtggtaaaactattcttttctaccagcttcgcgatggatcatctcatcaaggaactgtgacatcgatggatcctaacaatgatacgtttgtgctacattcagagcttgaaaggaaaggcaaagtaaaacctgtccatgttgttgatgttcctggtcatgcaaggctgaaacccaagctggatgaattcctgcctcgggcagctggagttgtttttgttgttgatgctcaggatttcttgtctagcatgcaagctgctgcagagtacttatatgacattttgacgaaggctactgtggtgaagaaaagggttcctgttcttatattctgcaataaaacagacaaagttaccgctcactcgaaggagttcatcaagaagcagctggaaaaagaagtgaacaagcttcgggaatcgaggaatgccatatcatctgctgacatcactgatgaagtcgagcttggtgtccctggagaggcattcaacttcagtcaatgccagaacaaggtgacagttgctgaaggcgctggtctcaccggcaatgtttcagcagtcgagcaattcatccgcgagcacgtcagggcttagatttgtctcatcctttcagagtagtgtttatgtctctgcagaattgctgtctgagttcgcgactagttttacctgatgaaagaagggctaccatgggtgtgctgactctgtagatgtgtaacgatttgcactgctagctcttgactgacgttgactcacatgattggtggtttcacatgaacatttcacaagtttcagaggaaactgccatgttccgaaaggggcatcgatgatttcaaaacagttggttattctgtctatgatatcctgttcgttgttgctgctttgccgttaaccattctatctagacttcaaaatggaaaagtttgtttagcctgagggctctcaattttctttacacgatgttaagacaactcggagcatcgcatcacatcaaaagtataatcaggtaatttcattacattgaccaaaagtataatcaagtataattgtagttg

SEQ ID NO: 329 - DNA, 1222 bp, Brachypodium distachyon
gcgacgcatcgtgatctgcagcatctgcttcttcttccagctcctcgcctccccctcctcccgctttcccaaccccctgccccgccgcttcccagatctcccgggcggcgcccaccccccgtcgcgcttctcgcggcgctcgtgcttcggcgatggacgagtttgtccgccaggccgaggcgtgggcgggcgaggccgagcgctggatccgccagcagcccccggagcagatttacgtcgccgccgccgtggtcgccgtcacgattctggtgctcctcgcagcttcttgtctgaaatcctcaaaatcaaacaccatagtgctctctgggcttagtggaagtggtaaaactatactcttctaccagcttcgcgatggatcatcacatcaagggactgtgacatcgatggaacataacaatgatacatttgtgctgcattcagagcttgaaaggaaaggcaaaataaaacctgttcatgttgttgatgttcctggtcatgcaaggctgaaacccaagcttgatgaattcctccctcaggcagctggggttgtttttgttgtggatgctcaggatttcttgtctagcatgcaagctgctgcagagtacttatatgacattttgacgaaggcaactgtagtgaagaaaaggattcctgttctgatattctgcaacaagacagacaaagttacagctcactcaaaggagttcatcaagaagcagctggagaaggaagtcaacaagcttcgggaatcgaggaatgccatatcatctgctgacatcactgacgaagtccagcttggtgtccctggagaggcattcaacttcagcaagtgccagaacaaggtgacagtcgctgaaggtgctggtcttaccggcagtgtttcagaggtggagcaattcatccgcgagtatgtcaaggcctagattcatcccatcctgatacaaattagtgtttatgtctctgcaaaattgctgtccgcgttgccagacgtttgttggcgtgatgaacaaattcacatcgctagcttctgaccggtgctgcctctgaacatgatctgttataaaaactataggttctgtcctgaatgtgtggttttcacatgattatttcatgagtttcaaagggaacacaacaatctctgtagtaatctgccatgctccaaaaggtgcataaatgattacaaaactcgtggttattctatcccgttttgttgtttttggcc

SEQ ID NO: 330 - DNA, 1045 bp, Lolium multiflorum
ccccccgcgcgcccgccgcgcggccatggacgagtggctcaaccaggccgaggcgtgggcgggccaggccgagcgctggatccgccagcagcccccggagcagatttacgtcgccgtcgccgtcatcgccctcactgtcctggtgctcctcgcagcttcttgtttgaaatcctcgaaatccaacaccatagtgctatctgggcttagtggaagtggtaaaactattcttttctaccagcttcgcgatggatcatcacatcagggaactgtgacatcaatggaacataacaatgatacgtttgtgctgcattcagaacttgaaaggaatggcaaagtgaaacctgttcatgttgttgatgttcctggtcatgcaaggctgaaacctaagcttgatgagttcctgcctcaggcagctggagttgtttttgttgttgatgctcaggatttcctttctagcatgcaagctgctgcagagtacttgtatgacattttgacaaaggcaactgtagtgaagaaaaggattcctgttctgattttctgcaacaagacagacaaagtcacagctcactcaaaggagttcatcaagaagcagctcgaaaaagaagtgaacaagcttcgggaatcaaggaatgccatatcatctgctgacatcaccgacgaagtccagcttggtgtccctggagaggcgttcaacttcagccaatgccagaacaatgtgacagttgctgaaggtgccggtctcactggcaatgtttcagcagtcgagcaattcatccgcgagcatgtgaaggcttagattcatcccattcttgcgaagtagtgcttatgtctctgaaaaatcgctatccgagttgtgcctggttttacttgacgaaagaaggaaaacggttaccatagttgatgtgctgactttgtagaggcatagacaattggtatttgctagctccttaccgacgttgagtctgaacatgatcagctttaaaactaaggacctgatctgaaagcgttggtttgacatgaatatttggcaattttcagaggaacc

SEQ ID NO: 331 - DNA, 1119 bp, Avena sativa
ttctcctccttccccttcccgctccccttccacttccggcaatctccccgtccggccgctcctaaatcccgccgcccgtcccccctcgcgctccgtgtgcttgcgcggcgatggatgagtggattaaccaggccgaggcgtgggcgggccaggccgagcgctggatccgccagcagcccccggagcagatttacgtcgccgtcgcggtgattgccctcacaattctggtgctcgtcgcagcttcttgtttcaaatcctcgaaatccaacaccatagtgctttctgggcttagcggaagcggtaaaactattctcttctaccagcttcgcgatggatcagcacatcaaggaaccgtgacatcaatggaacataacaatgataccttcgtgctgcattcagaacttgaaaggaaaggcaaagtgaaacctgttcatattgttgatgttcccggtcatgcaaggctgaaacctaagcttgatgagttcctgcctcaggcagctggagttgtttttgttgtcgatgctcaggatttcctgtctagcatgcaagctgctgcagagtacttgtatgacattttgacaaaagcaactgtagtgaagaaaagggttcctgttctgatattctgcaacaaaacggacaaagttacagcccactcaaaggagttcatcaagaagcagctcgaaaaagaagtgaacaagcttcgggaatcaaggaatgccatatcatctgctgacatcaccgacgaagtccagcttggtgtccctggagaggcattcaacttcagccaatgccagaacaatgtgacagttgctgaaggtgctggtctcactggcaacgtttcagcagtcgagcaattcatccgcgagcacgtgaaggcttagattcatcccgtccctgcgaagtagtgcttatgtctcttgaaaaatcgctatccgagttgtgcctggttttacctgacgaaagaaggaaaatggttgtcatgtttgatgtgctgactgtgtagaggcataccaattggcattgccagctcctgactgacgttgagtctgaacatgatcagctataaaactaaggtcctgttctgaatgcgttgtttcacatgaatatttgactagtttg

SEQ ID NO: 332 - DNA, 1125 bp, Brachypodium distachyon
ccagcatctgcttcttcctcctcctcccgctttcccaactcgccacatcccagaaatctccccgcccccgccgctccctagatctcgcggcgcccaccacccgcggtcgcgcttcggcgatggacgagtgggtccgccaggcggaggcgtgggcgggggaggccgagcgctggatccgccagcagcccccggagcagatttacgtcgccgccgccgtggttgccgtcacggttctggtgctcctcgcagcttcttgtctgaaatcctcgaaatcaaacaccatagtgctttctgggcttagtggaagtggtaaaactatactcttctatcagcttcgtgatggatcatctcatcaagggactgtgacatcgatggaacataacaatgatacatttgtgctgcattcagagcttgaaaggaaaggcaaaataaaacctgttcatgttgttgatgttcctggtcacgcaaggctgaaacccaagcttgatgaattcctccctcagacagccggagttgtttttgttgtggatgctcaagatttcttgtctagcatgcaagctgctgcagagtacttgtatgacattttgacgaaggcaactgtagtgaagaaaaggattcctgttctgatattctgtaacaagacagacaaagttacagctcactcaaaggagttcatcaagaagcagctggagaaggaagtcaacaagcttcgggagtcgaggaacgccatatcatctgctgacatcaccgacgaagtccagcttggtgtccctggagaggcattcaacttcagccagtgcctaaacaaggtgacagttgctgaaggtgctggtcttactggcaatgtttcagaggtggagcaattcatccgcgagtatgtcaaggcttagattcatcccatcattgatacaaagtagtgtttatgtctctgcaaaattgctgtccgaattgccattgattcacctgacgagagaatgtttgtttgcgtgatgaacaattcacatctctagcttctgactggcactgcctctgaacatgatctgttataaaaactttaggtcctgtcctgaatgtgtggttttcacatgattatttcatcagtttcgaaggaaacacaacaatctc

SEQ ID NO: 333 - DNA, 1118 bp, Festuca arundinacea
ggcacgaggcgtccactccccgtcccgctgctcctagatcccgccgccccaccgccgctcttcctcccccctcgccctcctcgcggcgctcgcgccgccatggacgagtggcttaaccaggccgaggcgtgggcgggccaggccgagcgctggatccgccagcagcccccggagcagatttacgtcgccgtcgcggtcattgcccttacaattctggtgctcgtcgcagcttcttgtttgaaatcctcgaaatcaaacaccatagtgctatctgggcttagtggaagtggtaaaactattcttttctaccagcttcgcgatggatcatcacatcaaggaaccgtgacatcaatggaacataacaatgatacgtttgtgctgcattcagaacttgaaaggaatggcaaagtgaaacctgttcatgttgttgatgttcctggccatgcaaggctgaaacctaagcttgatgagttcctgcctcaggcagctggagttgtttttgttgttgatgctcaggatttcctttctagcatgcaagctgctgcagagtacttgtatgacattttgacaaaggcaactgtagtgaagaaaagggttcctgttctgattttctgcaacaagacggacaaagttacagctcactcaaaggagttcatcaagaagcagcttgaaaaagaagtgaacaagcttcgggaatcaaggaatgccatatcacctgctgacatcaccgacgaagtccagcttggtatccctggagaggcattcaacttcagccaatgccagaacaatgtgacagttgctgaaggcgccggtctcactggcaatgtttcagcagtcgagaaattcatccgcgagcatgtgaaggcttagttccatcccatccttggaaagtagtgcgtatgtctctgaaaaatcgctctctgagttgtgcctggttttacctgacgaagaaggaaaacggttaccatgctttatgtgctgactctgtagaggcataaacaattggcattgctagctccttactgacgctgggtatgaacatgatcagctataaaactaaggacctgttctgaaagcgttggtttcacatgaatatttgacaaaaaaaaaaaaaaaaa

SEQ ID NO: 334 - DNA, 1179 bp, Leymus cinereus x Leymus triticoides
tctgcttcccctcctccatctcctccgctgtcccactgtccttccgggatttctcgccgtcccgccgctcatagaggctagagcccccggcgccaccgccgctcgttcccctcgccttccgtgcggcgctcacgaggcgatggatgagtgggttcgccaggccgaggcgtgggcaggccaggccgagagctggatccgtcagcagcccccggagcagatttacgtcgccgtcgctgtgattgccgtcacaattctggtgctcctcgcagcttcttgtctgaaatcatcgaaatcaaacaccattgtgctatctgggctaagtggaagtggtaaaactattctcttctaccagcttcgcgatggatcatgtcatcaaggaactgtgacatcgatggatcctaacaatgatacgtttgtgctacattcagagcttgaaagaaaaggcaaagtgaaacctatccatgttgttgatgttcctggtcatgcaaggctgaaacccaagctggatgagttcctgcctcgggcagctggagttgtttttgttgtcgatgctcaggatttcttgtctagcatgcaagctgctgcagagtacttatatgacattttgacgaaggctgctgtcgtcaagaaaagggttcctgttcttatattctgcaataaaacagacaaagttaccgctcactcgaaggagttcatcaagaagcagctggaaaaagaagtgaacaagcttcgggaatcgaggaatgccatatcatctgctgatatcactgatgaagtcgagcttggtgtccctggagaggcattcaacttcagtcaatgccagaacaaggtgacagttgctgaaggtgctggtctcaccggcaatgtttcagcaatcgagcaattcatccgcgagcacgtcagggcttagatttatctcatcctttcagagtagtgtttatgtctctctgcagaattgctgtctgagtttgcgactggttttacctgatgaaagaaggaaaaccgctaccatgggtgtgctgactctgtagaggtgtaacgatttgcactgctagctcctgactaacgttgactcacatgattggtggttttcacatgaatatttcacaagtttcagaggaaactgcaatgttccgaaaggggcataattgatttcaaaactattggttattctgtcta

SEQ ID NO: 335 - DNA, 968 bp, Hordeum vulgare
cacgcaccgcatcgtgatctgcttccagacgagtcccccttcttcgcctccatctcctccgctgtcccactgtcctatcgtgattctccgcgtcccggcgctcctagaggctagagcccccggcgccaccgccgctcgctcccctcgccctccacgcgccggtcacggcgatggatgagtgggttcgccaggccgaggcgtgggcgggccaggccgagcgctggatccgccagcagcccccggagcagatttacgtcgccgtcgccgtgatagccgtcacaattctggtgctgcttgcagcttcttgtctgaaatcatcaaaatcaaacaccattgtgctatctggcctaagtggaagtggtaaaactattcttttctaccagcttcgtgatggatcatctcatcaaggaactgtgacatcgatggatcctaacaatgacacgtttgtgctatattcagagatggaaaggaaaggcaaagtaaaacctgtcaatgttgttgatgttcctggtcatgcaaggctgaaacccaagctggatgagttcctgcctcgggcagctggagttgtttttgttgttgatgctcaggatttcttgtctagcatgcaagctgctgcagagtacttgtatgacattttggcaaaggctactgtggtgaagaaaagggttcctgttcttatattctgcaataaaacagacaaagttactgctcactcgaaggagttcatcaagaagcagctggaaaaagaagtgaacaagcttcgggaatcgaggaatgcgatatcatctgccgacatcactgatgaaatcgagcttggtgtccctggagaggcatttaacttcagtcaatgccagaacaaggtgacagttgctgaaggtgctggtctcaccggcaatgtttcagcagtcgagcaattcatccgtgagcacgtcagggcttagatttgtctcatcctttcatagtagtgt

SEQ ID NO: 336 - DNA, 1094 bp, Avena sativa
cccgctccccttccacttccggcaatctccccgtccggccgctcctaaatcccgctgccctacgccgctcgtcctccctcgcgcggcgatggatgagtggattaaccaggccgaggcgtgggcgggccaggccgagcgctggatccgccagcagcccccggagcagatttacgtcgccgtcgcggtgattgtcctcacacttctggtgctcttcgcagcttcttgtttcaaatcctcgaaatccaacaccatagtgctttctgggcttagcggaagtggtaaaactattctcttctaccagcttcgcgatggatcagcacatcaaggaaccgtgacatcaatggaacataacaatgatacgttcgtgctgcattcagaacttgaaaggaaaggcaaagtgaagcctgttcatattgttgatgttcccggtcatgcaaggctgaaacctaagcttgatgagttcctgcctcaggcagctggagttgtttttgttgtcgatgctcaggatttcctatctagcatgcaagctgctgcagagtacttgtatgacattttgacaaaagcaactgtagtgaagaaaagggttcctgttctgatattctgcaataaaacggacaaagttacagcccactcaaaggagttcatcaagaagcagctcgaaaaagaagtgaacaagcttcgggaatcaaggaatgccatatcatctgctgacataaccgacgaagtccagcttggtgtccctggagaggcattcaacttcagccaatgccagaacaatgtgacagttgctgaaggtgccggtctcactggcaatgtttcagcagtcgagcaattcatccgcgagcacgtgagggcttagattcatcccatccttgcaaagtagtgcttatgtctctgaaaaatcgctatccgagttgtgcatggataccgtacgaaagaaggaaaacggttatcatgtttgatgtgctgactctgtagaggcataacaattggcattgctagctcctgactgacgttgagtctgaacatgatcagctataaaactaaggtcctgttctgaatgcgttggtttcacatgaatatttgactagttt

SEQ ID NO: 337 - DNA, 1005 bp, Avena sativa
ggattaaccaggccgaggcgtgggcgggccaagccgagcgctggatccgccagcagcccccggagcagatttacgtcgccgtcgcggtgattgccctcacaattctggtgctcttcgcagcttcttgtttcaaatcctcgaaatccaacaccatagtgctttctgggcttagcggaagcggtaaaactattctcttctaccagcttcgtgatggatcagcacatcaaggaaccgtgacatcaatggaacataacaatgatacgttcgtgctgcattcagaacttgaaaggaaaggcaaagtgaaacctgttcatgttgttgatgttcctggtcatgcaaggctgaaacctaagcttgatgagttcctgcctcaggcagctggagttgtttttgttgtcgatgctcaggatttcctatctagcatgcaagctgctgcagagtacttgtatgacattttgacaaaagcaactgtagtgaagaaaagggttcctgttctgatattctgcaacaaaacggacaaagttacagcccactcaaaggagttcatcaagaagcagctcgaaaaagaagtgaacaagcttcgggaatcaaggaatgccatatcatctgctgacatcaccgacgaagtccagcttggtgtccctggagaggcattcaacttcagccaatgccagaacaatgtgacagttgctgaaggtgccggtctcactggcaatgtttcagcagtcgaacaattcatccgcgagcacgtgagggcttagattcatcccatccttgtgaagtagtgcctatgtctctgaaaaatcgctatctgagttgcacctgttttttttttctgacggatgaaggaaaactgttatcatgtttgatgtgctgactctgtagaggcataacaattggcattgctagctcctgactgacgttgagtctgaacatgatcagctataaaactaaggtcctgttctgaatgcgttggtttcacatgaatatttgactagtttggga

SEQ ID NO: 338 - DNA, 1030 bp, Oryza sativa
cggagagggagggtgtaacacgcgcaggcctgcgccgtcgtcctgctctgggaacttccgcgtgcagcgagggatggacgagtgggttcgccaggccgaggtgtgggtgggacaagccgagaggtggatccggcagcagcctcccgagcaggtttacgtcgccgtcgcggtggtcgccgtgacggttctgttgctggtcgcagtttcgtgcctgaaatcctcgaaagcaaacaccatagtgctatctgggctcagtggtagtggcaaaactattctcttctaccagcttcgggatggatcaacacatcaaggaactgtgacttcaatggaacaaaacaacgatactttcgtgcttcattctgagctggagaggagaggcaaagtaaaacctgttcatgttgttgacgttcctggtcatgcaaggctcaaacccaaacttgatgaagtcctgcctcaagcagctggaatagtttatgttgttgatgctcaagatttcttgtctaccatgcatgctgctgcagagtacttgtatgacatcctgacaaaggcaactgtagtgaagaagagggttcctgttctgatattctgcaacaagacagataaagttacagctcactcaaaagaattcatcaagaagcaattggaaaaggaattaaacaagctccgggaatcaaggaacgccatatcatctgctgacatcactgatgaagtcaagcttgggaaccctggagaagcatttaatttcagccaatgccagaacaaggtgacagttactgaaggtgctggtctgaccggtaatgtttcagcggttgaggagttcattcgtgagtatgtgaaagcttaggccttagagttgtcggacctttacagaatagagtttgtattcgttcaaaattgtcatctaagcggagactgattttcctgatggaagaaggaaaaccttcatcatctcatctgcatctgcttcattccattcatgcgtgtgagaaatttcaacattttcttgaaaggaaagcatcggacattcagt

SEQ ID NO: 339 - DNA, 1406 bp, Triticum aestivum
cccagcctccccctttctcctcccgtgcgaaaaccctcgactcgtcgtcctcctctcgcttctcctaccttccttctagaaacctcccctcccctcccctcccccgagatctcccggcgccacacagctgctccctccgccaccacctcgccctctccttccctctccgtgcttgcgcgacgatggacgagtgggttcgccaagcggaggcgtgggcaggccaagcagagcactggatccgccagcaacccccggagcagatttacgtcgcggtcgccgtgattgcggtgacgattctggtgctggtcgcagcttcttgtctgaaatcatcgaaacctaacaccatagttctatccgggcttagtggcagcggcaaaactgttcttttctatcagcttcgcgatggatcatcacatcagggaactgtgacttcgatgacacataacaatgctacatttgtgctgcactcggagctggaaaggaaaggcaaagtaaaacctgttcatgttatcgatgttcctggtcatgcaaggctgaaatcgaagcttgatgaagtcctgcctcaggcagctgggattgtttttgtcgtggatgctctagatttcttgtctagcatgcaagctgctgcagagtacttgtatgacattttgacgaaggcaactgtagtgaagaaaaggattcctgttctgatattctgcaacaagacagataaagttacagctcactcaaaggagttcatcaagaagcagttggagaaagaagtaaacaagctccgggaatcaaggaacgccatatcatccgctgacatcagtgatgaagtccaacttgggttacctggagaggcattcaacttcagccagtgccagaacaaggtgatagttgatgaaggtgctggtctgactggtgatgtttcagcagttgagcagttcatccgcgagtatgtgaagccatagattgatctttcatcccatcgtcatagtagtgactgtgtttctgcacaagtgtaatctgatctgtgactaattttggcccgacgaaagaaggaaaagtgggaaaccatcagcatcaccccttcccattagatctactgttgtcctgacttgactttgtgagacatagaaaattgcattggtagcttctgacgaacgtttgaggttcagaacctgatctgttatagaaatatcgttgaacattaccatgttgttatgtattccttcagccatgactcgctagtcatctgctggctatctcagagcagctgcaatgttctgaattcagaattgtatggtgtggcttcgtgcttaacctttatgatggccatgcctgtggaatgttatgctcctgaactactgttccaatcagattagctgaaagtttttgtgaattttggtgaaatatatacttat

SEQ ID NO: 340 - DNA, 1141 bp, Aegilops tauschii
ctcgactcgtcgtcctcctctcgcttctcctaccttccttctagaaacctcccctcccctcccctcccccgagatctcccggcgccacacagctgctccctccgccaccacctcgccctctccttccctgtgcttgcgcgacgatggacgagtgggttcgccaagcggaggcgtgggcaggccaagcagagcactggatccgccagcaacccccggagcagatttacgtcgcggtcgccgtgattgcggtgacgattctggtgctggtcgcagcttcttgtctgaaatcatcgaaaccgaacaccatagttctatccgggcttagtggcagcggcaaaactgttcttttctatcagcttcgcgatgggtcatcacatcagggaactgtgacttcgatgacacataacaatgctacatttgtgctgcactcggagctggaaaggaaaggcaaaataaaacctgttcatgttatcgatgttcctggtcatgcaaggctgaaatcgaagcttgatgaagtcctgcctcaggcagctggggttgtttttgtcgtcgatgctctagatttcttgtctagcatgcaagcttctgcagagtacttgtatgacattttgacgaaggcaactgtagtgaagaaaaggattcctgttctgatattctgcaacaagacagataaagttacagctcactcaaaggagttcatcaagaagcagttggagaaagaagtaaacaagctccgggaatcaaggaacgccatatcatccgctgacatcagtgatgaagtccaacttgggttacctggagaggcattcaacttcagccagtgtcagaacaaggtgatagttgatgaaggtgctggtctgactggtgatgtttcagcagttgagcagttcatccgcgagtatgtgaagccatagattgatctttcatcccatcgtcatagtagtgactgtgtttctgcacaagtgtaatctgatctgtgactaatttttgcccgacgaaagaaggaaaagtgggaaaccatcagcatcaccccctcccattagatctactgttgtcctgacttgactttgtgagacatagaaaattgcattggtagcttctgacgaacgtttgaggttcagaacctgatctgttatagaaa

SEQ ID NO: 341 - DNA, 1106 bp, Secale cereale
gatctcccggcgccacacagccgctccctccacccccacctcgccctctccttccccgtgcttgcgcgacgatggacgagtgggttcgccaggcggaggcgtgggcgggccaagcggagcactggatccgccagcagcccccggagcagatttacgtcgcggtcgccgtcattgcggtgacgattctggtgctggtcgcagcttcttgtctgaaatcatcgaaacctaacaccatagttctatccgggcttagtggcagcggcaaaactgttcttttctatcagcttcgcgatggatcatcacatcagggaactgtgacttcgatgacacataacaatgctacatttgtgctgcactcggagatggaaaggaaaggcaaaataaaacctgttcatgttatcgatgttcctggtcatgcaaggctgaaatcgaagcttgatgaagtcctgcctcaggcagctggtgttgtttttgtcgtcgatgctctagatttcttgtctagcatgcaagctgctgcagagtacttgtatgacattttgacgaaggcaactgtagtgaagaaaaggattcctcttctgatattctgcaacaagacagataaagttacagctcactcaaaggagttcatcaagaagcagttggagaaagaagtaaacaagctccgggaatcaaggaacgccatatcatccgctgacatcagtgatgaagtccaacttgggttacctggagaggcattcaacttcagccagtgccagaacaaggtgatagttgatgaaggtgctggtctgactggtgatgtttcagcagttgagcagttcatccgcgagtatgtgaagccatagagtcatctttcaccccatcgtgatggtagtgactaatgtttctgcagagtagtaatctgagctgtgacaaattttggcctcgaaagaaggaaaagtgggaaaccatcagcatgatcccctcccattaaatctactgttgtcctgacttgactttgtgagacatagaaaattgcattggtagcttctgacaaatgtttgagcattccgaacctgatctgttatagaaatattgttgaacattaccatgttgttatgtactacccc

SEQ ID NO: 342 - DNA, 1328 bp, Secale cereale
tcctctcgcttctcctaccttccttctagaaactcccccccctcccctcccccgagatctgccggcgccacacagccgctccctacacccccacctcgccctctccttccccgtgcttgcgcgacgatggacgagtgggttcgccaggcggaggcgtgggcgggccaagcggagcactggatccgccagcagcccccggagcagatttacgtcgcggtcgccgtgattgcggtgacgattctcgtgctggtcgcagcttcttttctgaaatcatcgaaacctaacaccatagttctatccgggcttagtggcagcggcaaaactgttcttttctatcagcttcgcgatggatcatcacatcagggaactgtgacttcgatgacacataacaatgctacatttgtgctgcactcggagatggaaaggaaaggcaaaataaaacctgttcatgttatcgatgttcctggtcatgcaaggctgaaatcgaagcttgatgaagtcctgcctcaggcagctggtgttgtttttgtcgtcgatgctctagatttcttgtctagcatgcaagctgctgcagagtacttgtatgacattttgacgaaggcaactgtagtgaagaaaaggattcctcttctgatattctgcaacaagacagataaagttacagctcactcaaaggagttcatcaagaagcagttggagaaagaagtaaacaagctccgggaatcaaggaacgccatatcatccgctgacatcagtgatgaagtccaacttgggttacctggagaggcattcaacttcagccagtgccagaacaaggtgatagttgctgaaggtgctggtctgactggtgatgtttcagcagttgagcagttcatccgcgagtatgtgaagccatagagtcatctttcaccccatcgtcatggtagtgactaatgtttctgcagaggagtaatctgagctgtgacaaattttggcctgacgaaagaaggaaaagtgggaaaccatcagcatgatcccctcccattaaatctactgttgtcctgacttgactttgtgagacatagaaaattgcattggtagcttctgacaaatgtttgagcattccgaacctgatctgttatagaaatattgttgaacattaccatattgttatgtactacccccttcgtcccataatataagacatttttgcaagttgttttagcttgcaaaaacatcttatattgtgggatggagggagttggttttatttcattcttgtccctggtcccatttctttttttgggctaggatagtagaacagctcgatggtgttcttagaaaaccgt

SEQ ID NO: 343 - DNA, 1399 bp, Eragrostis curvula
ccccccccttttttagaggcgtttctctcctcccctcccgttcctctgctcgagctggtcgagcgaagccagcccgccggccgtccccagccatggacgagtgggttcgccaagctcaggtctgggctgcccaagccgagagctgggtccgtcagcagccgccggagcagatctacgtcgccgccgccgtggtcgccttcactatcctggtcctcatcgcagcttcttgtctgaaatcctctaaagccaacacgatcgtgctatctggactgaatggcagtggtaaaactactcttttctaccagcttcgggatggatcgtcacaccaaggaactgtaacttctatggaagaaaatgatgatatatttgtgctgcactcagagcaggaaaggaaaggcaaagtaaagcccgtgcatgttgtcgatgttcctggccatgcaaggcttaaacccaagcttgatgaagtccttcctaaagcagctggggtggtttttgtcgttgatgctcaagactttttgtctagcatgcaagctgctgccgagtacctgtatgacattctgaccaaggctactgtagtgaagaaaatggttcctgtgctgattttctgcaacaagacagataaagttactgctccctcgaaggaattcatcaagaaagcagttggaaaaagaaataaaccagcttcgggagtcaaggaatgccctatcctcagctgacttatctgatgaagtcaggcttggggtccctggaagaacatttatctttcagtcattgcccagaacaaagtgaccgttgaggaaggggctgggtttgatgggaaaggtttcagctggcaaggaattctttctggatatgttaagggtttggttttgttctgactggttctttgagcttaaaatgattccccccgggggaagcagaacatttccccttatgggattggtggtcaaatttttggcattatacttcctaaagttttgcggaaccttggggtaagggtttaacagttatccctttatcaaactccggttagggcatttattgggataatttttggaaaaaataaaaaaaaaaaaacaaaacatatattcttccttgggttttcatcctcctgctttcctcccttttgtgtatttcctcgccccccgtccgcggtcaaaccctattggtgggaatcccccccacgcccgtatgaggggcgctaactgttgctattatttctataagggcgcccccctctcaataatctggggggcgcaaacacaaggcggcctacaatacgctttgtttctgctggcgggtgtataaatttggtttaatctcctcagtcccccccacaaatgctcccccactaccgccaccccacagccagacgaggcagcccgtgcataagagaatg

SEQ ID NO: 344 - DNA, 994 bp, Hordeum vulgare
gtttttttctttttcctcccagcctccccatttctcctcccgtgcgaaaaccctcgcctcgtcgtcctcctcatcctcctcgtttctcctaccttccttctagaaatctcttctcccctcccctcccctcccctcccctgcgagatcttccggcgccccgcggccgctccccccaccccccagcttgccctctccttccctgtgctcgcgcgacgatggacgagttggttcgccaagcggaggcgtgggcgggccaagcagagcactggatccgccagcaaccctcggagcagatttacgtcgcggtcgccgtgattgcggtgacgattctcgtgctggtcgcagcttcctgtctgaaatcatcgaaacctaacaccatagttctatccgggcttagtggcagtggcaaaactgttcttttctatcagcttcgcgatggatcatcacatcagggaactgtgacttcaatggcacataacaatgctacatttgtgctgcactcagagctggaaaggcagaaaggcaaaatgaaacctgttcatgttatcgatgttcctggtcatgcaaggctgaaatcgaagcttgatgaagtcctgcctcaggcagctgggattgtttttgttgtcgatgctctggatttcttgtctagcatgcaagctgctgcagagtacttgtatgacattttgacaaaggcaactgtagcgaagaaaaggattcctgttctgatattctgcaacaagacagataaagttacagctcactcaaaggagttcatcaagaagcagttggagaaggaagtaaacaagctccgggaatcaaggaatgccatatcatccgctgacatcactgatgaagtccaaattggggtccccggagaggcattcaacttcagccagtgccagaacaaggtcatagttggtgaaggtgctggtctgactggtgatgtttcagcagtcgagcagttcatccgcgagtatgtgaagctatagattcg

SEQ ID NO: 345 - DNA, 1922 bp, Setaria italica
aaaaccacttgggccgccaccgccccgccagcctctctttctcccgcctcccgagcgcccgcccaacggggccaagcgcagtcgcgccatggcgccgttccagatgcgcttcgggctccagatctcccctgcgcgctccgactacgaggaggacgacgaagaggaggaggacgaggaggaagagtacgacgagatggagagcgaggggacggcctcgcccccgatgacgatgctgcgggcggggaggggaggtggtggagcagggggagggctggtgggcgcggtggtcggagcgctgcggaggtcgctggtgatgtgcagcgccggcgccgtgggggacgaggacgacgacgaggaggaggacggcagcgagggggaagggatcgagattgggcggcccacggacgtgcggcacgtctcccacgtcaccttcgaccgcttcggcggcttcctcggcctccccgccgacctcgagcccgaagtgccgcgccgcacgcccagcgccagtgtgagtgtatttggggtttcacctacctctctgcaatgttcatatgatcaaagagggaacagtgtgcccacaatactgttaatgatgcagaggaagttatatgtacgtgaaggacttaagattgaagggatcttcaggattaatgcagaaaacagtgaggaagtcaacgtcagggcccaattaaacagtggagtggttccagatgaagttgacttgcactgccttgctgggttgataaaggcatggtttcgggaacttcctgcaggagtcttggacgcactgacacctgaacaagtaatgcactgcaacacggaaaaggagtgtgccctccttgcttctatgttaccaccagtggaagcagcactacttgattgggcaattaatctgatggccgatgttgtagagcatgaaagccacaacaagatgaacgcccgaaacattgcgatggttttcgcacccaatatgactcagatggccgatccgttaaccgccctgatacatgcagttcaggtgatgaatttcctcaagactttaatcttgaagactttaaaagaacgaaaggaggcagctggagcagtttgggcattgcaatcatgctccggttccccacatgaccaagatgagcctcagatgccagagcatttggagaaaccttcagttctttcaagtcagaaagactttgattttcccatgattgatagggccactcctgttcaagtccttggagctgagaaagctatccatcatgactcacaaagccgttctgatgagccaaagaagtttggaattgacatggaccgcaagaaaagccacagtgatgtttcctctcttggcagagatctgagaaaccgagtcagtggttctggaagagaattcggtaacagaaatacggaaggcttgttcgacagatttagttttaggaaaggggttgagaggctttgcaggcatcccgtgttccaattgagtaggtccatgaagaagtctgcagacgttgtggtctttgatgcccccagagaagcaagacaagcctgggtatgatacgatgacgatattgcatgtaatatctagttggtgatgctactcttttcacctttgtgtgtagcaattagccattcccctagtttgtgtgagtagaaccgattagtggttagcttgttaggttacaaaattgaggttatctgggtgtataatatcgccgtttacttccgacgaaagtgtctggagaagtagcatgtagcttccaccgagtgaactcaggctccgtggctccgtggctccgtgctgtatgtatacctgaaatgattgcaaactcttgatggcctcttataaacttgctgatatgctgtaacattattagcctgtacagtacagtaactgtcactaaattgttgtgtaaatgcatatccttttctgg

SEQ ID NO: 346 - DNA, 2187 bp, Panicum virgatum
ctctaattaatcgcgccacgacccaaccaccccgcccgctttcctccgatcggcgcatttcaaaatcagccacgccaaagcggggaggcagtaacagtaacaacgtggggttaatcaatcaacctctgccaggcagggggattagtgcggggtcgtttgaattgaagccgggtccgggtatataaaccgccaggcaagcaacggcgaccagccggaaaaacagtcggggccgccacccccccgccaacgtctcgctcccgcctcccgagcgcccccgcaacgggactatcagagccgtcgcgccatggcgccgttccagatgcggttcgggctccagatctccccgccgccctccgacgaggaggaggacgacgacgacggagaggaagaggacgaggaggaagagtatggccacgagacggagagcgaggggacggcctcgccgccgatgacgatgctgcgggtggggcggggagggggagcgggaggagggctggtgggtgcggtggtcggggcgctgcggaggtctctggtcatgtgcagcgccggtgccgtcgggggcgaggaccacgacgacgaggaggatggcagcgagggggagagggggatcgagattgggcggcccacggacgtgcgccacgtctcccacgtcaccttcgaccgcttcggcggcttcctcggcctccccgccgacctcgagcccgacgtgccgcggcgcacgcccagcgccagtgttagtgtatttggggtttcacctacctctctgcaatgttcatatgatcaaagagggaacagtgtgcccacaatactgttaatgatgcagaggaagttatatatacgtgatggacttaagattgaaggtatcttcaggattaatgcagaaaacagtgaggaagtcaatgtcaggaaccaattaaacagtggagtggttccagatgaagttgacttgcactgccttgctgggttgataaaggcatggtttcgggaacttcctgcaggagtattggacgcactgacaccagaacaagtaatgcactgcaacacggaagaggactgtgctctccttgcttcgatgctaccaccagtggaagcagcactgcttgattgggctatcaatctgatggccgatgttgtagagcatgaaagccacaacaagatgaatgcccgaaacattgcgatggtttttgcacccaatatgactcagatggcagatccgttaactgccctgatacatgcagttcaggtgatgaatttcctcaagactttaatcttgaagactttaaaggaacggaaggaggcggctggagcagttcaggcattgcaatcatgctctggttccgcaaatgaccaagatgaacctcagatgtcagagcatttggagaaaccttcagttctttccaatcagaaagactttgattttcccatgattgataaggccactcctgttcaagtccttggagctgataatgctctccatcattactcaaagagccgttccagtgaggcaaagtttggaattgacatggaccacaagaaaagccacagtgatgtttcctcttttggcagagatttgaataaccgagtcaacgtttctggaagagaatttggtaacagaaatgcggaaggcttattcgacagatttagttttaggaaaggggttgagaagctttgcaggcatcccgtgtttcaattgagtaggtccatgaagaagtctgcagatgtggtctttgatgcacccagagaagcaagacaagcctgggtatgatccgatgacgatattgtatgtactatgtagttggtaatgccactgttttcacctttgtgtgtagcaatcagccattccctagtttgtgtgagtagaaccgattagcggttagctttttaggtgttacaaaattgaggttctgggtgtatattattgccatttacttctgacgaaagtgtctggagtagcatctggcttctaccgagtgaactgtgaactcaagctccgtggcttcgtgctgtatacctgaaacgttagtgatctcttgatggcctcttataaactagctgatatatatgctgtaacattatcagtcagtacaactgtcagtaaattgttgtgtaaatttacgccgcatatcctctttttgagtatgcatgcattcatcaaataaacccaaaaaaaatgataggaatgtctaa

SEQ ID NO: 347 - DNA, 1551 bp, Zea mays
acctgggccgccaccgccacagccccgcccccccgcctcccgagctgagcgagcgcgcaacggaaccagccgccgcggcgcgccatggcgccgttccagatgcgtttcgggctccagatctctcccgcgcgctccgacgacgacgaggaggaggacgacgacgacgacgacgaggaggagtatgacgagatggcgagcgaggggacggcctcgccgccgatgatgctccggccagggaggggagggggagggctggtgagcgccgtcgtgggcgcgctgcggaggtcgctggtgatgtgcagcgctggcgccgtggatatcgacgacgacgacgacgaggaggagggcgggatcgagatcgggcggcccacggacgtgcaccacgtctcgcacgtcaccttcgaccgctttggtggcttcctcggcctccccgcggacctcgaacccgaagtgccgcggcgcacgccgagtgccagtgtaagcgtatttggggtttcacctacctctctgcaatgttcatatgatccaagaggaaacagtgtgcccacaatattgctaatgatgcagaggaagttatatgatcgcggaggacttaagattgaagggatctttaggattaatgcagaaaatagccaggaagtctatgtgagggaccaattaaacagtggagtggttccaaatgaagttgacttgcactgccttgccgggttgataaaggcatggtttcgggagcttccttcaggtgtattggatgcactgacaccagaacaagtaatgcactgcaacacggaaggggggtgcgctctccttgcttctatgctaccaccagtggaagcagcattacttgactgggccattaatctgatggccgatgttgtagagcaagaaaactacaacaagatgaacgcccggaacatcgcgatggtttttgcgcccaatatgactcagatggccgatccgttaactgccctgatacatgcggttcaggtgatgaatttcctcaagaccttaatcttgaagactctaaaggaacgaaacaaaaaggatgcggcacttcaggcgttgcaaccatgctccagctctccaaatgaccaagacgaacatcaggtgtccgagcatttggagaaaccttcagttctgccaagtcaaaaaggcttcggtttccccatgaatgatagtgccactcctgttcaagtccttggagctgagaaaactctccatcatcactcacaaatccgttctcacgagccaaaaaggtttggaaccgatatggaccacaagaaaagacagagtgatgcctcctctctcctcggcagcgattcgagcaaccgattcaacagttctgggagagaattcggtagcagaaatggcgcgtccgacagatttagttttaggaaaggggtggagaggctttgcaggcatcccgtgtttcagttgaataggtccatgaagaagtctacagatgccgtggtcttcgatgccccccgagaaacaagacaggcttgggtgtgatacaataacgacattgtatgtattatgtagttctgtttc

SEQ ID NO: 348 - DNA, 2753 bp, Glycine max
acaaaaactagagaacaaaagtctttatgctctcttccccttcttctctctttctactacttattatcagagcctgataattggagagagagaggagaagagtgtgtgggagataaaataaggagacattagaagaacccatttcagttttcactttccataggaaaccaaagtaagagccaagaaaaataaaggagtatagtttctttgagagataaatggaagagatatgtgaaggaaggaagaagatgatgatatgaagagagagagaaaaaaaaatatagatatatatatagagagagaagagaagcacagtaagtaacaagtcgttattgcattttctcatccactgcccactctgcactttctgctggctggaccctttcagaaactaattttctttctctctctctcactcaaaccaaaactttttcttcctgtggaaaaaagccaaagtgacagtagtagtagccacaatagcagcagaagaagcagaaacagaagaagaagcagagaagttgttcgttttcccttccttttcagagagagaaaaatccaagtccactccactcaactccccctcctcaccccacctcaccctaacaacacaacaagatctcctctcaacaacaaactccatcaaaagagaaaaaaacttctctcttttcttttcctccaccaacaaaaaattctttccctgccacaagaccccacaccaagaagaataacacccacattagatacaccctcacactaataatatatatacaccaccacttagacaatagaagatctatgcttctatagttctacagttagttctgtctatcaacctacatacactccactttatttttatttttattattattattaacagaagaaaaagcaaactatatattgtgtttagtttgtctcttgatttgagaagtaatcaaggattttcagttgtggctactacaaggaggttaccttcagattctggtgcctttgcggactgggcagcgacagcttcctccggtgctggtggtggtggtggccgcgctgtccccgtcgacgagctctccctaggcttcaatgcgggtcccgctgccgccacaggacccaccgccggaatgtggtccaccccaactaggtcaatcaattaccctgaaatggggatgttcgtggtggcaccagcttcttccttccaccctaatctccaccaccaccaccaccaccaccaccagccgtcgccgaacgaccccgccgtcatggtggattcactcaaccccgccactgcactcggcgtcggcgtcatccccctcctcgccccgacgccgtgccacgaatccgacaacaacatcctcggaaacaggacacgtggcggtggaattcagttttggcaagaccaacaacaacataatcaaggcaactacacgaagaagccccagcagggtcttctcgaccataatagtaacaccagttcggggaatttggttcagaacagtggcggggtaactgcttctggaactagtagcggaggaacaacgtgccaagattgtggaaaccaggcaaagaaagattgtaccaatagaaggtgcagaacttgttgcaaaagccgaggctttgattgccctacacatgttaagagcacttgggttcccgccgcacgccggagagagcgccagctcatgacgtcggccaccgtggcgccggttgccggctctagtggctccacttccggcactaaaaaacctaggctcattgcttcacaaaccacaacaacctctcacacatccacttctaacaccacccctcctagaagctttgacactagctctagccatcaagatgcggggttcaaagagtcattaccggggcaagtacgtgcaccagcggttttcaagtgtgtaagagtgacggcggtggaggatgggcaagatgagtatgcgtatcaggctgtggtgaagattggtggccacgaattcaaagggtttctctatgatcaaggtgcggagaatagggatgtgtatcctaacctatctgagttgcatttgggtggtgggaatggtggaagtggtggtgcgggaagaaatggggtttcatcttcctctccaatgatggatcctaatgatgtttatgcagcttcgggtggagggttattagggggttcttcagcatatggtaatccaatgaattgaactgaaagtgtctctttccgagtgcaagatattagtagatgggcttggagaggctgatgacgtaccttgtagtttaaaaatctttaaattttcttctaggctttgtatctttattgcatatgtcactcttttctttctgccatttttcaacttgattttagtttctattttttctctcgccccaatctggcccttgtcattgcatgagatcatcagtgacaaggaagcatcactatcttctaactgttaaagaaatagtttcttatgtactaaaattattaactcaaaatggaaagcaaaggtggataaatcttattttacttggttcactattttaaattttaattttatttaacattattgattgcaagcttgcaacaattatatcaacttttcttttcaagcaaatgccttttgttttgcattttacttccctttatttcattattttatatttaaatttgccaaaggtgaaatttacagtactatacccacaatcaaatgctacagtataaatgatgataaagatgagtttatatatgttaatatctaatgataattgttattgat

SEQ ID NO: 349 - DNA, 2720 bp, Phaseolus vulgaris
ggttccataaaattacaaaaacaagagaacaaaagtctttatgctctctttcttctcttcctctctctttctactacttattatcagagctgattattggagagagagaaggagaaaggaagcaatttcactttcactttccataacaagccaaagccatagccaagagaaacaaaggaagacaaaggtgtttataggaagaagatcaaattacaaactataaggtttgtggagggaggaagaagaagaagatgatgatcaagaagagagaaaagaaaggtcggcaacaataacaaaggaaaagagagaaaaataaaaaaaaagatagaagatagaagagagacacagtaagtaagaagtcgttattgcattttctcattcactgctcactctgcactctgctggacccttcagaaactgattttctttctttcttactcagaaaccaaaactttttcttcctgtgaaaaaagccaaagtgacagtagtagtaaccacaatagcagcagaagcagaaacagaagaagcagagaagttgttctttttcccttccttttcatagagagagaaaaatctaagtttactcaactctcaccccccaacaaacaacaagatctctcatctcatctcaccaacaaactccatcaaaagagaacttctcttttcctccaccaacaaattctttccctgccacagacacagaccccacaccgagaagaataacacccacattagatacaccctcatatataaaccattaataatatatataaatatatactctcacacacacaacaccacatagttattagaagatctatgcttcatcttcttcttcaatagttctgtgcttcccacacactatacatcctaccttcatcaacagcataaggaaactgtatattatttatttttgtctttgatctgagaaatcaagcactttcagttgtggctactacaaggaggttaccttcagattctggtgcctttgcggactggacagcgactacttcctcaggtgctggtggtggccgagctgtccccgtcgacgacctctccctcggcttcaatgcgggtcctgccgccccagcagccgcaaccggacccaccgccggaatgtggcccggcaccaataggtctatcaattaccccgaaatgggaatgttcgtggtggcgccagcctcatcgttccaccaccatcaccaccaccagcaaccgcccccacacgaccctgtcatggcggattccctcaaccccgccactgcactcggtgtcggcgtcatccccctgctcgccaccacgccgtgtctggaacccgacaacttcctaggaaataggacacgcggtgggggaattcagttttggcaagatcaaacgccccatcagagccattacatgaagaagcagcagcaacaggggcttctagaccaaagcaacacgagttctggaaatttggttcaaaacagtggcggtctaactgcttcgggtactagtagtgggggaacaacgtgccaagattgcggaaaccaggccaagaaagattgtaccaatagaaggtgtaggacttgttgcaaaagtcgaggtttcgattgccctacccatgttaagagcacatgggttccagcggcacgccggagagagcgccagctcatgaccacggctactgtggctgttgctggttccagtggctccacctccgggactaaaaaacctagactcattgcttcacaaaccactacaacatctcacacttccacttctaacaccacccctcctagaagctttgacactagctctagccatcaagatgcgggtttcaaggagtctttacctgggcaagtacgtgcaccagcggttttcaagtgtgttagagtgacggcggtggaggatggagaagatgagtatgcgtatcaggctgtggtaaagattggtggtcacgtgttcaaagggtttctctatgatcaaggggtggagaatagggatgtgtatccaaacctatctgagttgcatttgggtggtggaagtgggagtggaggcagcggtgggatggggagaaatggggtttcttcttctccaatgatggatccttctgatgtttatgcagcttctggtggagggttacttgggggttcttctgcttatggtaatccaatgaattgaactcaaagggtctttccaagtgcaagatattagtacatgggcttggagtggctgacgtaggttgtggttcaaaatctataattttcttctaggattttgtatctttattgcatatgttactctttctttctgccatttttcaacttgattttagttctattctttctcgcccaatttggccactgtcattgcatgagatcatcatggaatgtcaagccaccctcactatctaactgttaaacaaatagtttctttatgtactaaattaactcaaaatggaaacaaaaggtggataaaacttgttttacttggttcactattttaattttagttataccattattgattgccagtttgcaaagattatctctacttttcttttgaacctaatgacttttgttttgcattttactcccctttattttcattattatagattttaattggtgaaaggtgaaatctacagtattattatacccacaatcaaaagcttcagcataaagcacatcataaagataaatctaaatatgttaatgtcttgtgataattgttattgatgt

SEQ ID NO: 350 - DNA, 1766 bp, Cajanus cajan
ggttgccttcagattctggtgccttcgcagactgggcagccacagcctcctcctccggtcgggctgacgacctctccctcggcttcaatgccggtcctgccgccgccgcagctgccaccggacccgccaccggaatgtggtccggcgcaactaggtcaatcaattaccctgagatgggcatgttcgtggtggcgccagcttcgtccttccaccaccaccaccaacagataccgcccccgcacgaccccgtggtggcggattccctcaaccccgccactgcacttggggtcggcgtcagcgtcatccccctcctcgcagccacgccgtgtctggaatccgacaacatcctcggcaataggacacgtggcgggggaattcagttttggcaagagccacaaccgccacaaccgcaccaagggcactacatgaagaagcagcaccaggatcttctcaaccacaacaacaacaatagtagccctgggaatttgcttcagaacagtggaggcgtaaccggttccggaaccagcagtggcggaactaccacgtgccaagattgtgggaaccaggcgaagaaagattgcgtcaatagaaggtgcaggacttgttgcaaaagccgaggttttgattgccctactcatgttaagagtacatgggtccccgccgcacgccggagagagcgccagctgatgacggcggcaaccgctgctgttgctggttctagtggctccacctcaggcaccaaaaaacctaggctcattgcttcacaaacaacaacttctcatacttccacttccaacaccactcctcctagaagctttgacactagctctagccatcaagatgcgggttttaaggagtctctaccggggcaagtacgtgcaccagcggttttcaagtgtgtgagagtgacggcggtggaggatgggcaagatgagtatgcgtatcaggctgtggtgaagattggtggccacgtgttcaaagggtttctctatgatcaaggggtggagaatagggatgtgtatcctaatctatctgagttgcatttgggtggtggaagtggaagcggaggaagtggtggtagaaatggggtttcatcttcttctccgatgatggatccttctgatgtttatggtggagggttactaggtggttcttcagcctatggtaatccaatgaattgatcattgaaactgaaactgtctttccgagtgcaagatattagtagatgggcttggagaggctgatgacgtacgttgtagtctaaattaaatctttaatttttcatctaggctttgtatctttatattgcatatgtcactctttcttttctgccatttttcaaccacattttagttctattctttctcgcccaatttggcccttgtcattgcatgagatcatcattaaatgacatgggagcctcactatctaactgttaaacaaatagtttcttatgtactaaatattaactcgaaatggaaagcaaaggtggataaaactatttttacttgcttcactgttttaaaatttaatttttgttaccagtattgattgcaaggttgcaaccattatatctacttttcttttgaggctaatgacttttgttttgcatttcagtcacctttatattttcaatattttttattttaatttgtctaaggtgaaatctatagtactattcccactatcaaatgctacagtgtaaagtatatatgataaagatgaagttatatgttaatatcttataatagttgttattgatgttc

SEQ ID NO: 351 - DNA, 1665 bp, Glycine max
tttttgaaccaataaagtagtaagagccttatttgaacatctatcgtatccaaaaacacaagtttggaaaaacgttaattgtgggaaacaaaggaacagaacaatgagcgggaagccagtgagacctcgtacccgtgtgggaaagtacgagctgggaaaaaccattggtgagggaagctttgctaaggtcaagtttgctaagaacgttgagaatggtaaccatgttgccatcaaaatccttgatcgtaaccacgtcctccgccataagatgatggaacagctgaagaaagaaatttcagcgatgaagatgatcaatcatccaaacgttgtcaaaatttacgaggtgatggcaagcaaaacaaagatctatattgtgctagagttggttaatggaggagaactatttgacaaaatagctaaatatgggaaacttaaagaggatgaagcaagaagttatttccatcaattaatcaatgccgttgattactgccacagcagaggcgtgtaccacagagatctgaagccagagaatcttcttctggactcaaatgctattctgaaagttacagattttggattgagtacgtatgcgcaacaggaggatgaacttctccgcactgcttgtggaactccaaattatgttgctcctgaggtgcttaatgatagaggttatgttggttctacatctgatatctggtcctgtggagtcattctctttgtgcttatggctgggtacttgccctttgatgagccaaatcatgcgacactgtaccaaaaaattggcagggcccaattcacatgtccatcatggttttctcccgaggcaaagaaactattgaagcgtattcttgatccaaaccctctaacaaggataaaaattcctgaactcttagaagatgaatggttcaaaaaaggatacaagccaacaacttttgtagaggaagaggatgtcaatgtagatgatgttgctgctgctttcaatgattctaaggaaaatcttgtgacagagagaaaagagaaaccagtgtcaatgaatgcttttgagctcatatctaggtcacaaagtttcaatcttgaaaatttgtttgagaagcagacacaggggattgttaagagagaaacacattttacctcacagcgccctgcaaatgaaatcatgtcaaaaattgaggaagctgcgaagcctctgggatttaatgttcacaagcgaaattataagatgaagctgcaaggtgataagagcggaaggaagggtcacctttcagttgctacagaggtttttgaagtggctccctccttgcacatggtggaactgcgaaagaccgggggtgacacactagagtttcacaagttctacaaaagcttttcatcatcatcagggttgcaagacatagtgtggcattctgaagcaaaacaatgaagaatcaagatgtgcatgcatggaagatatcatgcacgtatttttgttggaagatatcaggaactttttttgttcatggaagatatcgtgcttagctaaaactggagcatgttgagttgggagagtctgctctaatgtttgatagggtaaaaacaaaacctagatcgtacaaaacttagagtgtatatttccttgaacttttattcataatatttcatgaccttaattaattcaatggctcataa

SEQ ID NO: 352 - DNA, 1734 bp, Cajanus cajan
cacgcactccaccattcctctctatatccattcatctctttctctcttctctctctctcatcgtcaccatttcgcttctcctgctgtgacattggtcaacagaggaacaccagaatgagcgccaagaagccggtcagacctcgtacccgcgtcggaaggtacgagctcggaaaaaccattggcgagggaagcttcgctagggtcaagttcgcaaggaacgttgagaacgatagccatgtcgccatcaaaatcctcgaccgaaatcacgtcctcaaacacaagatgatggaacagttgcagaaggaaatttcagcgatgaagatgatcaatcacccgaacgttatcaaaatctacgaggtcatggcaagcaaaacaaagatttacattgtcttagagttggttaatggaggagaactatttgacaaaatagctacaaacgggagacttaaagaggatgaagcaagaagttatttccatcaactaatcaatgcagttgattactgccatagtagaggcgtgtatcacagagatttgaagccagagaatcttcttctcgactcaaatggtattctaaaagtttcagattttggactcagtacgtacgcacaccaggaggatgaactcctccgcactgcttgtggaactccaaattatgttgctcctgaggtgcttaatgatagaggttatgttggttctgcatctgatatttggtcttgtggagtcattctttttgtgcttatggctggctacttgccctttgatgagccaaatcatgctgcattgtacaaaaaaattggcagggcccaatttgcatgtccatcatggttttcccccgaggcaaagaaactattgaagcgtattcttgacccaaaccctttaacaaggataaaaattcctgaactcttacaagatgaatggttcagaaaaggttacaaaccagcatcttttacagaggaagaggatatcaatgtagatgatgttactgctgctttcaatgattctaaggaaaaactggtgacagagagaaaagagaaacctgtgtcaatgaatgcttttgagcttatatctaggtcacaaagtttcaatcttgaaaatttgtttgagcagcagacacagggaattgttaagaaagaaacacattttacgtcacagtgccctgcaaatgaaattatgtcaaaaattgaggaagctgccaagcctcttggatttaatgttcacaagcgaaattataagatgaagttgcaaggtgataagagcggaaggaagggtcacctttcagtggctacagaggtttttgaagtggctccttccttgcacatggtagagctgcgaaagaccgggggtgacacactagagtttcacaagttctacaaaaacttttcatcagggttgcaagacgtagtgtggcattctgaagcaacaacataatgaagaatcaagcaggggtacaacaatgtacttatttttgttcatggaagatataaggctagctaaaacaggagcatgctgagttgggagagtctggtttagtgtttgataggaaaataaatcttagatcgtccagaacttaggtatatatttccttcaacttctcatcgatactcatgatattttgatgaccttaattcaatgaatcaaataactgaaaaaaaaaaagaagttattgttgcccaaacagagtggtgtaaaatctagtttttattttctttaataaaagaaactaaatcataatga

SEQ ID NO: 353 - DNA, 1966 bp, Phaseolus vulgaris
ttggttcgtttggtgttcttgtgttgtgttgtgttcttctcttcccaaaacaaaacaacaacaccaatcgagggaccacgttttcccacacgcttcaaacacgcaccacccaaaaatattattcacctctttcaccactcttctcatcatcatcatcatcttcattttcattgtctcaaacacaaacactagttgaagcaagtgagaggttcatactcgtttatcgaacctgtttcataagaccacacagagaaacgttgtaggaagagaaaatgagcgggaagccggtgagacctcgtacacgtctggggaagtacgagctcggaaaaaccattggcgagggaagctttgcgaaggtcaagttcgcaaagaacgttgagaatggaaaccatgtagcaatcaaaatcctcgaccgtaagcacgtactcagccacaagatgacggaacagctgaagaaagaaatttcagcgatgaagatgatcaatcatccaaacgttgtcaaaatttatgaggtgatggcaagcaaaacaaagatctacattgtcctagagttgattaatggaggagaactatttgacaaaatagctcaggatgggagacttaaagaggatgaagtaagaagttattttcaccaactaatcaatgcagttgactactgccatagtagaggggtgtaccacagagatttgaagccagagaatcttcttctggactcaaatggtattctgaaaattacagattttggattaagtacctacgcacagaaggaggatgaacttctccgcactgcttgtggaactccaaattatgttgctcctgaggtgctcaaggatagaggttatgttggttctacatctgatatctggtcctgcggggtcattctctttgtgcttatggctggttacttgccctttgatgagccaagtcaaatggcattgtacaaaaaaattggcaaggctcaatttacatgtccatcatggttttcctctgaggcaaagaagctattgaagcgtattcttgatccaaaccctttaacaaggataaaaattcctgaaatcatagaagatgagtggttcaaaaaaggatacaaaccagcaatttttacagaggaagaggatgtcaatgtagatgatgttgctgctgctttcaatgattccaaggaaaattttgtgacagagagaaaagagaaaccagtgtcaatgaatgcttttgagctcatatctaggtctcaaagcttcaatcttgaaaatttgtttgagaaggagacaaatgggattgttaagaaagaaacacattttacgtcacaacatcctgcaaatgaaatcatgtcaaaaattgaggaagctgccaagcctctgggatttaatgttcacaagcgaaattataagatgaagctgcaaggtgataagagcggaaggaagggacacctctcagtagctacagaggtttttgaagtggctccctccttgcacatggtggagcttcgaaagactgggggtgacacactggagtttcataagttttacaaaaccttttcatcagggttgcaagacatagtgtggcattctgaagcaaaagtatgaagaatcaaggtgtacatcatgcacttatttttgttcatgcaagataaagtggagcatgtttagttttgaaaaaaactagacacaattagagtgatatttcattaccttaattcaaagtctcgtagtaatttagaaaataagtatagtaagagagagagatgagtataattaagagtatggtcatttctcagattccaattccttgaactgatgtttgcagaaatactttttttatatcttttggattcaaagtaagtttagaggctggttaatgggtttccaaacataggcttgatttttcttttgttgatttgaataaatttcttactgtaatagtttattcaatttatttaagtctttcaaatattctaaatatgttcaga

SEQ ID NO: 354 - DNA, 1871 bp, Trifolium pratense
tcttcttcttcctcatactaataatatagggaccacatatttcatgtgtcatcacacgttacaaacacgcaattcaatcattctattattcaattctatcaatatctctttcttcattctcattcgtcaccataaaacactatctcatagtagtactataattaatcttgaatctgttacaaatattctaaggtgttagtttttgtttgtttggaacgttaattttgtcgaagtgtttgttttaggatgatgaacaataataaagtaccaccgagacctcgtactagagttggaaagtacgagatgggaaaaacaattggtgaaggaagttttgcgaaagttaagttagcaaagaatgttgaaaatggtgattatgttgctattaaaattcttgatcgtaatcatgtgcttcgtcataatatgatggatcagctgaagagagaaatttcagctatgaagataattaatcatccaaatgttgttaaaatatttgaggtaatggcaagcaaaacaaaaatttacattgtcttggagttggttagtggaggagaattatttgacaaaattgctaaaaatgggagacttagagaggatgaagcaagaagttatttccaacaactaatcaatgcagttgattactgccatagtagaggcgtgtatcacagagatttgaagccagagaatcttcttttggactcaaatggtgttcttaaagtttcagattttggattaagtacatactcacagcaggaggatgaacttctccgtacggcatgcggaacaccgaattacgttgctcctgaggtgcttaatgatagaggttatgttggttctacatctgatatctggtcttgtggagtcattttatttgtacttatggctggctacttgccgttcgacgagccgactacaattgcactttatagaaaaattggtagggctgagttcacatgtccgccttggttttcgcctgaggcaaagaaactgctcaagtctatacttaatccgaaccctctaacgaggataaaaattccggaactcttggaagatgaatggttcaaaaaaggatataagccggcatcttttaccgaggaagacgatatcaatgtagatgatgttgctgctgctttcaatgattctaaggaaaatctcgtgacagagaccaaagagaaacctgtgtcgatgaatgcttttgagcttatttctagatcacaaagcttcaatcttgacaatttgtttgagaggcaaaagggggttgtaaagcgcgaaacacatttcacttcacagtgccctgcaaatgaaattatgtctaagattgaggaggctgccaaacctctcggatttaacgttcacaagcgaaattacaagatgaagctgcaaggtgataaaagcggaaggaagggtcacctttcagtggctactgaggtttttgaagtggctccgtcgttgcatatggtcgagctacgaaagacgggcggcgacacactagagtttcacaagttctacaaaacattttcatcaggtttgcaagacatagtgtggcattcagacaaaaagtaatgaagttggttcaagtgctagagaaatgcatttattctgactcatggaacaaatttggaagagtctggctcagaaacttgaggcatatatttcatttggcaatgaatctgtacaaatgagactatttcattaggcttagagctagatttctgtgcagcataagaaaaacttgtatcttattataacctttgcaaattagggcttctttttatgaagctgatcttttgaaatcaattaaaattggttttgtctaatgcgcacaagtaagatggtcttgtatcatgcataaatatgtttttcaccattggatt

SEQ ID NO: 355 - DNA, 1620 bp, Trifolium pratense
tattattcaattctatcaatatctctttcttcattctcattcgtcaccataaaacactatctcatagtagtactataattaatcttgaatctgttacaaatattctaaggtgttagtttttgtttgtttggaacgttaattttgtcgaagtgtttgttttaggatgatgaacaataataaagtaccaccgagacctcgtactagagttggaaagtacgagatgggaaaaacaattggtgaaggaagttttgcgaaagttaagttagcaaagaatgttgaaaatggtgattatgttgctcttaaaattcttgatcgtaatcatgtgcttcgtcataatatgatggatcagctgaagagagaaatttcagctatgaagataattaatcatccaaatgttgttaaaatatttgaggtaatggcaagcaaaacaaagatttacattgtcttggagttggttagtggaggagaattatttgacaaaattgctacaaatgggagacttaaagaggatgaagcaagaagttatttccaacaactaatcaatgcagttgattactgccatagtagaggcgtgtatcacagagatttgaagccggaaaatcttcttttagactcaaatggtgtccttaaagtttcggattttggattaagtgcatattcacagcaggaggacgaacttctccgcacggcatgcggaacaccgaattatgttgctcccgaggtgcttaatgatagaggttatgttggttctacatctgatatttggtcttgtggagtcattctctttgtacttatggctggctacttgccgtttgacgagccgactacaattgcactttatcggaaaattggtagggctgagttcacatgtccaccttggttttcgcctgaggcaaagaaactgctcaaggccatacttaacccgaaccctctcacgaggataaaaattccggaaatcttggaagatgaatggttcaaaaaaggatacaagccggcatgttttaccgagggagacgatattaatgtagatgatgttgctgctgctttcaatgattctaaggaaaatctcgtgacagagacgaaagagaaacctgtgtcgatgaatgcttttgaacttatttctagatcacaaagcttcaatcttgacaatttgtttgagaagcaaaaggggattgtaaagcgcgaaacacatttcgcttcacagtgccctgctaatgaaattatgtctaagattgaggaggctgccaaacctctcggatttaacgttcacaagcgaaattacaagatgaagttgcaaggtgataaaagtggtagaaagggtcacctttcagtggctactgaggtattcgaagtggctccctccttgcatatggtggagctgcgaaagacgggcggcgacacactagagtttcacaagttctacaaaacattttcatcaggtttgcaagacatagtgtggcattcagacaaaaagtaatgaagttggttcaagtgctagagaaatgcatttattctgactcatggaacaaatttggaagagtctggctcagaaacttgaggcatatatttcatttggcaatgaatctgtacaaatgagactatttcattaggcttagaact

SEQ ID NO: 356 - DNA, 1559 bp, Trifolium pratense
tcatcacacgttacaaacacgcactcaatcattctctattattctatctatctaggagtatatctctttcttcattctcattcgttattaccataaaacactatcatctcataatataacatattgaatctgtgtttgttttgttagtgtaataacattgaatctgtgtttgttttgtttcgtttgtttggaacgttaattttgtggaagtgtgatttatgatgatgaacaataaagtaccaccgagacctcgtactagagttgggaagtacgaattaggaaaaacaattggtgaaggaagttttgcgaaagttaagttagcaaagaatgttgaaaatggtgattatgttgctcttaaaattcttgatcgtaatcatgtgcttcgtcataatatgatggatcagctgaagagagaaatttcagctatgaagataattaatcatccaaatgttgttaaaatatttgaggtaatggcaagcaaaacaaagatttacattgtcttggagttggttagtggaggagaattatttgacaaaattgctacaaatgggagacttaaagaggatgaagcaagaagttatttccaacaactaatcaatgcagttgattactgccatagtagaggcgtgtatcaccgagatttgaagccggagaatcttcttttggacaaaaatggtgttcttaaagtttcggattttggattaagtacatactcacagcaggaggatgaacttctccgcacggcatgcggaacaccgaattatgttgctcccgaggtgcttaatgatagaggttatgttggttctacatctgatatttggtcttgtggagtcattctctttgtacttatggctggctacttgccgttcgacgagccgactacaattgcactttatcggaaaattggtagggctgagttcacatgtccaccttggttttcgcccgaggcaaagaaactgctcaaggctatacttaacccgaaccctctaacgaggataaaaattccggaaatcttggaagatgaatggttcaaaaaaggatacaagccggcatgttttaccgagggtgacaatattaatgtagatgatgttactgctgctttcaatgattctaaggaaaatctcgtgacagagacaaaagaaaaacccgtgtcgatgaatgcttttgaactgatttctagatcacaaagcttcaatcttgacaatttgtttgagaagcaaaagggagttgtaaagcgcgaaacacatttcgcttcacagtgccctgctaatgaaattatgtctaagattgaggaggctgccaaacctctcggatttaacgttcacaagcgaaattacaagatgaagctgcaaggtgataaaagcggaaggaaaggtcacctttcagtggctactgaggtattcgaagtggctccctccttgcatatggtggagctgcgaaagacgggcggcgacacactagagtttcacaagttctacaaaacattttcatcagggttgcaagacatagtgtggcaatctgacaaaaaataatgaactatatatcaaggttcaaggtgc

SEQ ID NO: 357 - DNA, 1653 bp, Lupinus angustifolius
atcatcaccttatatataatagaatatccattacaacctcaaactttgaaacccattggagccacgtacctaacaaacttgaatcataagaaattaaacacaagaatttattgcagcaacatgagcaagaaggcaccgaaacctcgtacccgtgtagggaagttcgagttgggaaaaactattggtgaaggaagctttgcaaaggttaaactagccaggaacgttgattctcgcgaccatgttgctatcaaaatcctcgaccgtaaccacgttctccgccataacatgatggagcaggcacaaatttcagccatgaagcttatcaatcatccaaatgttgtcaaaatatttgaggttatggcaagcaaaacaaagatctacattgtattggagttggttaatggaggagaactatttgacaaaattgccacaaatgggaaactaaaagaggatgaagcaagaagttatttccaccaactaatcaatgcagttgattattgccatagtagaggcgtgtatcaccgagatttgaagccagagaatcttcttctggactcaaatggtgttcttaaagtttcagattttggattgagtacttatgcgcagcaagaggatgaactcctccgcactgcttgtggaactccgaattatgttgctcctgaggtgcttaaggatagaggctatgttggttctgcatctgatatctggtcttgtggagtcattctctttgtacttatggctgggtacttgccttttgatgagccaaatcatgtagcattattccgtagaattagcagagctgatttcagctttccatcttggtttgcgcccaagttaaagaaacttctgaagcgcattcttgacccgaaccctcttacaaggataaaaatagaagaactcttggaagatgaatggttcaagaaaggatacaagccagcatcttttacggaggaagaggatgtaaacgttgatgacgtagcggctgctttcaacgattctaaggacaatcttgtgacagagagaaaagagaaacctgtctccatgaatgctttcgagctcatttctaggtcacaaagcttcaatcttaacagcttgtttgagaagcaaacaggggtcgtaaagcgagaaacacattttacttcacagcaccctgctaacgaaatcatgtctaaaattgaggaagctgccaagcctctaggctttaatgttcacaagagagattataagatgaagcttcaaggtgataagagtggaaggaagggccacctttcagtggctactgaggtttttgaagtggctccctccttgcacatggtggagctgcgaaagaccggtggcgacacacttgagtttcacaagttttacaagaacttttcatcagggttgcaagacatagtgtggcatgcagacgaagaaaaatgaagagaaatgcatctgttcacattgttgtgcaaattatgatgagtacaattcagtttttttgaacatttttctgttttctttaaagaatttaaataacatttttctttaaaggagtagatcatataaagagactatatatttaatgaagataagtattaaaaccgtaccggtatagtgttacagtggttgaactggtgattcaataattaaatcgcatgtcggttaaactgg

SEQ ID NO: 358 - DNA, 1791 bp, Medicago truncatula
tatctctttctccatcctcattcgtcactaccttaaaacactatcttatacacataccaatagtttgcgtatctaacattgaatttgtgtcaagtacgtttaagtaacgaaacttaactgaaaataaaggtgtttgttttgaacattgattttgtggaattgttgtacatgatgagtaataaggtaccaccaagacctcgtactagagttgggaagtacgagatgggaaaaacaattggtgaaggaagttttgctaaggtgaagttggctaagaatgttgaaaatggagattatgttgccatcaaaattcttgatcgtaatcatgtactcaaacacaatatgatggatcagctgaagagagaaatttcagctatgaagatcattaatcatccaaacgttatcaaaatatttgaggtgatggcaagcaaaacaaagatttacattgttttggagttggttaatggaggagaactatttgacaaaattgcaacacatgggagacttaaagaggatgaagcaagaagttatttccaacaactaatcaatgcagttgattactgccatagtagaggagtgtatcacagagatttgaagccagagaatcttcttttagatacaaatggtgttcttaaagtttcagattttggattaagtacatactcacagcaggaggatgaacttctccgcacggcatgtggaacaccgaattacgttgctcctgaggtgcttaatgatagaggttatgttggttcttcatctgatatttggtcatgtggagtcattctctttgtacttatggccgggtacttgccgttcgatgagccaaatctaattgcactgtatagaaaaattggtagagctgatttcaaatgtccgtcttggttttcgcccgaggcaaagaaactgctcacgtctatacttaacccgaaccctctaacgagaataaagattcctgaaatcttggaagatgaatggtttagaaaaggatacaagccggcatgttttaccgaggaagaggatgtcaatgtggatgatgttgctgctgctttcaatgattctaaggaaaatctcgtgaccgagaccaaagagaaaccggtgtcaatgaatgcttttgagcttatttctagatcggaaagcttcaatcttggcaatttgtttgagcaggaaaagggggttgtaaagcgcgaaacacatttcacttcgcagcgtcctgcaaatgaaattatgtctaagattgaggaggctgccaaacctctcggatttaatgttcacaagcgcaattacaagatgaagctgcagggtgataaaagtggaaggaagggtcacctttcagtggctactgaggttttcgaagtggctccttccttgcatatggtggagctgcgaaagacacgcggcgacacactagagtttcacaagttctacaaaaccttttcatcagggttgcaagacatagtgtggaacactgacaaaaaataatgaagtattaaggtatccttgggagagtctggctcagaacttgaggcatatatttcatttggcaatgaatctgtataaataggactgtttcattaagcttagaactagtttgatgtgcaaattggggcatttatttaaagttgaagttaacattctttaagcatataaagttatgtcacatgtgcaatttcatcatttgaatttgatttatattttattatcatttttttttttgacaaaattttattatcatattattgttttgtacatttaaaacacattatctagttaccaataaaggttggtttagtt

SEQ ID NO: 359 - DNA, 1788 bp, Lupinus angustifolius
gttgaaaattcatgtgagggcgcgcactcgtaagccaaaattgccctcctaagtagcaatcgaaacgtgtgaataaccacatgcttgaaactcgcacacaacctctgtttctctctcatcatcatcatccattcatctaaacatagacaataatatccattacaacctcaaactttgaaacccattggagctatgtacctgatttgaattgcaggaactttaacacaagaaattgcaacatgaccacgaaggcaccgagacctcgtatccgtgtagggaagtatgagctgggaaaaaccattggcgaaggaagctttgcaaaggttaagttagcaaggaacgttgatactcgtgaccatgttgctatcaaaatccttgaccgtgaacatgttctccgccataatatgatggaacaggcacgtaaaatttcagcgatgaagcttatcaatcatccaaacgttgtaaaaatatttgaggtgatggcaagcaaaacaaagatctacattgtactggagttggttaggggaggagaactatttgacaaaattgcaagtagtggcaaactaaaagaggatgaagcaagaagttatttccaacaactaatcaatgcagttgattactgccatagtagaggcgtgtatcaccgagatttgaagcctgagaatcttcttctggacacaaatggtgttcttaaagtttcggattttggattgagtacttatgcgcaacaagaggatgaactcctccgcactgcttgtggaacaccaaattatgttgctcctgaggtgcttagggatagaggttatgttggttctgcatctgatatctggtcatgtggagtcattctctttgtactaatggctgggtacttgccttttgatgaaccaaatcatgcggcactgtttcggaaaattagcagagctgatttcagttttccatcttggtttgcgcccgagtcaaagaaactgctgaagcgtattcttaacccagaccctctcgcaaggataaaaatagaagagctcttagaggatgaatggttcaagaaaggatacaagccagcatcttttacagaggaagagggtgtaaatgttgatgatgtagcggctgctttcaatgattctaaggaaaatctcgtgacagagagaaaagaaaaaccagtctcaatgaatgctttcgagctcatttctaggtcacaaggcttcaatcttgacagtttgtttgagaagcagacaggggttgtaaagcgggaaacacattttacttcacagcgtcctgcaaatgaaattatgtcaaaaattgaggaagctgccaaacctctgggcttcaatgttcacaagcgagattataagatgaagctgcagggtgataagagcggaaggaagggtcacctttcggtggctactgaggtttttgaagtggctccctccttgcacatggtggagctgcgaaagacaggtggcgatacactagagtttcacaagttttacaagaacttctcatctgggttgcaagacatcgtgtggaacgctgaagagaaaaaatgatgaagaaaactgcacctcgtctcttcatattgtgttcatattatgatgttgtacaattcagtttttttcggtattgtttctgttttctttaaagaacttaaaaacattttcttcaaagcaatagatcacgcatataatgagactgagtatgtatttaattgtacataagtattaagaccatttctcataatttaaaaggtgatattgagaatgataggcataatgacaaataacaattcagtcc

SEQ ID NO: 360 - DNA, 3879 bp, Medicago truncatula
acaccacaggggagagtagtctaaaagtgcgcatttctagactatgggacaatttccatatcaataagaaaaatgaactgcttagtatagatatggtcttgattgatgaagaggtatcaatgtgtgtgttatattcatacaaaatctaataccgaataaaatggcccatgctctcaatttcgtagttttattcttttgtgttttttctatgtagcagggtttaacaaatcatgtctattctcaataagtacccactatcttatcttttcaaatataaatttgttttattttcaatatccatttttcttacatgttttctgatcaaaacattgttcatttatgtttgtgactatgaaaaaataattcacttataaaaacaaaatttaaaaaatggcttaaaactaatttcatcatccatattgtcaatccggatatttaaacggtcaagtgaaggaagatactaacttattccaatcgagtaaagttttgaaccaacttaaaactcttaaaacataagggtcaatttaaaacttttaaaatgtaaaggtccaatttaaaacctgaaatgaacataaaagacttcacatgcaattaagccaaaacttataatattcagagtttgaactagctcatgataaaaaaaacttataatattttagttagtatttgtccgtccctctaattttttgggcaaaatccaccacttaggatgattccttgaaatatggggttttctttacttttttggtcagactatttttaatttttaaattccttttaatcttttttttatagagcaatttccttttcaaccaaaaagaaggtaaaatataattgccttttaattcttttacatgtctttctcaaacagcaaatatattctttaaaaataaaataaaatttacaaacatgcaccttttctatataacaaaagaaaaacatacaaaaattatcaaatataatgtatttaaggttgtacgataaaaatatctataaacctctatttattttcttagggtcattaaaccttcaacttttttttaaacaaccagttctaattttaatttctatcaaacgaaatgctcattattttttcaatttaaaaaaaaacattttaaactaaaattgagtgtacttaaatcaatattaccgttttattatttaactgtattttaacaaatacgtgcaacgcacgggttgaattcctagtaaaatacggtattttatcgttcttaccatttgcatgcatctatttatggtattaatttatcaaaatatacaaaagatgataaatttgtattataggaaatttcgaggaaaccagtgaagtaagcaagagcgatcaagaagaagcatgcatggcgtagggaatccgtgaatcccccttcattgacatcacaatccattgttcgagaacaatcttatccatggttgtctcgagccaatgttgcttgaggataccattaaaatattttttgaaaaaatgacacagaaatgagacaaaggaagcaatttacatctcaggtttcctacctttaatctacaccattagaccgtttttataacaaatcaatgacttacattcaatggtttcaagttggacgcatctttttagtggtccaaattaacagttacgagggaacacaagttttagtttgtcttgttcctctcaaccaaaaaccacaatttttgtggggaccataccttcctcttgaccccacactttgaacacaagtattcattcaatcattcaatatatcatacaatatttcatctaatatctctttttccatcctcattcgtcattaccttaaaacactatcttaaacatataggagaaatgatatttgtacgatcattttatgacaatttttgaataatttttttgagaaaaacaagattgtcgccaattggatgtacagatatcatcactctaccaatagtttgcgtatctaacactgaatttgtttcgaacattgattttgtggaattcatagagagaaaggaaagtacagaattgttgtacatgatgagtaataaggtaacacaagcaccacgtactagagtagggaagtatgagctgggaaaaacaattggtgaaggaagttttgctaaggtgaagttggctaagaatgttgaaaatggagattatgttgccatcaaaattcttgatcgtaatcatgtactcaaacacaatatgatggatcagctgaagagagaaatttcagctatgaagatcattaatcatccaaacgttatcaaaatatttgaggtgatggcaagcaaaacaaagatttacattgttttggagttggttaatggaggagaactatttgacaaaattgcaacacatgggagacttaaagaggatgaagcaagaagttatttccaacaactaatcaatgcagttgattactgccatagtagaggagtgtatcacagagatttgaagagaatcttcttttagatacaaatggtgttcttaaagtttcagattttggattaagtacatactcacagcaggaggatgaacttctccgcacggcatgtggaacaccgaattacgttgctcctgaggtgcttaatgatagaggttatgttggttcttcatctgatatttggtcatgtggagtcattctctttgtacttatggccgggtacttgccgttcgacgagccaaatctaatttcactgtatagaagaattggtagagctgatttcaaatttccttcttggttttcgcctggggcaaagaaactgctcaggtctatacttaacccgaaccctataacgaggataaagattcctgaaatcttgcaacatgaatggttcagaaaaggatacaagccggcattttttaccgaggaagatgtcaatgtagatgatgttgctgctgctttcaatgattccaaggaaaatcttgtgacggagaccaaagagaaaccggtgtcaatgaatgcttttgagcttatttctagatcggacagcttcaatcttggcaatttgtttgagaaggaaaagggggttgtaaagcgcgaaacacatttcacttcacagcgtcctgcaaatgaaattatttctaagattgaggaggctgccaaacctctcggatttaatgttcacaagcgcaattacaagatgaagttgcagggtgataaaagtggaaggaagggtcacctttcagtggctactgaggtttttgaagtggctccgtccttgcatatggtggagctgcgaaaaacaggcggcgacacactagagtttcacaagttctacaaaatcttttcatcagggttgcaagacatagtgtggaacactgacaaaaaataatgaagtattaaggtatctgagaggcctccaatcattgaacaggccccacataatgatgatgatccgggaaatacggaagtaagacgtagtgagtgtaggaagtttcctagtactaggctgaagggttataaggaatgagtgtagaatatttgatatctctcctctctttctggaccctctcaaggtacttctctctctgagaagcttctttcttttacacctttatcatttcattgttgttcctccatggttatacccaggagtgtaatttctgtttaaaattccatttaataaaaaacagtattattttcccctctctatctttttagtcataatagtatcctttgaagagtctggttcagaacttgaggcatatatttcatttggcaatgaatctgtataaataggactgtttcattaagcttagaactagtttgatgtgcagcataagaaaaacttgcatcttattataatccattgcaaattggggcatttatttaaagttgaagttaacattctttaagcatataaaattatgtcacatgtgca

SEQ ID NO: 361 - DNA, 1840 bp, Cajanus cajan
acaaacaatgatttcgaaagtgatcaaacgcgagcctcatatgaccaaacggataagaagttaattaagaacttatatatatcagcgaattaaacaacaacttagttaaagaaaaaatgagcgtcaaagtagcaacaggtcgtatccgggttgggaaatacgaattgggtaaaactattggagaaggaagctttgccaaggtcaagttcgccagggatgtcgacaacggcaaccacgttgccatcaaaatcctcgaccgtaaacatgttctccgccacaacatgacggaacagctgatgagagaaatatcaacgatgaagctaatcaatcacccaaacgttattaaaatatttgaggtgatggcaagcaaaacaaagattttcattgtcctggagttagttaacgggggagaactatttgacaaaatagcttcaaatgggagacttaaagaagatgaagcaagaaattatttccaacaacttattaatgctgttgactactgtcatagtagaggcgtgtatcacagagatttgaagcctgagaatcttcttctggactcaaatagtgttcttaaagtttcagattttggattgagtacatactcacagaaagaggatgaactactccgcaccgcatgtggaaccccgaattatgttgctcctgaggtgcttaaagatagaggttatgttggttctacatctgatatctggtcttgtggagtcattctctttgtacttatggctggttacttgccttttgatgagccaactcatatggctctgtacaggaaaattggcatggcaaaattctcttgtccatcatggtttccgccacaggcaaagaaactgctgaaacgcattcttgatccaaaccctctaacgaggataaaaattcctgagctcttagaagatgaatggttcaagaaaggatacaagcaagcatcatttactgaggaagaggacctaagtgtagaggatgtagccgttgctttcaatgtgtctaatgaaaatctagtgacagagagaaaagagaaacccgtctacatgaatgcttttgagctaatttctggttcacaaagtttcaatctcgacagtttgtttgagaagcaaaaggatcaagtaaagcgagaaacccgatttacttcacagtgccctgcaaatgaaattatgtttaaaatcgaggaagcagcgaagccactgggctttaatgtacagaagcaaaattataagatgaagctgcaaggtgacaagagcgggaggaagggtcacctttcagtggctactgaggtttttgaagtggctccctccttgcacatggtggagctgcgaaagacaaggggtgatacactggagtttaataagttctacaaaatcttctcatcagggttgcaagacatagtctggcatactgaaccaaaaaaatgaagaattaaggtatcacctacatacatatatatatatcctaactcgtaagaaagagaacgtttttgctgtttccttcggccaggtgctttgctaaatctggaactttggatgtacgttaaaaggatatcgtctcttcatctttgacgtggtactcttaaaatttgagtagtgtattcagtgtaaatggggaaaagaaaatagtattagtgaaataggcttggagtgtggtacagtaatagtatcttaccacgtcttagtatcaaacataattgccaccattgttgtactcagatttggattttctgcgtcttttcaaccacgtactgcaatatctgcaggtaaccctaactataaaatattactctctccactcactattataattaaaaaaaaaaaaaaaaaaaaaaaaacaaaaa

SEQ ID NO: 362 - DNA, 1833 bp, Arachis hypogaea
ggggatcttcaattatttgattaatttattatcacactctctccgttttgtactcattcacttgcaacttctttttctgttttcttttcctattcaaagagctcaataatatataatcatgagtagcagcaagagcaacaagaaaggaggaagaggaggaggagcgccaccgcctccaagggcgccggctcgcacctgcgtggggaagtatgagcttggaaagactatcggagaaggaagcttcgcgaaggttaagttcgccaagaacgttgagaatggagatcatgttgccatcaagatccttgacaagtcccatgtcctcaaacataagatgattgagcagctgaagaaggaaatctcggcgatgaagctgatcaaccatccaaacgttgtaagaatatttgaggtgatggcaagcaaaacaaagatttacattgttctagagttggttaatggaggagaactatttgacaaaattgcgagatatggaagactaaaagaggatgaggcaagaagctattttcaacaactaatcaatgcagttgattattgccatagtagaggagtttatcatagagatttgaagcctgagaatcttcttctggactcaaatggtgttcttaaagtttcggattttggattgagtacttacgcgcagcgagaggatgaacttcttcgcacggcatgtggaaccccgaattatgttgctcccgaggtgatcaatgatagaggctatgttggatctgcatctgatatatggtcttgtggagtcattctctttgtactcatggctggatacttgccttttgatgaaccaaatcaaatggcactttacaagaaaattgaaaaggctcaattcacatgtccatcttggttttcgcccgaggcaaaaaaaattctgaagcgaattctggatccaaatcctctcgcaaggataaaaattcctgaactcttgagagatgaatggtttagaaaaggatacaagccaccaagttttacagaggaagaagatgtaaatgtagatgatgtagctgctgcttttgatgattctaaggaaaatctagtgacagagagaaaagagaaaccggtttcaatgaatgcttttgaactcatttcaagatctcaaagctttaaccttgacagcttatttgagcagcaaacaggagttgtaaagagagaaacacattttacttcacaacatcctccgaacgaaatcatgtcgaaaattgaggaagctgccaagcctcttggattcaatgttcgcaagcgaaattataagatgaggctgcaaggtgataagagtggaaggaaaggtcatctttcggtggctaccgaggttttcgaagtggcgccctccttgcacgtggtggagctgcggaaaaccggtggcgatacactggagtttcacaagttctacaaaaacttctcttcagggttgcaagacatagtttggcatactgaagaaaaaatttgaggaataaaaggtgctgtagacatgcaattatcccggttcatggaattatgaatgagatagagtaactttttaaatttggagagttttgaaattaaatttgagagtaaattaaacttttgtaaatagttctttcatatcttaatttggatatagttcactcttcccacagagaaaagtagtgataagagactccggattctgaacatgtaatacaattgaacataagtattctatgaactactatgtgtgtgacaatgttttggattcggttttggaacaacagtttcattgtaaattctattttttccagcatagttatttaatcttgatcataaaataacatgctggttgtggcatta

SEQ ID NO: 363 - DNA, 1708 bp, Arachis hypogaea
atttattatcacactctctccgttttgtactcattcacttgcaacttctttttctgttttcttttcctattcaaagagctcaataatatataatcatgagtagcagcaagagcaacaagaaaggaggaagaggaggaggagcgccaccggctccaagggcggcggctcgcacgtgcgtggggaagtatgagcttggaaagactatcggagaaggaagcttcgcgaaggttaagttcgcgaagaacgttgagaatggagaccatgttgccatcaagatccttgacaagtcccatgtcctcaaacataagatgattgagcagctgaagaaggaaatctcggcgatgaagctgatcaaccatccaaacgttgtaagaatatttgaggtgatggcaagcaaaacaaagatttacattgttctagagttggttaatggaggagaactatttgacaaaattgcgagatatggaagactaaaagaggatgaggcaagaagttattttcaacagctaatcaatgcagttgattattgccatagtagaggagtttatcatagagatttgaagcctgagaatcttcttctggactcaaatggtgttcttaaagtttcggattttggattgagtacttacgcgcagcgagaggatgaacttcttcgcacggcatgtggaaccccaaattatgttgctcctgaggtgatcaatgatagaggctatgttggatctgcatctgatatatggtcttgtggagtcattctctttgtactcatggctggatacttgccttttgatgaaccaaatcaaatggcactttacaagaaaattgaaaaagctcaattcacatgtccatcttggttttcggccgaggcgaaaaaaattctgaagcgaattctggatccaaatcctctcacaaggataaaaattcctgaactcttgagagatgaatggtttagaaaaggatacaagccaccaagttttacagaggaagaagatgtaaatgtagatgatgtagctgctgcttttgatgattctaaggaaaatctagtgacagagagaaaagagaaaccagtttcaatgaatgcttttgaactcatttcaagatcacaaagctttaaccttgacagcttatttgagcagcaaacaggagttgtaaagagagaaacacattttacttcacaacatcctccgaacgaaatcatgtcgaaaattgaggaagctgccaagcctctgggattcaatgttcgcaagcgaaattataagatgaggttgcaaggtgataagagtggaaggaaaggtcacctttcggtggctacagaggttttcgaagtggcgccctccttgcacgtggtggagctgcggaaaaccggtggcgacacactggagtttcacaagttctacaaaaacttctcttcagggttgcaagacatagtttggcatactgaagaaaaaatttaaggaataaaaggtgctgtagacatgcaattatcccggttcacggaattatgaatgaggtagagtaacttgttaaatttggagagttttgaaattaaatttgagagtaaattaaacttttgtatatagttctttcatatcttaatttggatatagttcactctttccacggagaaaagtagtgtgataagagactccggattctgaacatgtaatacaattgaacataaatattctatgaactactatatgtgtgacaa

SEQ ID NO: 364 - DNA, 1752 bp, Glycine max
attaatttcaagtataagtaagtaactaaacaaaagggataagagcaaggtccaaaaatgagcagcatgaaggtagcgaaagggcgtatcctggttggtaaatacgagttgggaaaaacaattggagagggaagctttgccaaggtgaagttcgccaggaacgtccagaacggtaactatgtcgccatcaaaatcctcgaccgtaaacatgtcctccgcctcaacatgatggaacagctcatgaaagaaatatcaaccatgaagttaatcaatcaccccaacgttgttagaatacttgaggtgttggcaagcaaaacaaagatttacattgttctggagtttgttgatgggggagaactatttgacaaaattgctgcaaatggaagacttaaagaagatgaagcaagaaattatttccaacagcttattaatgctgttgattactgccatagtagaggcgtgtatcacagagatttgaagcctgagaatcttctagactcaaatggtgtccttaaagtttcagattttggtttgagtacatactcacagaaagaggatgaactgctccacactgcatgtggaaccccaaattatgttgctcctgaggtgcttaatgatagaggttatgttggttctacatctgatatttggtcttgtggagtcattctctttgtacttatggctgggtacttgccttttgatgaaccaactcatatggctctgtacaaaaaaattggcagggcagaattctcttgtccatcatggttttcgccacaggcaaagaaattgctaaaacacattcttgacccaaaccctctaacgaggataaaaattcctgagctcttagaagatgaatggttcaaaaaaggatacaagccaacatccttcactgaggaagaggatctaaatgtagatgatgtagtcgttgctttcaatgagtctaatgaaaatctagtgacagagagaaaagagaaacccgtctccatgaatgcttttgagctcatttgtaggtcacaaagtttcaatcttgacagtttgtttgagaagcaaacgggtcaagtaaagcaagaaacaagttttacttcacagtgccctgcaaatgaaattatgtttaaaatcgaggaagcagccaagccactgggctttaatgtatacaagcgaaattataagatgaagttgcaaggtgacaagagtgggaggaagggtcacctttcagtggctactgaggtttttgaagtggcgccctccgtgcatatggtggagctgcgaaagacagggggtgatacattggagtttcataagttctacaaaatattctcatcagggttgcaagacatagtgtggcatgatactgaaggaaaaaaaaatatgaagaattaagcaacctctagggaaagcaatcatcatattcatagggttacgccttcaatgattcgtttgattaattcataaatcgggttattgttctgtttctacttctagtgccattcccttattgtggttcgtggagttcccatgctttgctaaatctggaactttggatgtgtctggttggatgttcgatatgaaagagagaaaaatagatcccttattggtgctttatctttgacgctgtattcttaattttttttttactaccgtattcagtatagacgtagtaaatatatataaatggggggaaaatagtataagtgagtaggcattggagtgtggtataatacttgtactcttcaaatatttcattcccttatg

SEQ ID NO: 365 - DNA, 2126 bp, Solanum phureja
cgaaattatattaattattcacgagttattatatacacatatcttatctctatctttataaagtagaaatactatttccgatagaccatcaatttttttagtttttttttcataattaaactttataaaatatattaaaatccaccttcgaaaccatgaacaatggcgctattcattctgctccatttacaacacaatgtgacctttctgtaaccctttctctctctctctctctcctcattttctctctcatctctgctacttcatgaccttcgtgattattatttttttacattgggaaaacaaaactcaaccaaaccccattacaaaattagcattttcttgaagaatcagcaacaaattaggtgctaaaacgaactcttaacaaacacaagtctttatcattcatcaatcccctgttttttttttcaccaagaacgaaaaccccatttcatcttctttaaagggggttcttaaagatgatagaacccaaaaaacagagcaaaaacagaggtttttatgtaagaatgaagcttttaaaccacaacaatggcggaaatagaaacagaggattgttttgttacagatatttcaaatgggttctttggttttcactttctttttattttttcgcttcgtttctattcaatcataaacctaataccatttctaaaaccaccgttcctcaatattctaaagcttctcgtgctcttattgaataccctgaaactcaaaaccatcgagattcgttgaatggattgaagatttacgtttatgatttgccaagtaaatacaatagcgattggttatcaaacgaaagatgtagtaaccatttatttgcatctgaagtagccatacataaagctctgttaaacagcgatgttcgaacatttgatccatttgaagctgattttttcttcgtccctgtttacgtatcgtgtaatttcagcactgttaatggattccctgctattggacatgctcgttctttaatttcttcagctattaagcttatttcatcggaatttactttttggaatcgaagttcaggttctgaccatatcttcgttgcttctcatgattttgggtcttgttttcacacattggaagatgttgctatggcagatggagtaccggagtttttgagaaaatcgattatattacaaacatttggtgttaaatacgatcacccatgtcaaaaagcagagcatatagtaattccgccgtatatttcaccggaaagtgtacggaaaacactagctacgtcggacgttaatggccgccgtgatatttttgcgttttttaggggtaaaatggaagtccacccaaaaaatgtcagcggacgtttttacagcaagaaagtccgtactgttatattgaaaaaatatgggaatgatcggagattttacctaagacgtcatcggtttatcggttatcaatcggagattttacgatcaacgttttgtttatgtccattaggatgggctccgtggagtccaagattagttgaatcagttgttttaggctgcgtgccggtgatcatcgccgacggcattgatctgccgttttcctccgccgtgccgtggtcggaaatctccgtcacggtggcggagaaagacgtcggaaaacttggcacgattctcgagaacgtggcagcaaccaatctgagcacaatacaacagaagttgtgggacccaagaatttcaagggccctactttttcatgatcggacggtggagggtgatgccacgtggcaggtcttgcatgccttgacggaaaaattgagtaggtcccatcacaggtcaagggttttgagcgaatgagatcacgacacgtgttgtggttttggttggatagattcttatgccagctaagaaaaaatgtgtaaatgtgggaaacagctagacattgtatatgcggatttcggataaattgactatttgaacgttcaccttgttatcgagtgtcaagaatcgtaaggaaagcgggggtctcggtgtgctgagttggtgggacggcatgggttggacaggagcttgttattgttgtacatgtgaaaagggaatattattttattaatttggagagaaatatgaagaaacaggatgcttatgctttgctgtaca

SEQ ID NO: 366 - DNA, 2183 bp, Solanum tuberosum
gatcgaaattatattaattattcacgagttattatatacacatatcttatctctatctttataaagtagaaatactatttccgatataccatcaatttttttagtttttttttcataattaaactttataaaatatattaaaatccaccttcgaaaccatgaacaatggcgctattcattctgctccatttacaacacaatgtgacctttctgtaaccctttctctctctcctcattttctctctcatctctgcaacttcatgaccttcgtgattattatttttttacattgggaaaacaaaactcaaccaaaccccattacaaaattagcattttcttgaagaatcagcaacaaattaggtgttaaatttattcttcaagctaaaacgaactcttaacaaacacaagtctttatcattcatcaatcccctgttttttttttcaccaagaacgaaaaccccatttcatcttctttaaagggggttcttaaagatgatagaacccaaaaaacagagcaaaaacagaggtttttatgtaagaatgaagcttttaaaccacaacaatggcggaaatagaaacagaggattgttttgttacagatatttcaaatgggttctttggttttcactttctttttattttttcgcttcgtttctattcaatcataaacctaataccatttctaaaaccaccgttcctcaatattctaaagcttctcgtgctcttattgaataccctgaaactcaaaaccatcgagtttcagattcgttgaatggattgaagatttacgtttatgatttgccaagtaaatacaatagcgattggttatcaaacgaaagatgtagtaaccatttatttgcatctgaagtagccatacataaagctctgttaaacagcgatgttcgaacatttgatccatatgaagctgattttttcttcgtccctgtttacgtatcgtgtaatttcagcactgttaatggattccctgctattggacatgctcgttctttaatttcttcagctattaagcttatttcatcggaatttactttttggaatcgaagttcaggttctgaccatatcttcgttgcttctcatgattttgggtcttgttttcacacattggaagatgttgctatggcagatggagtaccggaatttttgagaaaatcgattatattacaaacatttggtgttaaatacgatcacccatgtcaaaaagcagagcatatagtaattccgccgtatatttcaccggaaagtgtacggaaaacactagctacgtcggacgttaatggccgccgtgatatttttgcgttttttaggggtaaaatggaagtccacccaaaaaatgtcagcggacgtttttacagcaagaaagtccgtactgttatattgaaaaaatatggaaatgatcggagattttacctaagacgtcatcggtttatcggttatcaatcggagattttacgatcaacgttttgtttatgtccattaggatgggctccgtggagtccaagattagttgaatcagttgttttaggctgcgtgccggtgatcatcgccgacggcattgatcttccgttttcctccgccgtgccgtggtcggaaatctccgtcacggtgggggagaaagacgtcggaaaacttggcacgattctcgagaacgtggcagcaaccaatctgagcacaatacaacagaagttgtgggacccaagaatttcaagggccctactttttcatgatcggacggtggagggtgatgccacgtggcaggttttgcatgccttgacggaaaaattgagtaggtcccatcacaggtcaagggttttgagcgaatgagatcacgacacgtgttgtggttttggttggatagattcttatgccagctaagaaaaaatgtgtaaatgtgggaaacagctagacattgtatatgcggatttcggataaattgactatttgaacgttcaccttgttatcgagtgtcaagaatcataaggaaagcaggggactcggtgtgctgagttggcaggacagcatgggttggacaggagcttgttattgttgtacatgtgaaaagggaatattattttattaatttggagagaaatatgaagaaacaggatgcttatgctttgctgtacaattcctttgttttcttctttctactcaaaatcatacat

SEQ ID NO: 367 - DNA, 2339 bp, Nicotiana benthamiana
gccgctattcattctgctccatcacaatgtgacccttctgtaccaaaccctctctctctctctctcttctcactttctctctccgccatctctgcaacttcatgacctccattattatttttttcctagggaaacagaaactgaaccaaaccccaatacttaattatttttaggtgtcaattctttttctgtgacatactcgttcatttctttattcttcaagttaaaacgaactcttaacaaaccatcccctgtttcttcatctccacttcaataccaaaaacgacagccccatttcaccagctacacaccatttctcttttcgaggggtttaagaagggagaaacaaaatacaaatgttagaaccaaaacgaaccaacaacagaaacagaggtttctatgtaagaatgaggctattacataataatggtagaaatgttagaacatcagagaagagtttttgttacagatatttcaaatggcttctttggttttcactttctttttacttctttgcttcttttctctttaatcacaagcctaataatactatctccttcatttctacaactaccgtttctcaatctaaagcttcacgtgctctcattgaatcaatcaactcctcagctgttcttcaataccccaaacaccaccaagattcgttaaatggtttaaagatttacgtttacgagttaccatcaaaatacaacagtgattggttatcaaatgaaagatgtagcaaccatttgtttgcatctgaggtggcaatacatagagctttgttaaatagcgatgtccgaacatttgacccgtgggaagctgattttttcttcgtacccgtttatgtttcttgcaattttagcacagttaatggattcccagctattggtcacgctcgttctcttattggttcggctgttgagctaatatcttcacaatttccattttggaatcgtagtttaggttctgaccatgtcttcgtcgcttctcatgattttggagcttgttttcacacgttggaggatgtggctagggcagatgggatacctgaaattttgagaaattcgattatattacaaacttttggtgttaaatatgatcacccatgtcaaagagcagaacatgttgttattccaccgtatgtgtcgccggaaagtgtacggaaaacgttggccacgtcggacgtcaatggtaaacgtgatattttcgcgttctttaggggtaaaatggaagtccaccctaaaaatgtcagcggacgttattacagcaagaaagttcgtacagttatattacaaaaatatgggaatgatcggagattttacctgacgaggcataggtttgccggttaccagtcggagatattacggtcaacgttttgtttgtgtccattagggtgggccccatggagtccaagactggtggaatcggtcgttttaggctgtgtaccggtgatcatcgccgacggcatcgagctgccattttcctccgccgtgccgtgggcggatatctccgtcacggtggcggagaaagacgtcgggaagctgggttcaattcttgaacacgtggcttccaccaacttaagcatcatacaacagaagctgtgggacccaagaattacacggtccctcctgttccatgatcggacggtagagggagacgccacgtggcaggttttacatgctttgacacagaagttgaataagtcccatcacaggtcaagagtttcaaacgaatagaattttgccacgtatggagcatattatggggatagaatctctgccagctaagaaaggctctttaatcgacgtggaaatgtgtaaatgtgggagacagctacggatgtattggactgttctatatttttagcagaagaagaagggagagagagacaggacaactctgtatatttttcacttttaatgtatatagaggtaggaggaattcagaaattatggtaagtggggtccaatattacagagattttattgtaagctgagttggcaagatttgattggttgtagatgcggtttggggtggaccttagcttatgttgtgtacatgtgaagagaaggaatattatttttttttattgggatggtatggggaaataagaagagacagaagatggtttgagaaaatgtgcatggtctgctgtgtggatgcttctgctttgctgtacaattccttttttttttcttcttcttatatctttgtagtaactttattcaaatataggaaaggtagaaagttagaaagaaatagataatacaatattcatcagccttatcaaaggctcatatatgatacatttaagtgaaggaggacgattcgtgtcgtgt

SEQ ID NO: 368 - DNA, 1523 bp, Solanum tuberosum
tcttcttcttcctctttcacccattctccctcttctttaccagttgggaaaaataataataatgaagagctcaacaacagtaatattgctgctcgtgctattgtgcgccgtttccaacatttcctttgccgttattgatggattgttaaagaatggaaacttcgaaatgcccccatcaaaagcggacttaaacggcacggaggttctaaagcacaacgccataccggaatggtcaatttccgggttcgtagagtacataaaagctggccaaaaacaaggtgatatgcttctagtcgtacccgagggctatgccgcggttcgtctaggtaacgaagcatcgatcaagcaaatactgaacgttacaaaaggaatgtactattccttaacgttcagtgctgctagaacttgtgctcaagaggaacgtatcaacgtatctgttacacctgatttcggagtactacctatccaaacattgtatagtagcagtggttgggactcatatgcttgggcatttcaagctgaacttcaccaagttgagatcttgcttcataatccaggtgttgaggaagatcctgcttgtggtcctctcatcgattcgatcgccattcgtactttatatcctcctagggccactaatcagaatttgttgaaaaatggagattttgaagagggtccatacatattcccaaacacaagttggggtgtacttgtaccaccaaacattgaagatgaccattccccattgccagcatggatggttgagtccctaaaggcagtgaaatacttagattctgaccatttttcagtaccacatggcaagagagccatagagttagttgctggcaaagaaagtgccattgctcaagttgcaagaaccacaattggcaaaatgtatcaacttagtttcaaagttggagatgcaagtaatgcttgtgaaggttctatgattgttgaggcctttgctggaagggatacacttaaagtcccttatgagtctatgggaaaaggtggatataagcgcgctatcctccgtttcaaggccactgctagccggactaggatcatgttccttagcacctactatcacacgagaagcgatgattttgtttccttgtgtggccctgtggtcgatgatgtgactctcttgagtgtcaggacccatcgtcgagtcctctaaggcgtgtattttgatgaaatacggtggattttatgaattatggtatgagtaaatttggttgtaatgaagcaaagaagaaggtgggagctctattttatcttacttttggcttgtttactactagtggcattatcttatgcatgtgtactatactaatgtctaatgaaaaggcaaagaagtatatatgatatatatatattttcattggtgttgagtggtttatgtattacattttgggttcgactttgggagaactcaaaagtagtttgagcaaatgattgttgtaacactagcaattcaagcaaccattgtctttttagccaataaaaaaggtgtggcttggatg

SEQ ID NO: 369 - DNA, 1534 bp, Solanum phureja
aatcggtcctcttcttcttcctctttcacccattctccctcttctttaccagttgagaaaaataataataatgaagagctcaacaacagtaatactgctgctcgtgctattgtgcgccgtttccaacatttcctttgccgttattgatggattgttaaagaatggaaacttcgaaatacccccatcgaaagcggacttaaacggcacggaggttctaaagcacaatgccataccggaatggtcaatttccgggttcgtagagtacataaaagctggccaaaaacaaggtgatatgcttctagtcgtacccgagggctacgccgcggttcgtctaggtaacgaagcatcgatcaagcaaatattgaacgttacaaaaggaatgtactattccttaacgttcagtgctgctagaacttgtgctcaagaggaacgcatcaacgtatctgttacacctgatttcggagtactgcctatccaaacattgtatagtagcagtggttgggactcatatgcttgggcatttcaagctgaacttcaccaagttgagatcttgcttcataatccaggtgttgaggaagatcctgcttgtggtcctctcatcgattcgatcgccattcgtactttatatcctcctagggccactaatcagaatttgttgaaaaatggagattttgaagagggtccatacatattcccaaacacaagttggggagtacttgtaccaccaaacattgaagatgaccattccccattgccagcatggatggttgagtccctaaaggcagtgaaatacttagactctgaccatttttcagtaccacatggcaagagagccatagagttagttgctggtaaagaaagtgccattgctcaagttgcaagaaccacaattggcaaaatgtatcaacttagtttcaaagttggagatgcaagtaatgcttgtgaaggttctatgattgttgaggcctttgctggaagggatacacttaaagtcccttacgagtctatgggaaaaggtggttataagcgcgctatcctccgtttcaaggccactgctagccggactaggatcatgttccttagcacctactatcacacgagaagcgatgattttgtttccttgtgtggccctgtggtcgatgatgtgactctcttgagtgtcaggacccatcgtcgagtcctctaaggcgtgtattttgatgaaatacggtggattttatgaactatggtatgagttaatttggttgtaatgaagcaaagaagaaggtgggagctctattttatcttacttttggcttgtttactactagtggcattatcttatgcatgtgtactatactaatgtctaatgaaaggcaaagaagtatatatgatactatatatatattttgattggtgttgagtggtttatgtattacattttgggtttgactttgggagaactcaaaaatagtttgagcaaatgattgttgtaacactagcaattcaagcaaccattgtctttttagtcaataaaaaaggtgtggcttggatg

SEQ ID NO: 370 - DNA, 1545 bp, Solanum melongena
aatccgtcttcttcttcctcttcctcttacccccattattgttcttcttcttatttacaagttggaaggaaaaaagatgaagagctcaagtatagcaatactgctggtggtgctactctgcgccgcttccaacatttccttagccgttattgatggattattaaagaatggaaactttgaaatgcctccatcaaaaagtgatttaaacggcacgattgttctaaagcacaatgccataccggaatggtcaatctccggattcgtagagtacataaaagcgggccaaaaacaaggcgacatgcttctagtcgtgccagagggctacgctgcggttcgtttagggaacgaagcatcgatcaagcaagtactgaacgttacaaaaggaatgtactattccttaacattcagtgctgcccgaacatgtgctcaagaggaacgcatcaacgtatccgttacgcccgatttcggagtattgcctatccaaacgttgtacagtagtagtggttgggactcatatgcttgggcatttcaagctgaacttcatcaggttgagatcttgcttcataatccaggagttgaggaagatcctgcttgcggtcctcttatcgattcaatcgccattcgtacattatatcctcctagggccacgaatcagaacttgttgaaaaatggagattttgaagagggtccgtacatattcccaaacacaagttggggagtacttgtaccaccaaacattgaagatgaccattccccattgccagcatggatggttgagtccctaaaggccgtgaaatacttggactctgaccatttctcagtgccacatggcaagagaggcatagagctagttgctggtaaagaaagtgctattgctcaagttgcaagaaccactattggcaaaatgtatcaacttagtttcaaagttggagatgcaagcaatgcttgtgaaggttctatgattgttgaggcctttgctggaagggacacaattaaagtcccttatgagtctaaggggaaaggtggatataagcgcgctattctccgtttcaaggccactgctaacaggactaggatcatgttccttagcacctactaccacacgaggagcgatgattttgtttccctatgtggtcctgtggtcgatgatgtgctgctcttgagcataaggaaccatcgtcattacctttaaggcgtgggttttgatgaaatacagtgagttttatgagttatggtattagtaaatttggttctaatgaaacaaaggtgggaattctattttatctttactttggcttgtttactactagtggcattatcgttatttgtactatactaatgtccaatgaaaggcaaagaagtatatattatatatattttgattgttgttgagtggttttaaatgattgttgtaacactagcaattcaagcaaccattgtctttttagccaataaaaatgcgtggcttggatgaagattgagtactgtttcactggttatattttgtcaatttacaataattgtatagatgcaaggcataattaa

SEQ ID NO: 371 - DNA, 1442 bp, Nicotiana tabacum
ccgggggaattcaaaccaaaccaattggcctttttcctcttactgtcattcttctttatatttactactgttggaaaataatgaagaactctagaatgaaagtgctattgctgctgcttgtgctactgtgcgctattttcaacatttccttagccttaactgatggattgttaaagaatggcaactttgaaatgccgctggcgaaagcagacctcaatggcacggtggttctaaagcacaatgctataccggaatggtcgatctctggcttcgtcgagtacataaaggcgggccaaaagcaaggtgacatgctgctggtcgtgccggagggctacgccgcggttcgtctaggaaacgaagcatccataaagcaagtattgaatgttacaaagggaatgtattattccttaacattcagtgctgctagaacttgtgctcaagaggaacgtatcaatgtatcggttacacctgattttggagtgttgcctatccaaacattgtatagtagcagtggttgggactcttatgcttgggcatttcaagctgaatttagccaagttgaggttttactgcacaatcctggtgttgaggaagatcctgcttgtggtcctctcatcgattcagtcgccattcgcactttatatcctcctagggcaactaataagaacttgttgaaaaatggagattttgaagagggtccatacatattcccaaacacaagctggggagttcttgtaccaccaaacattgaagatgaccattcccctttaccagcatggatggttgagtccctaaaggcagtcaaatacttagattctgatcatttctcagtgccacaaggcaagagagcaatagagctagttgctggaaaagaaagtgcgattgcccaagttgcaagaaccactattggcaaaatgtatgaactcagttttaaagttggagatgccagcaactcttgtgaaggttccatgattgttgaggcctttgctggaagggacactctaaaagtcccttatgagtctaaggggaaaggtggatttaagcgcgctgttctccgtttcaaggccaatgctaaccgcattcggatcatgttccttagcacatactaccatacgaggagcgatgattttgtttccctatgtggtcctgttgttgatgatgtgaagctcttgagtgtcaggaaccctcgtcgattcctctgagtcatgtatttttatgtaaaacgatgaattttcgagttatagtatgagtaaatttggttgtaatgaagcaaaaagaatgtggggagttctgtttctcttagcttgtttactagtagtgttttcatatgagtatgtattatactaatgtctaatgaaaggcaaagaagtatatatattttgattggtattgagtggtttatgtattgcaacacaataaatcagtatggatttgaagttgct

SEQ ID NO: 372 - DNA, 1340 bp, Nicotiana benthamiana
cgaattcaaaccaaaccaattggcctttcttcctcttagtgtcatttcttcttcttatttactactgttggaaataatgaagaactcgagaacgaaaagtttatctctgctgctgcttgtgctactatgcgccattttcaacatttccttatccttaactgatggattgttaaagaatggaaactttgaaatgccgctggcgaaaggagacctgaatggcacggtggtcctaaagcacaatgccataccagaatggtcgatctccggctttgtcgagtacataaaggcgggccaaaaacaaggtgacatgctactggtggtgccggagggctacgccgcagttcgtctaggaaacgaggcgtccatcaagcaagtattgaatgttacaaagggaatgtactattccttaacattcagtgctgctagaacttgtgctcaagaggaacgtatcaatgtatccgttacacccgatttcggagtactgcctatccaaacattgtatagtagcagtggttgggactcatatgcttgggcatttcaagctgaatttagccaagttgaggttttactgcacaatcctggtgttgaggaagatcctgcttgtggtcctctcatcgattcaatcgccattcgctctttataccctcctaaggccactaataagaacttgttgaaaaatggagattttgaagagggtccatacatattcccaaacacaagctggggtgtccttgtaccaccaaacattgaagatgaccattcccctttaccagcatggatggttgagtcattaaaggcagtcaaatacttagactctgatcatttctcagtgccacaaggcaagagagcaatagagctagttgctggaaaagaaagtgcaattgcccaagttgcaagaacaactattggcaaaatgtatgaactcagtttcaaagttggagatgcaagcaattcttgtgaaggttccatgattgttgaggcctttgctggaagggacactcttaaagtcccttatgagtctaaggggaaaggtggatataagcgcgctgttctccgtttcaaggccgctgctaatcgcactaggatcatgttccttagcacatactaccatacgaggagcgatgattttgtttccctctgcggtcctgttgttgatgatgtgaagctcttaagtgttaggaaccctcgtcgattcctctgagtcgtgtattttgatgaaaaacgatgaattttcgagttatagtagtaaatttggttgtaatgaagtagaagaatgtgatagttctgtttttcttagcttgtttactagcagtattttcatatgagtctgtattatagaa

SEQ ID NO: 373 - DNA, 1947 bp, Capsicum annuum
ttagcgtcttaatcttctctattaatgaccaatggcagctagttgttggatgccctttaatttatattcgtggatcatgtgaaaaaagcttatatttgcccacaatattatgaatggttatgttgtagttgttatttttcaaatgccatgattttataaaaattatagtaataccgaaattaactctttatatttctgtacaaaccctaacgtatgcataacaaagaaaaacagaattggggaaaacgtgatcattgaaacacatgcaggactgttaaagaatggaaactttgaaatgcccctatcgaaaggggacctaaacggcactgtggttctaaagcacaatgcgataccggaatggtcaatctccgggttcgtagagtacataaaagcaggccaaaaacaaggcgacatgttgttggttgtcccagagggctacgccgccgtccgactagggaacgaagcatcaatcaagcaaatactcaacgttacaaagggaatgtactattccttaacgttcagtgctgctagaacttgtgctcaagaggaacgtattaacgtatccgtaacacccgattttggagtgctgcctatccaaacattgtatagtagcagtggttgggactcatatgcttgggcatttcaagctgaaattagccgagtggaaatcttgcttcataatccaggtgttgaggaagatcctgcttgtggtcctctcatcgattccatcgccattcgcactttatatcctcctagggccactaatcagaatttgttaaaaaatggagattttgaagagggtccatacatattaccaaacacaagttggggagtgcttgtgccaccaaacattgaagatgatcattcaccattgccagcatggatggttgagtctctaaaggcagtgaaatacttagactctgaccatttctcagtgccacatggcaagagagccatagagcttgttgctggtaaagagagcgccattgcccaggttgcaagaaccactattggcaaaatgtatcaacttagtttcaaagttggagatgcaagcaatgcttgtgaaggttccatgattgttgaggcctttgctggaagggacacacttaaagtcccttatgagtctaggggtaaaggtggatataagcgcgctatcctccgtttcaaggccactgctagccggactcggatcatgttccttagcacctactaccacacgaggagcgatgattttgtctcgctatgtggccctgtggtcgatgatgtgacgcttctgagcattaggagccataatcgattcctctgaggtgtattttgatgaaatagggtgaattttatgagttatggtatatgagtatatttggttgtaatgaaaaaaagaaggtgggagttctattttatcttttctttggcttgtttactactactagtattatcatatgttttctaatgtctaatgaaaggcaaagaagtatatatgtatattttgattggtgttgagtgatttatgtattacattttgggttcgactttgggagtactcaaagtagtttgagcaaatgattgttgtaacactagcaattcaagcaaccagtgtctttttagccaataaaagaagtgtggcttggatgaaaattgagtggtatatcactaatttacattgggatagatatataacataattaaacttttcttatatctcccccacttgaaactaggcatccaagtaagctttacaaatcagcaatttgatatttagtctttaggctttggactgtgggttatttttttatttattttttttggagggcggggggctaaaatggactgtgggattgtgaactggacaccatgaggacaaaatggaggattatttgcagtgtatggccatttatggaagaattgcactgacggtgatttaaagtcactggcacaattagaagagtg

SEQ ID NO: 374 - DNA, 1466 bp, Ocimum basilicum
acagcaaaactcaataatgcaaattcctctgtttaccaggagcagcacctctagtattagtagccttgcaagaatgggggccttcactcttctgtcggtgctcttctttctctctacttcccatgccttcagagatggactgttggacaatggcaactttgagctggctcctagtgcctcagaccttaatggaaccattgtgctcaagccccacgccataccgaaatggcagacctcgggcttcgtcgagtacatcaaggcagggcagaagcagggcgacatgctgctcgtcgttccagagggatacgccgctgttaggctgggaaatgaggcctcaatcaagcaactcttgaatgtgactaaagggatgtactattctttaacttttagtgctgctaggacttgtgctcaggaggagatggtgaatgtgtctgtggcgcccgattttggagtcctaccgattcagacgttgtacagtagtaacggatgggattcgtacgcctgggctttcaaagcattttctagtgtggctgagattttaatccacaatcctggtgttgaggaggatcctgcttgtgggcctctcattgattcgattgctattcgcgctttgtatccccctagaccgactaatcaaaacctgctgaaaaacggcgacttcgaagaaggcgcatacatcttccccaacacaagctggggagtcctcatcccaccaaacatcgaggacgacaactccgccctgccagcctggatggtcgagtccctcaaggccgtaaaatacatcgatgcagcccacttctcggtgccacacgggcagcgagcgatagagctcgtgggcgggaaagagagcgccatcgcacaggtggcaagaaccacagtgggcaagacttatcagctcacattcgcagtgggcgacgcgagcaacgcctgcgagggctcgatgattgtggaggccttcgcggggagggacacggtgaaggtcccctacgagtcgaaggggaaaggagggtacaagcgcgcggtgctgaggttcgtggccacggcgacccgaacccggatcatgttcctcagcacatactaccacacgaggagtgatgaccatgcctcactctgtgggcctgttgtggatgatgtgaagctgcttagtgttcgaaacccgaggagtctcgcctgagagtttttcaggttgcaaaaatggctgctgagtattttgttttctcttggtgctatttatggatactctgtttggggtaataacagtatatgtatagaagagtgtggtttgattggcagatgtaatattaagcccagtagtagaagggcagatattgatgatacaatatatctgttttgtttctgatagggtttgaattacgaacaggttacaatgagagaggtctcggggtcgatcgtaaaaaacttccatgtactttgaagaagaaataccattgatattacaacgagag

SEQ ID NO: 375 - DNA, 2257 bp, Solanum phureja
tggaaatgctgagttacaacctctaatggacttaaaagccagtcttgaccctgaaaatgctttactcacttcatggactgtttctggtaatccatgtgatggttcttttgaaggtattgcttgtaatgaaaagggtcaagttgctaacatttctctacaaggtaaaggccttaaagggaagttgtcaccagccattgctgggctaactcacttgactggactctacttgcattataactcattgtatggagagataccaagagaaatttctaatttggttgaactcactgatttgtatttgaatgttaatgatctctctggtgagatccctcaagaacttggaaccatgtcaaaattgcaagttttgcaactatgctataaccattttactggtagcatacccactcaactagggactctaacaaagctcaatgtcctggctctgcaatccaatcagttaactggtgcgatccccgctagcttgggtgacttgggagtgttgatgagggtggacttgagttataatagtcttttcggttcaattccttcaaaacttgcggatgctcccctacttgaagtcttggatatccgaaacaacaagatttctggcaatgtgcctcttgctttgaagagattagttggaggtttccagtatgagaacaatccaggactatgcggtgtgggtttcccatccttgcgagtttgtacatctttggatcgctcgaatcctaatagaccagaaccctatggagttggctcaagtggtttatctactagagatattccagaaacagctaatctcaatctaaattgcagcggaaatgcctgcacaacgtcgtctaaaacctcacaggcatctgttgttgtaggggttattgtggttactattattgcatctgctataggaattctttccttcacacactatagaagacgaaagcagaaacttggaggtggactggaaatgtgtgatagccgtctcagtatcgatcaggccaaggaagttaataggaagaatggttctcccctagtcagtcttgagtactcgattggttgggatccgttggctgagggccggcgttatggtggagtttcccaagagattctgcagagatacagattcaatttggaagaggtggagtcagctacacagtactttgctgataagaatctattggctaagagcaacttttcaactacatatagagggactctaagagatggatcacttgttgctgttacgagaattgccaaaattagctgcaagtcagaagaagctgagtttttaagaggactaaacattttgacgtctctgagacatgataatttagttaggctgagaggtttctgttgctctaaaagccggggagaatgttttctcgtttatgattttgtgccaagaggaaacttgttgcactacctagatttgaaggaggacgaagctcatgctcttgaatggtccacgagggtatctatcattagtggcactgcaaaaggcgttgagtatttgcacgggtgcaaggtgaataagccagctctagtgcatcagaatatctgtgctgaaaacgtgctccttgaccaacgattcaaaccattgctttcaaattcaggcctgcataagctcctcacaaatgataccgtcttttcaacactcaaggcaagtgctgccatgggatatttagctccagagtactccactacaggccgatttactgagaggagtgatatttatgcctttggagtgctcattttccaaattttatctggcaagcgaaaattcaccagttcaatgcgtgctgctgctgaatcgtccaaattccacgacttgatggacgtgaatctccgtggaaggttctctgagtctgaagcaacaaaactagcgaaaatcgctttgttatgtacacatgaatgtccagaggagagaccaaccatggaaacaatcgtacgagaaattggtaatttagctagtccctcctaatgctaatgatcttcttccatctactattgcctgtggcaaattttcaatcctcctacttattagctggagatagattcgtactaacctctcacgagtattggagcttcaaatatttagtcagtctgagaacttcttcgactgaggacttgaccattttgtgaatgtatcttgtatgccatttaaccttaggatttctcatgttggaggattttcctccgtttatctcatggattctaattaatctgtttgtaaaaagatgaatgttcttctatttaccta

SEQ ID NO: 376 - DNA, 2859 bp, Capsicum annuum
gtgagtcagtacttctctgaaacagcacaagaactaccatttccagtcaaagagagtaacatgggttttcctccattacttctttgctttctcctcatactcttcgcagtttctgtaacaggaaatgatgagttaagagctctaatggacttgaaagccagtcttgacccagaaaatgctttgctaacttcatggactgtttctggtgatccatgtgatggttcttttgaaggtgttgcgtgtaatgataggggtcaagttgctaacatttctctacaaggtaaaaggcttaaagggaaactgtcaccggccattggtgagctacctcacttaactggactttacttgcattataatgcattgtatggggagataccaagagaaatttctaagttgattgagctcactgatctgtatttgaatgttaataatctctctggtgagattcctccagaacttggaaacatgtccagcttgcaagttttgcaactatgctataaccattttactggtagcatacccactcagctagggactttaaaggagctcaatgtcctggctttgcaatccaatcagttaactggtgctatccctgctagcttgggtgacttgggagtgttgatgagggtggacttgagttctaatcatcttttcggttcaattccttcaaaacttgcggatgcaccccttcttgcagtattggatatccaaaacaacaggctttcaggcaatgtgcctcttgctttgaagagattggttgagggattccagtatgagaacaatccaggactttgtggtgtgggtttcccatctttgagagtttgtacatccttggatcgctcgaatcctaatagaccagagccctatggaggtggcttgagtggtttaactactagagatattccagagacagctaatctcaatctaaattgcagcagaaatggctgctcaaaatcatctaaaacttcacaggcatctgtacttgtaggggttattttagttactgttattgcatctgctataggaattctctccattgtgcattatagaagacgaaagcagaaacttggaggtggactagaaatgtgtgatagccgactcagtattgaccaggccaaggaggttaataggaagaatggttctccactagtcagtctggagtactcgattggttgggatcccttagctgagggtcggcgttatgttggagtttcccaagagattctgcagaggtacagattcaatttggaagaggtggagtcagctacacagtactttgctgataagaatctattgtctaagagcagcttttcaactacatatagagggacgctaagagatggatcacttgttgctgttacaagaattaccaaaattagctgcaagtcggaagaagctgagtttctaagaggactaaacattttgacgtctctgagacacgaaaatttagttaggctgagaggtttctgctgttctaaaggcaggggagaatgttttctcgtttatgattttgtgccaagaggaaacttgttgcactacctagatgtaaaggaggatgaagctcgtgctcttgaatggtccaccagggtttctataataggtggaactgcaaaagcaggcattgagtatttgcacgggtgcaaggtgaataagccagctctagtgcaccagaatatctgtgctgagaacgttctccttgaccatcgattcaatccattgctttcaaattccggcttgcataagctcctcacaaatgataccgtcttttcagcactgaaggccagtgcggccatgggatatctagctccagagtactctactacaggccgatttactgagaggagtgatatttatgcctttggagtgcttattttccaaattctctctggcaagcgaaaattcaccagttcaatgcgcgctgctgctgaatcatccaaattccatgacctaatggacacaaatctccgtggaaggttctttgagtctgaagcagcaaaactagcgaaaactgctttgttatgtacacatgaatgtccagaggagagaccaaccatggaaacaatcgtacgagaacttggtaatttagctaactcttcctaatgccagtatcttcttccatcaactattgcctgtggaaaattttcaatgctaacttattaggtggagatagattcgtactaacctctcacgagaattggagcttcaaagatttagtcagtctgagaccttcttcgactgaggacttgaccattttgtgaatgtttgtatcttgtatgccatttaaccttatgatttctcatgctggaggatattcctctgtttgtctcatggattgttatttatctgtttgtaaaaaagatgaatgtgtctccatttacttaaggatctttgttttgttttgtgccttgagtttcatattcgaggggttcaattattaaatacacttcaacaatggctgccacttaagcataactaaacaggtcattgaaactttttgcgttagcaatgataataatttgaaaggaaagccattctctttgtctttcgtatgacaggtcgaggaggtaaaatttcgcatcagttttttgagtatagtttaccaatcttttgttatttgttgaatctcttcgaaatgtgtgtgaaccaatctatcaaatttcaaatgaataagaggaaagttttaaattcttctatcctaatttcttctcatttttaatgtatcttctcattgtagctgatctgggaaactatttcttcttgttcgtgtgcagtttaatcagatgagaataatctctttttgggaaaatacaattatgacaaaaactattagtcagactactttagatggttgtgggaagc

SEQ ID NO: 377 - DNA, 2371 bp, Nicotiana benthamiana
taacatgacttttcctcaatttctctgctttctcctcacactcttcatattcttttctccgcaacccatatatggaaacaatgagttgcaagctcttatggacttaaaggcaagtcttgaccctgaaaatgctttgctcatttcatggacagtttctggtaatccatgtgatggcttttttgaaggtgttgcgtgcaatgaaaaaggtcaagtggctaatatttctcttcaaggtaaaaggctttctgggaaactgtcgccggccattgctaggctttctcacttgacgggactctacttgcattataattctttgaatggagaaatacccagagaaatttcaagtttgattgagcttactgatctgtatttgaatgttaataatctctctggtgagattccccctgaacttggaaacatgtccagcttgcaagttttgcaactatgctataaccagttcagtggtagcataccaactcaaatagggactctaaagaagctcaatgtcctcgctctgcaatccaatcagttaactggcgcaatccccgctagcttgggggagttaggcgtgttgatgagggtggacttgagttctaatcatctttttggttcaattccttcaaaacttgcagatgctccccttctcgaagtcttggatatccgaagcaacaagcttttgggcaatgtgcctcttgctttgaagagattagtcggtggattccagtatgagaacaatccaggactatgcggagtaggtttcccatccttgagagtttgtacatctttggatcgctcgaatcctaatagaccagagccctatggaggtgcctcgagtggtttatcaactagagatattccagagacagctaatctcaatctaaattgcagtggaaatggctgcgcaaagtcatcgaaaacctcacaggcatctgttgttgtaggggttattgtggttactgttattgcatctactataggagctcttactttcacgcactatagaagacgaaagcagaaacttggaggtggactggatatctgtgatagccgtctcagtactgaccaaaccaaggaggttaataggaagaacggttctccactagttagtcttgagtactcgagtggttgggatcccttggctgagggtcggcgttatggtggtgtatcccaagaggttttgcagagctacagattcaatttggaagaggtggagtcagctacacagtactttgctgataagaatcgattggctaagagcagcttttcgactacatatagagggactctaagagatggatcactaattgctgttacgagaattaccaaaattagctgcaagtcagaggaagccgagttcttaagaggactaaacatcttgacgtctctgagacatgaaaatttagttaggttgagaggtttctgctgctctaaaatcaggggagaatgttttcttgtttatgattttgttccaagaggtaacttgttgcattacctagatgtgaaggaggatgaagctcgtgctcttgaatggtccaccagggtatctatcataagtggaactgcaaaagggctcgagtatttgcacggttgtaaggtgaataagccagctctagtgcatcaaaatatctgtgccgagaacgtgctccttgaccagcgattcaaaccattgctttcaaactcaggcctgcataagcttctcacgaatgatatcgtcttctcagcactcaaggccagtgctgccatgggatatttagctccagagtactctacgacaggccgatttacggagaagagtgatatttatgcctttggagtgctaatttttcagattctctctggcaagcgaaaattcaccagttcaatgcgtgctgctgctgagtcatgcaaactccatgacttgatggacgcaaatctccgtggaaggttctccgagtctgaagcagcaaaactagcaaaaattgctttgatatgtacacatgaatgtcctgaggagagaccaaccatggaaacaatcgtacgagaacttggtaatttagctatcttttcctaatggctaatgaactatttccagcagctattggctctggcaaattttctttcctaacttattagctggagataggttcctactaaccttgcaccaatattggggcggagtggatttacacatatagtttgccaagtcctttgaccgcgaacctcagactcttttgtgaatctctgtatcttgtatgccatttaaccttagaatttctcagtttggaggaatttcctctgttgttctcatggattattactgatattattattctggttgtaaaaaatggattttcctccatttacgtagggtaattattttgttcttttcttt

SEQ ID NO: 378 - DNA, 1257 bp, Hordeum vulgare
ctttgagtgaaccaagatttgcttaatctctccccactgacagtagtttttccttttctgtttgagaaaaatggtggaagtatgtgtcgggaagaaatccgactctttagtcacaagcgcgaaccggcggcccaaagaaacttgcatctccaacgaggcccatcttgttctgaaaataaaaagaaaaaaacccaaccaggcccatcagagaagccatgtgagaagaaagggaaagtgcacgatgcatcatcagttcatcatcttctccaagcctgctggctccagagctcacacagtcttcgacagaggggaaagatcaagatggaggcggcgatctccaccaatccctcgagcaagagggtcgccctggtcaccggagggaacaaaggggtcgggctggagacgtgcaggcagctcgcgtccaaggggctcagggtcgtgctgacggctaggaacgaggccagggggctggaggcggtcgaaggcgtcaggcgctccggtgctggcggccaagccgatgtagtcttccatcagttggatgtcaccgatcctgacagcgtcacccggctggcggatttcgtcagggatcagttcggcaagctcgatatcctgataaacaatgcaggcatttcaggcgttgatcgagatccagttctggttgcgaaagttaaagaacaggttgaaagtatggatgtagaccagagagttcaatggatgaaagaaaattccaaggagacatatgaggaagcaaaagaatgcatgagaacaaactactatggggcaaagcttgtcacagaggcactacttcctcttcttcagttgtcctcctctgggagaattgtcaatgtctcatcaggcttttcactgctaagaaacttcaacagtgaagaacttaagaatgagtttaatgacgtcgacaatcttactgagaagaggctagaagagctcttggattcattcctagaagatttcaaggccaatttgatagaggcacatgggtggccgaccggtggctcgtcagcgtacaaggtcgccaaagctgccctcaatgcttacacaaggattctcgccaagaagtaccctaggatgcgcatcaactgtttaacgcctggttatgtgaagagcgacatgtcgatgcacatgggagtgttgacgcccgaggagggcgctagcaatccggtgaaagtcgctctcttgcccgacgatggcccgacgggtgcttattttgatagggatggcgtggcgtcgtttgtgtga

SEQ ID NO: 379 - DNA, 1122 bp, Secale cereale
tgcaaggctgccgactccagagctcacacagccctcgacacgccgcgacgagtcggagcggaaagatcaagatggaggcggccacctcgaatccgtcgagcaagaggatcgccctggtcaccggagggaacaaaggggtcgggctggagacgtgcaggcagctcgcgtccaaggggctcaaggtcgtgctgacggcgaggaacgaggccaggggactagaggcggtcgagggcgtcaggcgctccggtggtggcggccaatccgacgtcgtcttccatcagctggatgtcaccgaccccgacagcgtcgcccggctggcggatttcgtcagggatcagttcgggaagctcgatatcctgataaacaatgcaggcatttcaggcgttgatcgagatccagttctggttgcgaaagttaaagaacaggttgaaagcatggatgtagatcagagagttcaatggatgaaagaaaattccaaggagacatatgaggaagcgaaagaatgcatgagaacaaactactatggggcaaagcttgtcacggaggcactacttcctcttcttcagttgtcctcctctgggagaattgtcaatgtctcatcaggcttttcgctgctaagaaacttcaacagtgaagaactgaagaatgagtttaacgacgtcgacaaccttactgaaaagaaactagaggagctgttggattcgttcctagaagatttcaaggccaatttgatagaggcacatgggtggccgaccggtggatcgtcagcttacaaggtcgccaaagctgccctgaatgcatacacgaggatcctcgccaagaggttccctgcgatgcgcatcaactgtttgacacctggttatgtcaagagcgacatgtcgatgcacatgggagttttgacgcccgaggagggcgctagcaaccctgtgaaggtcgctctcttgcccgacgacggcccgacgggtgcttattttgatagggacggggtggcgtcgtttgtgtgactgtgtcgtatgtttaatggtttcgtcaggtcttcctatcggaatatgagacacctctaattgttttacctgagacacctgtaattgttgccaataaaagatgtacagtttaccctgt

SEQ ID NO: 380 - DNA, 1047 bp, Secale cereale
gagctcacacagccctcgacacgccgcgacgagtcggagcggaaagatcaagatggaggcggccacctcgaatccgtcgagcaagaggatcgccctggtcaccggagggaacaaaggggtcgggctggagacgtgcaggcagctcgcgtccaaggggctcaaggtcgtgctgacggcgaggaacgaggccagggggctagaggcggtcgagggcgtcaggcgcgccggtgctggcggccaatccgacgtcgtcttccatcagctggatgtcaccgaccccgacagcgtcgcccggctggcggatttcgtcagggatcagttcgggaagctcgatatcctgataaacaatgcaggcatttcaggcgttgatcgagatccagttctggttgcgaaagttaaagaacaggttgaaagcatggatgtagatcagagagttcaatggatgaaagaaaattccaaggagacatatgaggaagcgaaagaatgcatgagaacaaactactatggggcaaagcttgtcacggaggcactacttcctcttcttcagttgtcctcctctgggagaattgtcaatgtctcatcgggcttttcgcttctaagaaacttcaacagtgaagaactgaagaatgagtttaacgacgtcgacaaccttactgaaaagagactagaggaactgttggattcgtttctagaagatttcaaggccaatttgatagaggcacatgggtggccgaccggtggctcgtcggcctacaaagtcgccaaagccgccctgaatgcatacacgaggatccttgccaagaggttccccgcgatgcgcatcaattgtttgacgcctggttatgtgaagagcgacatgtcgatgcacatgggagtgttgacgcccgaggagggcgctagcaaccctgtgaaggtcgctctcttgcccgacgatggcccgacgggtgcttattttgatagggacggcgaggcgtcgtttgtgtgactgtcgtaacggtttcgtccggtttactttcagaatatgagacacctgtaacagtagttgtc

SEQ ID NO: 381 - DNA, 2448 bp, Aegilops tauschii
atgtatcatcatcttgtgcaaggctgccgactccagagctcacacagtgctggacacgccgcgacgagtcggaggggaaagatcaagatggaggcggccgcctccaatccgtcgagcaagaggatcgccctggtcaccggagggaacaaaggggtcgggctggagacgtgcaggcagctcgcgtccaaggggctcaaggtcgtgctgacggcgaggaacgagggcaggggactagaggcggtcgaaggcgtcaggcgctccggtgctgacgtcgtcttccatcagctggatgtcaccgaccctgacagcgtcgcccggctggcggatttcgtcagggatcagttcgggaagctcgatatcctgataaacaatgcaggcatttcaggcgttgatcgagatccaattctggttgcggaagttaaagaacaggttgaaagcatggatgtagatcaaagagttcagtggatgaaagaaaattccaaggagacatatgaggaagcaaaagaatgcatgagaacaaactactatggggcaaagcttgtcacggaggcactacttcctcttcttcagttgtcctcctctgggagaattgtcaatgtctcatcaggcttttcactgctaagaaacttcaacagtgaagaactgaagaatgagtttaacgacgtcgacaaccttactgaaaagaaactagaggaactgttggattcgttcctagaagatttcaaggccaatttgatagaggcacatgggtggccgaccggtggctcgtcagcctacaaagtcgccaaagctgccctcaatgcttacacaaggattctcgccaagaagtaccctaggatgcgcatcaactgtttgacgcctggttatgtcaagagcgacatgtcgatgcacatgggagttttgacgcccgaggagggcgctagcaaccctgtgaaggtcgctctcttgcccgacgatggcccgacggaaatctcatcgactgcggttgctagggtcgccgtcgtcaccggagggaacaaggggatcggcttcgaggtgtgccggcagcttgccagcggcggaattgccgtcgtcctgacggcccgggatgagatgaggggcggggaggccgtcgagaggctcaatgcgctggggctctctcatgtcgtcttccatcagctggagatcacggacgcttcgagcgccgctgcgctagctggttttctcaaggcccgcttcggcaagcttgatattctggcaatagtagagctgcagctgctagttgcatccaaggtgaataatgccgcagttggtggggttgagtacggccaagagttcgataccaacgaggaaaagttcggtggcatggatttccaccagagagttgagtggatgctgaagaatgcccgggagcccatcgacagcgcgaagaacagcgtgaagacgaactactacggcacgaagcatgtaatcgaagccctgctgcctctgcttcaagcttcgtccgagggaagaatagtgaacgtctcctccaattatggactcctaagacatatcggcaacgaggaggtgaggcaggagctcaacgacgtcgacaacctgacagaggagaggttggccgagctgctggacaaattcatgaaagacttcgaggccggcgcgctggagccgcacgggtggcccacgaagttctccgcgtacaaggtggccaagaccgccatgaacgcctactcgaggatcctggcgaggaggcaccctgagctgcgcgtcaactgcgcgcacccaggcttcgtcaagaccgacatgagcatggggtccggggtcctgacgccggaggagggcgcacgcaacttggtgaaggtggcgctgctgcctgacggcgggccgaccggcgcgtatttcgccatgggcgaggaggcgctgttcgtaggatccggttccgagatactggcgcttaaacctacgatccctaccctagctcccccgagctgccgccactgcgccgctaaacctcctcacgagctgcctcgcccactcgctgcgcccgacccgcccgccaaccgcgatcgccacgctgcccgcgccagctccattcgctcggatgcctcgttgttcgtctacacccagagcattgctacagcctatctgcttctatacgttgacgacgtcatccaaatggcatgcatcatcaacctctttcgatggctcactgagcgccttcgctccaagttctccatcaaggacttggggcctctccactacttcctcggcatcgaggtgatatggcgtgcggatggcttcttccttcatcagcagaagtatgctcatgagctacttgaccgcgccgacatgcttgattgcaagcccgtggctatgcctgttgatacgaaggtcaagctctccgctactgatggtgctcgcgcaccgcatgcctccttgtaccggtccattgtcggtaccttgcagtaa

SEQ ID NO: 382 - DNA, 1150 bp, Avena sativa
cctccaacaactccaaggctccggcgtccagagctcacacactcatccccgacctcgacccgccgcgacgactcggcgcagcggaaacatggagccggcggccacctcgaaggacccgtcgagcaagaggatcgctctggtcacgggagggaacaaaggggtcgggctggagacgtgcaggcagctcgcctccgcgggggctccgggtcgtgctcacggccaggaacgagacgagggggatggaggcggtcgagggcgtcaggcgctcgggcggtgccggccaagccgacgtcgtattccatcagctggatgtcacagaccctgacagcgtcggccggctggcggatttcgtcagggatcagttcgggaagctcgatatcctgataaacaatgcaggcatttcaggtgttgatcgagatccagttctggttgccaaagttaaggaacaggtcgaaagcatggatgtggatcaaagagttcaatggatgaaagaaaattcaaaggagacatatgaggaagcaaaagaatgtatgagaacaaactactatggggcaaagcttgtcacagaggcactacttccgcttcttcagctgtcctcctctgggagaattgtcaacgtctcatcaggctttgcgctgctaagaaacttcaacagcgaagaactaaagaaggaatttgatgacattgacaaccttactgagaagagactagacgagctgttggatttgttcctagaagatttcaaggccaacttaatagaggcacatgggtggccaacggatggctcatcggcctacaaagttgccaaagctgccctcaatgcatatacaaggattcttgccaggaagcaccctacgatgcgcatcaactgtctgacacctggttatgtcaagactgacatttcaatgcacatgggagtattgacaccggaggagggcgctagcaaccctgtgaaggttgctctcttgcctgatgatggcccgactggcgcttattttgataggaatggtgaggcgtcttttgtgtgactgcgccatacggttagcgttttcttctggagttactttcagaatatgagacgggcgaaactacgccgtaaaaatagttgtcaataaaacgatgtagtttgacctgtgcactcaaacctaca

SEQ ID NO: 383 - DNA, 1389 bp, Lolium multiflorum
tccaactccaagcctgcagagtccagagctcacacacccatcctcgaccagccgcggcgagccggacgggaaatatggagccggcggccgcctcaaatccgtcgagcaagaggatcgctgtggttaccggagggaacaaaggggtcgggctggagacgtgcaggcagctcgcgtccagggggctcagggtcgtgctgacggcgaggaacgaggcgagggggctggaggcggtcgagggcgtcaggcgccccggcggtggcggccaatccgatgttgtcttccatcagttggatgtcacagaccctgccagcgtcggccggctggcggatttcgtcaagaatcaattcgggaagctcgatatcctgataaacaatgcaggcatttcaggcgttgatcgagatccagctttggttgccaaagttaaagaacaggttgaaagcatggatgttgatcagagagttcaatggatgaaagaaaattcaaaagagacatacgaggaagcaaaggaatgtatgcgaacaaactactatggggcaaagcttgtcacagaggcactacttcctcttcttcagttatcctcctgtggaagaattgtcaatgtctcatcaggctttgcactgctaagaaacttcaacagcgaagaactgaagaaggaatttgatgacattgacaaccttactgaaaagagactggatgagctgttggatttgttcctagaagatttcaaggccaacttaatagaggcacatgggtggccaacgggtggttcatcggcctacaaagttgccaaagctgccctcaatgcgtacacaaggattcttgccaagaagtaccctacgatgcgcatcaactgcctgacacccggttatgtcaagactgacatgtcaatgcacatgggaatattgacacctgaggagggtgctagcaaccctgtgaaggttgctctcttgcctgacgatggtcctactggtgcttattttgacaggaacggcgaggcgtcttatgtgtgatcttgccatacaaataaagtttctgccggtcttactttcagaatatgagacaaaatgagttacgctgtaatagttgtcaataaaatgatgcagtttgacgtgtgccctcaattaatcgtcatgctgatgctgaagatgaactggtagaacttctgagctcctctgctttctgcatggaatcttttgaaattattgcaatggagtaggatatgctccggcatggtgtcactggttatattgagatgatatttataccatgttcgcaggaccgagcacccacgctctgctgtgtaccgctgacatttcgacctgcaacgccttcatcaaattggcatttgaattgttcgatcccttcgtcaaattggcatttgaattgttc

SEQ ID NO: 384 - DNA, 1088 bp, Avena sativa
cctccaacaactccaaggctccggcgtccagagctcacacactcatccccgacctcgacccgccgcgacgactcggagcagcggaaacatggagccggcggccaactcgaaggacccgtcgagcaagaggatcgctctggtcacgggagggaacaaaggggtcgggctggagacgtgcaggcagctcgcctccagggggctcagggtcgtgctcacggccaggagcgaggcgagggggctggaggcggtcgagggcgtcaggcgctcgggcggtgacggccaagccgatgttgtattccatcagctggatgtcactgaccctgacagcgtcggccggctggcggatttcgtcagggatcagttcgggaagctcgatatcctgataaacaatgcagggatttcaggtgttgatcgagatccagctctggttgccaaagttaaagaacaggtcgaaagcatggatgtggatcaaagagttcaatggatgaaagaaaattcaaaggagacatacgaggaagcaaaagaatgtatgagaacgaactactatggggcaaagcttgtcacagaggcactacttcctcttctacagttatcctcctctggaagaattgtcaatgtctcgtcaggcttcgcgctgctaagaaacttcaacagcgaagaactaaagaaggaatttgatgacattgataaccttactgagaagagactagatgagctattggatttgttcctagaagatttcaaggccaacttaatagaggcacatgggtggccaacggatggctcatcggcctacaaagttgccaaagctgccctcaatgcatatacaaggattcttgccaggaagcaccctacgatgcgcatcaactgtctgacacccggttatgtgaagactgacatttcaatgcacatgggagtattgacaccggaggagggcgctagcaaccctgtgaaggttgctctcttgcctgatgatggcccgactggcgcttattttgataggaatggtgaggcgtcttttgtgtgactgcgccatacggttagcgttttcttctggagttactttcagaatatgagacgggcgaaac

SEQ ID NO: 385 - DNA, 1311 bp, Brachypodium distachyon
gtacccgaatgggccaaatatcccgagaaaaaagagcattcatacgattttggcccgaactcaactccccagttaaaaccttagctcaacccaacacaactactctagtctcccttgactccaccagtgcagtccccaagaccccaactgccgcgagaagaaagatggcggccatctcgaacccgtcgagcaagaggatcgctctggttactggagggaacaaagggatcgggctggagacgtgccggcagctcgcgtctagagggctcaaggtcgtgctgacggcgaggaacgaggcgaggggcctggaggcggtcgacggcatcaggcgctccggtggcgccggtcaacccgatgttgtcttccatcagttggatgtcaccgacccttccagcatcgaccggctggcggatttcgtcagggatcaattcggaaggctcgatatcctgataaacaacgcaggcatttcaggtgttgaccgagatccagttctgtttgccaaatttaaggaacaggtcgaaagcatggatgtagatcagagagttcaatgtatgaaagaaaattcgaaggagacatatgaagaagcaaaagagtgtatgagaacgaactactatggggcaaagcttgtcaccgaggcactacttcctcttcttcagttgtcctcctctggaagaattgtcaatgtctcatctggctttggactgctaagaaacttcaacagtgaagaacttaagaaggaattcaatgacattgacaaccttgctgaaaaaagactggatgagcagttggatttgtttctggaagatttcaaggccaaattaatagaggcacatggatggccaacgggtggctcttcagcctacaaagtggtcaaagctggcctcaacgcatacactaggattctagccaagaagttccctacaatgcgcatcaacagtttgactcctggttatgtcaagactgacatgtcaatgcacatgggagtattgacacctgaggagggtgctagcaacgttgtaatggtttctctcttgcctgacgatggcccaactggtgcttattttgatagggatggtgaggcgtcttttgtgtgaccgcgccgtaccttttacgcggtcttccgctcttactttcagaacgggactgacagatttatactgtaatatttgtcaaacaattgacgttaaatgtgctctgaagaatgcttcacatgtttcttgctttcgtggccacgggcgtggcgtcactggttatgtcagcgcgtgatgacctgtgccgggcgacggtcgaccagcaacacaagggggaccg

SEQ ID NO: 386 - DNA, 1249 bp, Setaria italica
ctcgaatcccaaaggctttaggtgctagcagttcctcccctcacgcccgcgccgccccgatcggagaggaggaaacatggacgcgaccatctcgaatccgtcgatcaagagaatcgcgctggtcaccgggggaaacaagggggtcggtctcgagacgtgccggcagctggcgaccaaggggctcaaggtcgtcctgacggcgaggaacgaggcgagggggttggaagcgctcgaggccatccggcgctccggcggcgtcgccgaggttttcttccaccagctcgacgtcaccgacccctccagcgccgcccggctggcggatttcgtcaggggccagttcgggaggcttgacatcctgatcaataatgctgggatttcaggtgttgacagagatccagttttggttgccaaagtcaaggatcaggttgaaagcatggatgtgaaccagagagttgaatggatgagagaaaattcaaaagagacatatgaggaagctaaacagtgtatgaggacgaactactatggtgccaagattgtcacagaggcactgcttccccttcttcagttatcctcctctggaagaattgtcaatgtttcgtcaggctttggactgctgagaaacttcaacagtgaagaacttaggaaggagttcgatgacatagacaatcttactgaaaagagactggaggaactgttggatttgttcctagaagatttcaaggccaacttactagaggcacatgggtggccaacaggtggatcttcagcctacaaagttgccaaagcggcccttaatgcatacacaaggattcttgctaagtatcctacactgcgtatcaactgtctgacacctggttatgtcaagaccgatatgtctatgcacatgggagtattgacacttgaagagggtgctcgcaaccctgtgaaggttgctctcttgcctgacgatgggccaactggtgcttattttgatctgaatggggaggcgtcctttgtgtgatcatattatatatgatcatatctctcttagtttcagaataaaagaaagggttatagagtagttggtgcccataagtattgtagtttgacttgtgtactcaaactagcacgctgagtacatcgtagagctccacaccatgattcctcatcttctgtatgatctctctttagacgtttcacatttgcaatggatcactgatctctctggagaactttgcatattttcaatggaccacgcttttcaatggac

SEQ ID NO: 387 - DNA, 1939 bp, Aegilops tauschii
atgacgcacatgcagtatgacatttgttataacctgaaacgtgaaattgacctttacaaagagtactatttaattagggacttcggaaaatgcacaacgtatcatcatcttctccaaggctgtcgactccagagctcacacagtgctggacacgccgcgacgagtcggaggggaaagatcaagatggaggcggtcacctcgaatccgtcgagcaagaggatcgccctggtcaccggagggaacaaagggatcgggctggagacctgcaggcagctggcgtccgaggggctcaaggtcgtgctgacggcgaggaacgaggcgagggggctggagacggtcgaaggcgtcaggcgctccggtgctgacgtcgtcttccatcagctggatgtcaccgaccctgacagcgtcgcccgtctggcggatttcgtcagggatcagttcgggaagctcgatatcctgattaacaatgcaggcatttcaggtgttgatcgagatccagttctgtttgcacaagttcaagaacaggttgaaagcatggatgtagatcaaagagttcaatggatgaaagaaaattctaaggagacatatgaggaagcaaaagaatgcatgagaacaaactactatggggcaaagcttgtcacggaagcactactgcctcttcttcagtggtcctcctctgggagaattgtcaatgtctcatcaggcttttcactgctaaggaaagcacaggttcagaaactagttccttctaataagtatcgttttcttgagcagaacttcaccagcgaagaactgaagaaggaattcgacgacattgacaaccttactgaaaagagactagaggagcttctggatctattcctagaagatttcaaggccaacttgatagaggcacatgggtggccgaccggtggctcgtcggcctacaaagtcgccaaagctgccctgaatgcatacacgaggatccttgccaagaggttccccgcgatgcgcatcaactgtttgacgcctggttttgtcaagagcgacatgacgatgcacatgggagtgttgacgcttgaggagggcgctagcaacctggtgaaggtcgctctcttgcccgacgatggcccgatgggtgcttattttgatagggatggcgtgtttattactagtataccacggctgctagcagcatccaaggtgaataatgccgcggtttgtggggttgagtacggccaagagttcgatatcaacgaggaaaagttcgctggccttgatttccaccagagagttgagtggatgttgaagaatgcccgggagcccatcgacagcgcaaagaacaccgtgcagaccaactactacggtactaagcatgtaatcgaagccctgctgcctctgcttcaagcttcctccgaaggaagaatagtgaacgtctcctccaattatggactgctaaggcatattggcaacgaggaggtgaggcaggagctcaacgacgtcgacaacctgacacaggggaggcttgacgagctgctcgagaagttcatcaaggacttcgaggccggctcgttggagatgcatgggtggcccacgaagttctcggcgtacaaggtgtccaaggccgccatgaacgcctactcgaggatcctggcgaggaggcaccctgagttgcgcgtcaattgcgcgcacccaggcttcgtgaagaccgacatgagcatggggttcggggtcctgacgccggaggagggcgcatgcaacttggccaaggtggcgctgctgcctggcggcgggccaaccggcgcctacttcgcccagggcgaggaggcaccattcgtgtgagataccggcggtacgtgcgtgcgtgttgcgcggctcgtgtgccgtacactgggttactggctggatgtgttaccttacgtgctagattgagattgcgaataagatgtgtcttttcttt

SEQ ID NO: 388 - DNA, 1000 bp, Cenchrus ciliaris
attcctcggttcctccctcacggctcacgctcgcaccgccccccgatcggaggaggaaacatggacgcggccgtctcgaatctgtcgatcaagaggatcgcgctggtcaccgggggaaacaagggggtcggtctcgagacgtgccggcagctggcggccaaggggctcaaggtcgtcctgacggcgaggaacgaggcgagggggttggaagccgtcgaggccatccggcgctccagcgccgccgccgaggttttcttccaccagctcgacgtcaccgacccctccagcgccgctcggctcgcggatttcgtcaggggccagttcgggaggcttgacatcctgatcaataatgctgggatttcaggtgtttaccgcgatccagttttggttgccaaagtcaaggatcaggttgaaagcatggatgttaaccagagagttgaatggatgagagaaaattcaaaagagacatatgaggaagctaaacaatgtatggagacaaactactatggtgccaagattgtcacagaggcactacttccccttcttcagctatccccctctggaagaattgtcaatgtttcgtcaggctttggattgctgagaaacttcaacagtgaagaacttaggaaggagtttgatgatatagacaatcttactgaaaagagactggaggagttgttggatttgttcctagaagatttcaaggccaacttggtagaggcacatgggtggccaacaggtggatcttcagcctacaaagttgccaaagcggcccttaatgcatacacaaggattcttgctaagaagtatcctacattgcgtatcaactgtctgacacctggttatgtcaagaccgatatttctatgcacatgggagtattgacacttgaagagggtgctcgcaaccctgtgaaggttgctctcttgcctgacgatggcccaactggtgcttattttgatctgaatggggaggcaccctttgtgtgaccatattatatga

SEQ ID NO: 389 - DNA, 3857 bp, Setaria italica
cttgtcgccctaccctacccgtccggtccggcggccgtgttggacaactagtccccgtcggccgccggggtcaaagcatcgccgtcgttcacacccagacattacgagacacagagggccaaggcggaagctcagtcgtgaactactctgctacttcttcaatccagaatcgcttccgtggagagacagcccgtcttgcagctgccgtgacgagccggtacgcgatggggcgtctccgcttgctcgtcctcccactctccctcctcctcctcctcgccgcggcctgctccgaccatgcgaccgtgctggccgccgaggagttcacctacaacggcttcggcggcgcgaacctcgcgctcgacggcatgtccgtggtggcgccgaacgggctcctggtgctcagcaacggcaccagccagatggccggccacgcgttccacccggcgccggtccgcctgcgcgacggccccggcggagccgtccggtccttctcggcggcgttcgtcttcgccatcgtgtccaacttcaccgtgctgagcgacaacggcatggcgttcgtggtggcgcccagcaccaggctctccaccttcaacgccggccagtacctcggcgtcctcaacgtcaccgacaacggcaaggacgacaaccgcgtgctcttcgtcgagctcgacaccatgctcaacccggagttccaggacatgaacagcaaccacgtcggcgtcaacgtcaacagcatgaggtcgctgcagaacaacagcgccggctactacgacgacgccacgggggtgttcaacaacctcagcctcatcagccgccagcccatgcagttctgggtcgactacgacggcgccaccacaaggctcgacgtgaccatggcgcccatgggcgtgcccaggccgaggaagccactcatctccgcgccggtcaacctctcggcggtcggaacggacaccgcctatgtcggcttctcggcggccacgggcgtcatcttcacgcgccactacgtcctgggctggagcttcgccatgggcggcgcggccccgccgctggacacctcgaagctgccgtcgctgccgcggttcgggcccaagcccaggtcgaaggtgctggagatcgtgcttccgatcgccaccgcggcgttcgtcctcgcgctgctcgtcggcgtcttcctgttcgtgcggcggcgggtgaggtacgccgaggtgcgcgaggactgggaggtggagttcggcccgcaccgtttctcgtacaaggagctctaccacgccaccaagggcttcaagaacaagcagctgctcggcaccggcgggttcgggcgggtgtacaagggcgtgctccccaagtccaacctcgagatcgccgtgaagagggtgtcgcacgactccaagcaggggatgaaggagttcatcgcggaggtcgtcagcatcggccacctccggcaccggaacctcgtgcagctcctgggctactgccggcgcaagggcgagctcctcctcgtgtacgactacatgtccaacggcagcctcgacaagtacctctacgacaagacgaagcccgtcctggactgggagcagaggttccacatcatcaagggcgtcgcctccggcctgctgtacctccacgaggactgggagcagatcgtcatccaccgcgacatcaaggcgagcaacgtgctcctcgacggcgacatgaatggccggctcggcgacttcggcctcgcgaggctgtacgaccacggcgtcgacccccagaccacgcacgtcgtcggcaccatgggctacctcgccccggagctcgtgcgcacggggaaggccaccccggtcaccgacgtgttcgccttcggcgtgttcgtgctggaggtgacctgcgggcgccgcccgctcgggtgcatcgcgcccgacgagcagaacgtgctgctggactgggtgcaggagcacgagcgcaagggcgcgggtctcgacacggtggacccgcggctctgcggcaagtacgacgccgacgaggcccggctggcgatcaggctggggctcatgtgcgcgcacccgctgcccgacgcgcgccccgggatgcggcaggtggtgcagtacctggagggcgacgccccgatgccggaggtggcgccgacgtacgtgagctacacgatgctggcgctgatgcagaacgaggggttcgactcgttcgccatgtcgttcccgtccacggtcacgtccggcgtcagccccgtctccggcgcgttctcggacgtgtccggcctctccggcgggagaatcgcgctggtcaccgggggaaacaagggggtcggtctcgagacgtgccggcagctggcgaccaaggggctcaaggtcgtcctgacggcgaggaacgaggcgagggggttggaagcggtcgaggccatccggcgctccagcggcgccgccgaggttttcttccaccagctcgacgtcaccgacccctccagcgccgcccggctggcggatttcgtcaggggccagttcgggaggcttgacatcctgatcaataatgctgggatttcaggtgttgacagagatccagttttggttgccaaagtcaaggatcaggttgaaagcatggatgtgaaccagagagttgaatggatgagagaaaattcaaaagagacatacgaggaagctaaacaatgtatgaggacgaactactatggtgctaagattgtcacagaggcactacttccccttcttcagttatcctcctctggaagaattgtcaatgtttcgtcaggctttggactgctgagaaacttcaacagtgaagaacttaggaaggagttcgatgacatagacaatcttactgaaaagagactggaggaactgttggatttgttcctagaagatttcaaggccaacttactagaggcacatgggtggccaacaggtggatcttcagcctacaaagttgccaaagcggcccttaatgcatacacaaggattcttgctaagaagtatcctacactgcgtatcaactgtctgacacctggttatgtcaagaccgatatgtctatgcacatgggagtattgacacttgaagagggtgctcgcaaccctgtgaaggttgctctcttgcctgatgatgggccaactggtgcttattttgatctgaatggggaggcatcctttgtgatcgctgtggtcaccggcgggaacaaagggatcgggctagaggtgtgccggcagctagctgtgaatggtgtcaccgtcgtcttaacggctagggacgagacgaggggcggagcggccgttgagaagctcggggagctggggctttccagtgtcattttccaccagttggacatcacggatgcgtcaagcattgctaggttagccgatttcttgaagatccgttttgggaggctagacattctggtaagtcttcttccgaagagtattcagtcttcacaaaagttcttccccatgcagcatttcagaaacgaggagctgaaacaagagatgaacgacatcgacaaccttaccgaggagaggcttgacgagctgctggacatgttcctgaaagacttcgaggccggcgtggcagaagcgcgtgggtggccggcagagttcgcggcatacaaggtggccaaggcggctgtgaacgcgtactcgaggatcctggcgaggaggcatcccgagctacgcgtcaactgtgcgcatcctggctacgtcaagacggatattaccttgcactccgggctcctgacgcccgaggagggtgcaagcaatgtgttgaaggtggctatgctgccagaaggccgggtgaccggtgctttctttgaggagggcaaggagttgctgtccttcatgtgatgtttgatcagcacggcatac

SEQ ID NO: 390 - DNA, 2654 bp, Aegilops tauschii
ctgcgcgcacaaacgtcaaggctgttgccttactaagcaggccaagctttctcaaaaaaataaaaaatactaactaggcccagcagaggcgccgtttgagaagaaagggaaagtgcacgatgtatcatcatcttgtgcaaggctgccgactccagagctcacacagtgctggacacgccgcgacgagtcggaggggaaagatcaagatggaggcggccgcctccaatccgtcgagcaagaggttcgatcgctccgcccccctcccctttcccgtacgccgctcgcagcaaatttacttactggaatttctgcgcggcgccgctgctatgtgcgtgatttaggatcgccctggtcaccggagggaacaaaggggtcgggctggagacgtgcaggcagctcgcgtccaaggggctcaaggtcgtgctgacggcgaggaacgagggcaggggactagaggcggtcgaaggcgtcaggcgctccggtgctgacgtcgtcttccatcagctggatgtcaccgaccctgacagcgtcgcccggctggcggatttcgtcagggatcagttcgggaagctcgatatcctgataaacaatgcaggcatttcaggcgtcgatcgagatccagttctggttgcgaaagttaaagaacaggttgaaagcatggatgtagatcagagagttcaatggatgaaagaaaattccaaggagacatatgaggaagcaaaagaatgcatgagaacaaactactatggggcaaagcttgtcacggaggcactacttcctcttcttcagttgtcctcctctgggagaattgtcaatgtctcatcaggcttttcactgctaagaaacttcaacagtgaaaaactgaagaatgagtttaacaacgctgacaatcttactgaaaagagactagaggagctgttggattcgttcctagaagatttcaaggccaatttgatagaggcacatgggtggccgaccggtggctcgtcagcctacaaagtcgccaaagctgccctcaatgcttacacaaggattctcgccaagaagtaccctaggatgcgcatcaactgtttgacgcctggttatgtcaagagcgacatgtcgatgcacatgggagttttgacgcccgaggagggcgctagcaaccctgtgaaggtcgctctcttgcccgacgatggcccgacggaaatctcatcgactgcggttgctagggtcgccgtcgtcaccggagggaacaaggggatcggcttcgaggtgtgccggcagcttgccagcggcggaattgccgtcgtcctgacggcccgggatgagatgaggggcggggaggccgtcgagaggctcaatgcgctggggctctctcatgtcgtcttccatcagctggagatcacggacgcttcgagcgccgctgcgctagctggttttctcaaggcccgcttcggcaagcttgatattctggcaagtttttttcctttcgttttagtgaataatgccgcagttggtggggttgagtacggccaagagttcgataccaacgaggaaaagttcggtggcatggatttccaccagagagttgagtggatgctgaagaatgcccgggagcccatcgacagcgcgaagaacagcgtgaagacgaactactacggcacgaagcatgtaatcgaagccctgctgcctctgcttcaagcttcgtccgagggaagaatagtgaacgtctcctccaattatggactcctaagacatatcggcaacgaggaggtgaggcaggagctcaacgacgtcgacaacctgacagaggagaggttggacgagctgctggacaaattcatgaaagacttcgaggccggcgcgctggagccgcacgggtggcccacgaagttctccgcgtacaaggtggccaagaccgccatgaacgcctactcgaggatcctggcgaggaggcaccctgagctgcgcgtcaactgcgcgcacccaggcttcgtcaagaccgacatgagcatggggtccggggtcctgacgccggaggagggcgcacgcaacttggtgaaggtggcgctgctgcctgacggcgggccgaccggcgcgtatttcgccatgggcgaggaggcgctgttcgtgtgagatactgggaaccggatcctctaacattgtgaaggaaagtcagtgtgctacagtgtttgcctagtgtaaaatgaagaaggaaagttaaggactgtaagtagataattaataggttgtttactgtttactgtaagtataaataatttaaaattaattttatttcaccatcaatttgtttgtacgtaattactataaatgtacatagtagatcatcaatttgcaaattaacttaagtcattttagccataatcatatgtatagaaagaaggaaagttagggtattgtagcttctctaactttccttcttaatgttagaggatccggttccgagataccggcggtacgtgtgtgtgcgtgccgtacacttaatgcccggatgtgttacgtgttgatttgagattgcgaataagatgtgtcatctgtcttttttcaacaaaggtttagttttattgactcaatattgttgacggatgattgtgtttgttccatatgtatacatacatgtattaagtggagttgttctgcttgtcttccaa

SEQ ID NO: 391 - DNA, 1227 bp, Pennisetum glaucum
ctccagccctccccgtaggcgtgtgtgtgtccggctggccggtgctagcattcctccctcacgggctcgcgctgccccgatcgaagaggaggaaacatggacgctgccgtctcgaatcagtcgatcacgaggatcgcgctggtcaccgggggaaacaagggtgtgggtctcgagacgtgccggcagctggcgaccaaggggctcaaggtcgtcctgacggcgaggaacgaggcgagggggttggaagcggtcgaggccatccggcgctccagcgccgccgccgaggttttcttccaccagctcgacgtcaccgacccctccagcgccgctcggctagcggatttcgtcagggaccagtacgggaggcttgacatcctgatcaataatgctgggatttcaggtgttcatcgtgatccagttttggttgccaaagtcaaggatcaggttgaaagcatggatgttaaccagagagttgaatggatgagagaaaattcaatagagacatatgaggaagctaaacaatgtatgaagacaaactactacggtgccaagattgtcacagaggcactacttccccttcttcagctatcctcctgtggaagaattgtcaatgtttcgtcaggctttggactgctgagaaatttcaacagtgaagaacttaggaaggagtttgatgacatagacaatcttactgaaaagagactagaggagctgttggatttgttcttagaagatttcaaggccaacttagtagaggcacatgggtggccaacaggtggatcttcagcctacaaagttgctaaagcagcccttaatgcatacacaaggattcttgctaagaagtatcctacattgcgtatcaactgtctgacacctggttatgtcaagaccgatatttctatgcacatgggagtattgacagttgaggagggtgctcgcaaccctgtgaaggttgctctcttgcctgacgatggccccactggtgcttattttgatctgaatggggaagcaccctttgtgtgatcatattatatgaccacaccccctgtagtttcagaataaaagaaaatgttatagagtagttggtgccaataagtaatgtagtttgacttgcactcaaactagcatgttgagccagttcgcaaaaaaaaaacctagcatgtcgagtacactgtagagtaatagagattcacaccatgattcttcatcttctgtatgatgtttgat

SEQ ID NO: 392 - DNA, 3525 bp, Sorghum bicolor
gatcggtcaatttatttattatttgtagattagacacgtcactcctctatggattaattaactggagagcatatgccttgtgacgggttaagaaaccaaaggccgataatctgctgcgctgttgccgcaaagcagccagcccaaggtgaagcattgggccttcgtgcgcacccaaagcccacccaaagctctcgtgagaaccgacggcggctgcgagcctgcgagcagtctgcgacgacgggcttgccattggcgggctgcgagcagtctggcagcaacacaggaagacgccgttctcggggaaaggtgcgggcgcctgaatcctctccaactccgtattccgcaccccgaaccggagagcagccatggacgcggcggtttcgagcccctcgagcaagaggatcgcgctggtgaccggagggaacaaggggatcgggctggagacgtgccggcagctggcgtccaaggggctcagggtcgtcctgacggcgaggaatgaggcgaggggtttggaagcggtcgagcgcatccggtgggccagcggcgacgccgaggttttcttccaccagctcgatgtcaccgacccctccagcgccgcccggctcgcggagttcgttagggatcaattcggcaggcttgacatcctgatcaacaatgcaggaatttcaggtgttgatcgtgatccagttttgtttgctgcagtcaaggataaggttgatggcatggatgtagatcagagagtagaatggatgagagaaaattcaaaagaaacatatgacgaagctatacaatgtatgagaacaaactactatggtgccaagctggtcacagaggcactacttcctcttcttcagttatcctcctctggaagaattgttaatgtttcgtcaggctttgggttactgagaaacttcaacagtgaagaccttaagaaagagtttgatgacattgacaatcttactgaaaataaactagaggaactgttgaataagttcctagaggattttaaggccaacttagtagaggcacatgggtggccaacaggtggatcttcagcctataaagttgccaaagcggcacttaatgcatatactaggattcttgccaagaaatatcctacattgcatatcaattgtctgacacctggttatgtcaagactgatatttgtatgcacatgggagtattaacacttgaggagggtgctcgcaaccctgtgaaggttgctctcttgcctgatgatggaccaactggtgcgtattttgatctgaatggcgaggcgtcctttgtgtgatgatatttctcttttgagcttcagaataaaacgaagagctataaaatagttagtgccaattattattatagttgagacttgtgtactcaaactagcacgttgagcaaaccgtagagctcaactcctggattcctcgtcttctgtataatatccctggtgatgattatatatttgcagtgaaccatgcttcacagatttggtggcactaggtagtgtttggttggcaaacttgtaatgccctccggagtcgtcacctgcttgcacaaccaaacattaaagtgatggcactgttaattacaaggggaaaaggcgctgaaccaaacgtccttgagagggcattacttaatatgctgtcgcttctttattctgggctgttgtttcgatgaatgtgggcgtgtagcggctataagcttatgtcgttttgacttctctaggggtgatggtgaatatgttcacaagcagaacataggtgagaagttacatggccagctcttacttgttggcctccagaaattggttgaagctggattcagaatcaggacgtattgcttctgagttctgagttattgaatatagtctagcaagttgttgggtactcaccaaacttatatcatgcaaaagagcttctcctgtctggctggtctgagagatttcttggggacattgttttcattcttttcgttctgcatgcttcagtgcttacctgttattagcatgctaacttttttggtcattggttctgaatgatgacggcagctgacatctgctttctttaggctttgatcggattctttatatctttatatgagatctgatgatgccaccttgatctgttccaaacgaggacttttgtcctgtctatacatgcccaatgtgaacctgcaatctgaactcggccacttgtcattccacaatattaaagagtagtgtatatataacttattttagcttgttgataagaccaacgcatacaacaccagcccccaggttgaccagataagcagagctcgtggtgcacgctaatggagggagccatctctactttcccaagcgcaaggattgctgtggtcaccggcggaaacaaaggtattgggctagaggtgtgcaggcagctggccaggaatggcaccaccgttgtcttaacagctagggacgagacgaggggcgcggctgccgttgaggagctcagagagctgggcctctccgatgtcatgttccaccagctagacatcacagatgcatcgagcattgctaggctagccgatttcttgaagacccgttttgggaggctagacattctgataaataatgctgcatttggtggcgtcgaatacgctcgggatcctgctggtgatgggtcagtaacaagcgaagaagagttgagtggcatggatagggatcaaaggcttgaatggttgtggagaaatacccgggagacttatgacgctgcaaagaaaggcctgcagacaaactactacggcacgaagcatgtgattgaagcgttactgcctctgctccaagcctcctctgatggaaggattgttaacgtctcctccgactttgggctgcttaggtatttcagaaacgaggagctgaagcaagagctgtacaacgtcgacaagttaaccgaggagaggctggacgagctgctggacatgttcctgaaagactttgaggccggcgaggttgacgcgcgcgggtggccggcagcgttcagcgcgtacaaggtggccaaggcggccatgaacgcgtactcgaggatcctggcgacgaagcagccggcgctgcgcgtcaactgcgtgcatcctggctacatcaagactgatataaccttgcactcggggctcctgacgcccgaggaaggcgcggccaacgtggtgaaggtggcgctgctgccggaaggcggggtcaccggcgccttcttctttgaagacagcgaggaggcgtcgttcgtgtgaagttatttgtggactcgcattcagaattcaaaaaagatggaactggtgctgatgtgcattaattctaagctgcatgcttgcatacagtctgaattttaaactactacccgtctccggttaagaacaatggatgatgattgatgaatagcatactccattgtattggcatgggatcaatgacgggctcctagtctggatttttcaaaacttggcatgggaaaccacttgcttaacgttgcgtttgcttcggcatggcgtcactgctggacacagat

SEQ ID NO: 393 - DNA, 1249 bp, Brachypodium distachyon
actgtttcagaaggaaaaggaaagtgcacgatgaatcatcttccccaaagctccagagtccagtgcagtcctcaagccgccgcgacgagaaagatggcggccatctcgaacacgtcgagcaagaggatcgctctggttaccggagggaacaaaggggtcgggctggagacgtgccggcagctcgcgtctagagggctcaaggtcgtgctgacggcgaggaacgaggcgaggggtctggaggcggtcgacggcatcaggcgctccggtggtcccggccaacccgatgttgtcttccatcagttggatgtcaccgacacttccagcatcgatcggctggcggatttcgtcagggatcaattcggaaggctcgatatcctgataaacaatgccagcatttcaggtgttgaccgagatccagttctagttgccaaagttaaggaacaggttgaaagcatggatgtaaatcagagagttcaatggatgaaagaaaattcaaaggagacatatgaagaggcaaaagagtgtatgagaacgaactactatgggccaaagcttgtcaccgaggcactacttcctcttcttcagttgtcctcctctgggagaattgtcaatgtctcatcaggctttggtctgctacgaaactttaacagtgaagaacttaagaaggaactcaatgacattgacaaccttactgaaaaaagactggatgagctgttggatttgttcctagaagatttcaaggccaacttaatagaggcacatggatggccaacgggtggctcttcagcctacaaagttgccaaagctgccctcaatgcatacactaggattctagccaagaagttccctacaatgcgcatcaactgtttaacacctggttatgtgaagactgacatttcaatgcacatgggagtattgacacctgaggagggcgctagcaaccctgtgaaggtttctctcttgcctgacgatggccccactggtgcttattttgatagggatggtgaggcgtcttttgtgtgatcgcgccatgccttctacgttgtctcccattctcactttcagaatgagagccatcaagagatatatactgtaatagttgtcaataaacaatgtagtttgacctttgctcaattcgacgtgcggaagataagaacagtttgaccgtattgctgtaataatagcttctccacttttgttataaaaaaacagaaaaagtggggcaacccagttgccctgtttctgtgaa

SEQ ID NO: 394 - DNA, 3032 bp, Zea mays
cgctgtacttcagtgttcagtccagtccagttgcccctgtccggatcctgtgttgggagcgttgcggttgcggctactggacgcgaaacgcgatgggttgcccccgtccgctcctcctcctcctcctccacgcggtcgcgctcgccgccgccgacgagttcacctacaacggcttcggaggcagcgacctgttgctcgacggcatggccgcggtggcgccgaacggcctgctggcgctcagcaacggcaccagccagatggccggccacgcgttccacccggcgccgttccgcctgcgtgacggcgccgccgccgccgccaggtccttctcggcggccttcgtcttcgccatcgtgtccaactacaccgtgctcagcgacaacggcatggcgctggtggtcgcgccgagcaccaggctctccgccttcaacgcggggcagtacctgggcgtcctcaacgtcaccgacaacggcagggacggcaaccgcgtcttcttcgtcgagctggacaccatgctcaacccggagttccaggacatgaacagcaaccacgtcggcgtcaacgtcaacagcatgaggtcgctgcggaaccacagcgccggctactacgacgacgccacgggggcgttcaccaacctcagcctcatcagccgccggcccatgcaggtctgggtcgactacgacggcgccgccgcgcggctggacgtggccatggcgcccgccggcgtgcccaggccgcggaagccgctcatctccacgccgctcaacctctcggcggtcggcgcggacgacggcaccgcctacgtcggcttctcggcggccacgggcgtcatctacacgcgccactacgtcctgggctggagcttcgccacgggcgccgcggccccgccgctggacatctccaggcttcccgcgctgccgcggttcgggcccaagccccggtccaaggtgctggagaccgtgctcccggtcgccaccgcggcgctcgtcctcgcgctggtcgtgggcgccttcctgttcgtgcggcggcgggtgaggtacgccgaggtgcgcgaggactgggaggcggagttcggcccccaccgcttctcgtacaaggagctctaccaggcgaccaaggggttcaagaacaagatgctgctcggcaccggcggcttcgggagggtgtacaagggcgtgctctccgggtccaagctcgaggtcgccgtgaagagggtgtcgcacgactcgaagcaggggatgaaggagttcatcgcggaggtggtgagcatcggccacctccgccaccggaacctggtgcagctgctgggctattgccggcggaagggcgagctgctgctggtgtacgactacatgtccaacggcagcctggacaagtacctctacgacgacaggaccgccaggcccgtcctggactgggggcagaggttccagatcgtcaggggcgtcgccgccggcctgctgtacctgcacgaggactgggagaaggtggtgatccaccgggacgtcaaggccagcaatgtgctcctggacggcgacatgaacggcaggctgggcgacttcggcctggcgcggctgtacgaccacggcgtggacccgcagacgacgcacgtggtgggcaccatgggctacctcgccccggagctggtgcgcacggggagggcgaccccggccacggacgtgttcgccttcggcgtgttcgtgctggaggtggcttgcggccgccgcccgctcgggcgcgtcgcgcccggtgtcgaccagaccgtgctgctggactgggtgcaggagcaccagcgcaggggggccgccctcgacacgctggacgcgcggctgtgcggcaagtacgacgccgacgaggcccggctggccgtcaagctggggctcatgtgcgcgcacccctcgcccgaggcgcggccgggcatgcgccaggtcgtgcagtacctggagggcgacgccccgatgcccgatgtggcgccctcgtacgtcagctacagcatgctggcgctgatgcagaacgacgggttcgactccttcgccaacgtgtcgttcccgtccacggtcacgtcgagcgtcagccctgtctccggcggcttctcttcttccgtgtccggcctctccggcggaaggatcgcgctggtgacgggagggaacaagggcatcgggctcgagacgtgccggcagctggcgtccaggggcgtcagggtcgtcctgacggcgaggaacgaggcgaggggtttggaagcggtcgagcgcgtcaggtgcgcccgcggcgacgccgaggtttacttccaccagctcgacgtcaccgacccctgcagcgccgcccggctcgcggatttcgtcagggatcagttcggtaggctggacatcctgatcaacaatgcgggaatttcaggcgttcaccgtgatccagttttgtctgctgcggtcaaggataaggtcgatggcatggatgtaaatcagagagtcgaatggatgaaggaaaattcgaaagaaacatacgaggaggctgtacaatgtatgaaaacaaactattatggtgccaaacttgtcacagaggcactacttcctcttcttcagttatcctcctctggaagaattgtcaacgtatcgtcaggctttggactactgagaaatttcaacagcgaagaccttaggaaggagtttgaagacatcgacaatcttactgaaagtagactggaggaactgatggataagtttctagaggattttaaggccaacttagtagaggcgcatgggtggccgacaggtggatcttcagcctacaaagtcgtcaaagcggcgctcaatgcgtacacgaggattcttgccaagaagtatcctacgctgcgtatcaattgtttgacgcctggttatgtcaagaccgacatgtctatgcacatgggggtactgacacttgaggaaggcgctcgcaaccccgtgaaggttgctctcttgcctgacgacggaccgactggtgcttattttgatctgaatggcgaggcgtcctttgtgtgatggtatttctccctt

SEQ ID NO: 395 - DNA, 3849 bp, Sorghum bicolor
agtcgccgtcgaggtcaaaggctcacagcatcggatcgttcacaccgaaacgcccagagtgaagttcggtcgtagacgacgactactactactactcttctattacttccactccaatcgctcccgatccagaagaacgcctgcgttgcagcgtaacgcggctcgcgaacgcggacgcgatgggtcgccccagcttgcccctcctcccaatcttcctgctcctcgccgcggtctgctctgaccacgcggccatgctcgccgccgccgaggaattcacctacaacggcttcggcgacgccaacctctcgctcgacggcatgtccgtggtggcgccgaacggcctcctggtgctgagcaacgggaccagccagatggccgggcacgcgttccacccggcgcccgtccgcctgcgggacgggcccggcggtgccgtcaggtccttctcggcggcgttcgtcttcgccatcgtctccaacttcaccgtgctcagcgacaacggcatggcgttcgtggtggcgcccagcaccaggctgtccaccttcaacgccgggcagtacctgggcatcctcaacgtcaccgacaacggcaaggacggcaaccgcgtgctgttcgtcgagctcgacaccatgctcaacccggagttccaggacatgaacagcaaccacctcggcgtcaacgtcaacagcatgaggtcgctgcagaaccacagcgccggctactacgacgacgccacgggggtgttcaacaacctcagcctcatcagccgccagcccatgcaggtctgggtcgactacgacggcgccaccacgcggctcgacgtgaccatggcgcccgtcgacgtgaccatggcgcccgtcgacgtgcccaggcccaggaagccgctcatctccgcgccggtcaacctctcggcggtcggggcggacgacaccgcctacgtcggcttctcggcggccacgggcgtcatctacacgcgccactacgttctgggctggagcttcgccacggacggcgcggcggccccggcgctggacatctcgaagctcccggcgctgccgcggttcgggcccaagccccggtccaaggtgctggagatcgtgctcccgatcgccaccgcggcgttcgtcctcgcgctggtcgtcgtcgccttcctgtgggtgcggaggcgggtgaggtacgccgaggtgcgcgaggactgggaggtggagttcggtccccaccgcttctcgtacaaggagctctaccacgcgaccgaggggttcaagaacaagatgctgctgggcaccggcggcttcgggagggtgtacaagggcgtgctccccaagtccaaactcgagatcgccgtgaagagggtctcccacgactcgaagcaggggatgaaggagttcatcgcggaggtggtcagcatcggccacctccgccaccggaacctggtgcagctgctgggctactgccggcggaagggcgagctgctgctggtgtacgactacatgtccaacggcagcctggacaagtacctgcacgacaagaccaggcccgtcgtcctggactgggagcagaggttccacatcatcaagggcgtcgcctccggcctgctctacctccacgaggactgggagaagatcgtcatccaccgggacatcaaggccagcaacgtgctcctcgacggcgacatgaacggccggctgggcgacttcgggctggcgaggctgtacgaccacggcgtggacccgcagacgacgcacgtggtgggcaccatggggtacctcgccccggagctggtgcgcacggggaaggcgaccccggtgacggacgtgttcgccttcggcgtgttcgtgctggaggtggcctgcggccgccggccgctcggatgcatcgcgcccgacgagcagagcgtgctgctggactgggtgcaggagcacgaccgcaagggggccgccctcgacacggtggacgcgcggctgtgcggcaagtacgacgccgacgaggcccggctggtgatcaggctggggctgatgtgcgcgcaccctttgcccgacgcgcggcccggcatgcggcaggtcgtgcagtacctggagggcgacacggcgatgcccgaggtggcgccgacgtacgtgagctacaccatgctggcgctgatgcagaacgacgggttcgactccttcgccgccatgtcgttcccgtccacggtctcgtcgagcgtcagccctgtctccggcgggttctcttcggtgtccggactctccggcgggaggatcgcgctggtgaccggagggaacaaggggatcgggctggagacgtgccggcagctggcgtccaaggggctcagggtcgtcctgacggcgaggaatgaggcgaggggtttggaagcggtcgagcgcatccggtgggccagcggcgacgccgaggttttcttccaccagctcgatgtcaccgacccctccagcgccgcccggctcgcggagttcgttagggatcaattcggcaggcttgacatcctgatcaacaatgcaggaatttcaggtgttgatcgtgatccagttttgtttgctgcagtcaaggataaggttgatggcatggatgtagatcagagagtagaatggatgagagaaaattcaaaagaaacatatgacgaagctatacaatgtatgagaacaaactactatggtgccaagctggtcacagaggcactacttcctcttcttcagttatcctcctctggaagaattgttaatgtttcgtcaggctttgggttactgagaaacttcaacagtgaagaccttaagaaagagtttgatgacattgacaatcttactgaaaataaactagaggaactgttgaataagttcctagaggattttaaggccaacttagtagaggcacatgggtggccaacaggtggatcttcagcctataaagttgccaaagcggcacttaatgcatatactaggattcttgccaagaaatatcctacattgcatatcaattgtctgacacctggttatgtcaagactgatatttgtatgcacatgggagtattaacacttgaggagggtgctcgcaaccctgtgaaggttgctctcttgcctgatgatggaccaactggtgcgtattttgatctgaatggcgaggcgtcctttgtgattgctgtggtcaccggcggaaacaaaggtattgggctagaggtgtgcaggcagctggccaggaatggcaccaccgttgtcttaacagctagggacgagacgaggggcgcggctgccgttgaggagctcagagagctgggcctctccgatgtcatgttccaccagctagacatcacagatgcatcgagcattgctaggctagccgatttcttgaagacccgttttgggaggctagacattctgataaataatgctgcatttggtggcgtcgaatacgctcgggatcctgctggtgatgggtcagtaacaagcgaagaagagtatttcagaaacgaggagctgaagcaagagctgtacaacgtcgacaagttaaccgaggagaggctggacgagctgctggacatgttcctgaaagactttgcggccggcgaggttgacgcgcgcgggtggccggcagcgttcagcgcgtacaaggtggccaaggcggccatgaacgcgtactcgaggatcctggcgacgaagcagccggcgctgcgcgtcaactgcgtgcatcctggctacatcaagactgatataaccttgcactcggggctcctgacgcccgaggaaggcgcggccaacgtggtgaaggtggcgctgctgccggaaggcggggtcaccggcgccttcttctttgaagacagcgaggaggcgtcgttcgtgtgaagtt

SEQ ID NO: 396 - DNA, 1702 bp, Zea mays
gcttgcattgcattggcactttggcaggctgcgagcagtctgacagctacacacacaggcagacgccgttccgcgggggaaaggtgcggacgcctgaatcctctccaactccggcaccgcattcgcacgcccgcgaagccccgaatcggagaggacagaggagtcatggacgcggcggcggcggcggctgcggctgcgagccccacgagcaagaggatcgcgctggtgacgggagggaacaagggcatcgggctcgagacgtgccggcagctggcgtccaggggcgtcagggtcgtcctgacggcgaggaacgaggcgaggggtttggaagcggtcgagcgcgtcaggtgcgcccgcggcgacgccgaggtttacttccaccagctcgacgtcaccgacccctgcagcgccgcccggctcgcggatttcgtcagggatcagttcggtaggctggacatcctgatcaacaatgcaggaatttcaggcgttcaccgtgatccagttttgtctgctgcggtcaaggataaggtcgatggcatggatgtaaatcagagagtcgaatggatgaaagaaaattcgaaagaaacatacgaggaggctgtacaatgtatgaaaacaaactattatggtgccaaacttgtcacagaggcactacttcctcttcttcagttatcctcctctggaagaattgtcaacgtttcgtcaggctttggactactgagaaatttcaacagcgaagaccttaggaaggagtttgaagacatcgacaatcttactgaaagtagactggaggaactgatggataagtttctagaggattttaaggccaacttagtagaggagcatgggtggccgacaggtggatcttcagcctacaaagtcgtcaaagcggcgctcaatgcgtacacgaggattcttgccaagaagtatcctacgctgcgtatcaattgtttgacgcctggttatgtcaagaccgacatgtctatgcacatgggggtactgacacttgaggaaggcgctcgcaaccccgtgaaggttgctctcttgcctgacgacggaccgactggtgcttattttgatctgaatggcgaggcgtcctttgtgtgatggtatctctcctttttcagcttcagaataaaagaaagagctatgaagtagttagtgccaatcagtattgtagttcgacttgaatacttaaactagcacgttgagcaaaccgtagagctcaacaccagggatttcctcgtcttctgtataatatctctggtgatgattgtatatttgcaatgaaccatgcagatttggtcgcgccaaggtagtgtttggttggcacaatggtaatggcaacaggaatgaaaatggactgcgaggggaacgatggtggggttcgtttacatgattttatttggttggacaaagcaatggcgcgtaatcatttaacggccgaaggatagcggcaataaggctcgcatcgggtttggaatccgtgttaataatactacattcgctttaaaaaaatagtagtcgtttgagctcttgatttttatctttatgtctatatttaaatagatgataataaatctagatacatatcaagaattgtataaacccactaattaaaacaactaatattgtgagcatcgtagcaagctgagactttggcctgagtatctgtagatgtcgtacatggcttgtaattgag

SEQ ID NO: 397 - DNA, 1172 bp, Oryza sativa
aactcatgaaccatctgctcggtcgcggagttcacatccctcgccccgccgcggcgaatcgtggaggaacgacgacgatggaggcggcggccatctcgaatccgccgagcaagagtatcatcaggatcgcgctggttaccgggggcaacaaaggggtcgggctggagacctgcaggcagctcgcgtcccgggggctcagggtcgtcctgacggcgaggaacgaggcgagggggctggaggcggtcgacggcatcaggcgctccggcgccgccgattctgatgtcgtgttccaccagttggatgtcaccgacgctgccagcgtcgcccggctggccgatttcgtccgggatcagttcgggaggcttgatatcttgatcaataacgcaggaatttcaggtgttgatcgggatccagttttggttgccaaagttaaagatcagattgaaggcatggatgtagatcagagagttgaatggatgagagaaaattcaaaggagacctatgatgaagctaaatcatgcattacaacaaactactatggtgccaagcttgtcacagaagcactacttcctcttcttctgttatcctcctcgggaagaattgttaacgtgtcatcaggatttggactactgagaaacttcaacagtgaagatcttagaaaagaattcgatgacatcgacagtcttactgaaaagagactagaggagctgttggatttgttcctagacgatttcaaggtgaacttaatagaagcacatggttggccaaccggtggatcttccgcctacaaagttgccaaagctgcccttaatgcatacacaaggattcttgccaagaagtaccctacactacgtatcaactgtttgacacctggttatgtcaagactgacatctcaatgcacatgggagtattgacacctgaagagggtgctagtaactccgtaaaggtagctctcttgcctgatgatggtccaacaggtgcttattttgatcggaatggcgaggcatcttttgtgtgatcatagtttctgctttctttaacctatagtttcagaataagagattgtcaaagtagttgtgcccaacagacaatgtagttttgacttgtgtactcaaactgatgtattgaagttgaaatagtagagctttacatcgatatcatgattttatct

SEQ ID NO: 398 - DNA, 1693 bp, Leymus cinereus x Leymus triticoides
ccgttgctgtcgccgttgctgtcgccgttgctgtcgccgttgctgtcggctctgcaatggcggcatcctcggctcccctctcgttctccgcctccgccctgtccgcgcgcctgcgcctcgcggcgccggcgtcgtgcgcggccacgacgcggcggtgccggccggtggtggtccgcgccaagatccgggagatcttcatgccggcgctcagctccacgatgacggaggggaagatcgtgtcctggaccgccgcggagggcgaccgcgtcaccaagggcgacgccgtcgtggtcgtcgagtccgacaaggccgacatggacgtcgagacgttctacgacggcatcgtcgcggccgtcctcgtccctgcgggggagtccgcccccgtcggcgcccccatcgctctgctcgccgagtctgaagaggaggtcgcgcttgccgtcgcccaggcccaggcgctctctagcccacagccccagcaggcccctcctctttcggatgccgccgcttcaccgcccccgcctcccccaccggcggccccggtggctgctcccccgcccgtggccacggggaccacgggccttgccacgccgcaggctaagaagctcgccaagcagcacagggtggaccttgccaaggtgattggcaccgggcagttcggccgaattacgccggctgatgttgaggcatccgctggcatccagccaaaaccaaaggtgcctcctactcctgctgctgcgcctgtggctgctcagtcagtaagggccgtgcggcaggcggcggcgcttccgccggtgcctggtgccacggtggttccattcactgcaatgcaggctgcagtgagcaagaacatggtggagagcctgtcagtgccagcattccgtgttggttaccccatcttaactaataagcttgacgagctgtatgagaaggtcaagccaaagggggtgacgatgactgtgttgcttgcaaaggccgctgctatggcacttgcacagtatcctgtggtgaacgctagctgcagggatgggacgagcttcacttacaacagttccatcaacattgctgtggctgtagctattgatggtggactcatcacacccgtcttggagcaagctgataagctggatgtatatttactctcacagaagtggaaggaactagtcaagaaggcacgtgcaaaacagcttcaaccgaacgagtacaactctggtacatttacactgtccaacttgggcatgtttggtgtagatagatttgatgcaattcttccacctggtcagggagctataatggctgttggagcctcaaaacctacagtggtggctgataaagatggtttctttagtgttaagagcaaaatgctggtcaatgtcacagctgatcacaggattgtttatggtgctgatttggcggcattcctgcaaacttttgcgaaaattattgaggatcctgagagcctaactttgtaggattttcttggaagtgatctatgagctgttcaatcagtagttaatttccaattggaagtctatcgccgagtttgtttttcgttttgtatcattttgagaactcaaggaaatattgtttttcagctgttcgtacggttttcacttgggaatactggatactgctggaaaggcgttactctgctgatgtcatgaagttttggaaataaataagttatatttgtaga

SEQ ID NO: 399 - DNA, 1740 bp, Brachypodium distachyon
ccagcttatacccaagcggaaccaaaccccgctgttgtcgcctccgtacttctcaacccaccctcgagctacaccaaatggcggcaaccccggctcccctctcgctctccgcctccgcgctgtccgcgcgcctgcgccttgcggcgccggcgtcgcgcgcggcctcggcccggcggcgcgggccgatggtggtccgcgccaagatccgggagatcttcatgccggcgctcagctccaccatgacggaggggaagatcgtgtcctggtccgccgccgagggcgaccgcgtcaccaagggcgacgctgtcgtggtcgtcgagtctgataaggccgacatggacgtcgagaccttctacgacggcatcgtggcggccgtcctcgtccccgcgggggagtccgcccccgtcggcgcccccatcgcgctgctcgccgagtccgaggaggacgtggcgctcgccgtcgcccaggcccaggcgctctccagcggacaggcccagcaggctcctccttctgatgccgacgctccgccgcccccgtccccgcctccggcggcggcagctccggtggctgctcccgcgccggttgcagcagggacgaagggtgttgccacgccgcaggctaagaagctggccaagcagcacagggtggaccttgccaaggtgactggcaccgggcagttcggccgaattacgcctgctgatgttgaggcggcagccggcatccagccaaagcccaaggttgctcctcctactgctgctgcacctgtggctgctccttccgtgagagctgtgccacaggcttcggtccttccgccggtacctggtgccacggtggttccattcactgcaatgcaggctgcagtgagcaagaacatggtggagagcctgtcggcgccagcattccgtgtcgggtaccccattttgacggataagctcgatgagctctatgagaaggtcaagccaaagggggtgactatgactgtgctgcttgcaaaggccgcagctatggcgcttgcacagtatcctgtggtgaacgctagctgcagggatggtgcgagcttcacttacaatagttctatcaacattgctgtggctgtcgctattgatggtggcctcattacacccgttctagagcaagctgataagctggatatatatctactctcacaaaagtggaaggaattagtcaagaaggcacgtgcaaaacagctacagccaaatgagtacaactctgggacatttacattgtccaacatcggtatgtttggtgtagatagatttgatgcaattcttccacctggccagggggctataatggctgttggggcctcaaaaccgacagtgacggctgataaagatggtttctttagcatcaagaataaaatgctggtcaatgtcactgctgatcacagaattgtttatggtgctgatttggcagcattcctgcaaacttttgcgaaaataattgaggatcccgagagcctaactttgtaagattttcttgagcgtggtatatggaccggtcagtcattagtttgtttccaattggaagtctattgccgagttcggttttgtatctttgagcactcaaggagatatttcctttgagctgtttgtactttttttactttctggcattggatgctgttggagaggtgttactctgttgatcttgtggaagtttcggaaagcaataagttataattgtagaacagtttgttcactatcattttgccttttt

SEQ ID NO: 400 - DNA, 1746 bp, Avena sativa
cggctcgcctccgtcgtcgctctcctcgcttatacccaagcgaaccaaaccccgctcttctcgcctccgtccccaacctcgagctcaccaatggcggcacccccggctcccctctcgctgtccgcctccgctctgtccgcgcgcctgcgcctcgctgcgccggcttcgcgcgctgccaccgcgcggcggcgcgggccgatggtggtccgcgccaagatccgggagattttcatgccggcgctcagctccaccatgacggagggtaagatcgtgtcctggacagccgcggagggcgaccgcgtcaacaagggcgacgccgttgtcgtcgtcgagtccgacaaggccgacatggacgtcgagaccttctacgacggcatcgtggcggtcgtccttgtccccgcgggggagtccgcccccgttggcgcccccatcgcgctgctcgctgagtccgacgaggacgtggctctcgcccttgcccaggcccaggctctctccagcggacagccccagcaggcttcccctccttcggatgcggccgctccgccatctccgcctccaccggcggaggctccggtggctgatcctgcgccagtttccgcggggacgaagggcattgccacaccgcaggctaagaagctagccaagcagcacagggtggaccttgccaaggtgactggcaccggccaattcggccgaattacaccagcagatgttgaagcggccgccggcatacagccaaagccaaaggttgctcctactcctgctgctgcacctcttgcagctccatcggtgaaggctgtgccgcaggcggcagtgcttcccccggtacctggtgccaccgtggttccattcactgcaatgcaggctgcagtgagcaagaacatggtggagagcctgtcagtgcccacattccgtgtcgggtaccccattttaaccgataagctcgacgagctgtatgagaaggtcaagccaaaaggagtgacgatgactgtattgcttgcaaaggccgccgctatggcgcttgcacagtaccctgtggtgtacgctagctgtggggacggatcaagcttcacttacaacagttccatcaacattgctgtggctgttgccattgacggtgggctcattacacccgttctggagcaagccgataagctggatatatacctactctcacaaaagtggaaggaactagtcaagaaggcatgcgcaaaacagctccaaccaaatgagtacaactctgggacatttacactgtccaacttgggtatgtatggcgtagatcgatttgatgcaattcttccacctggccagggagctataatggctgttggagcctcaaaacccacagtggtggctgataaggatggtttctttagtgtgaagaacaaaatgctggtcaatgtcacggctgatcacaggattgtttatggtgctgatttggcagccttcctgcaaacttttgcgaagattattgaggatcctgagagcctaactttgtaagagtttcttggaagtgctatatgtgccggtcagtcattagttcgtttccaatcggaagtttatcgctgtgttcgattttttgtatctttgagcactctggaatattgcttttgagctgtttgtactgtctttactttggaacactggatactgttggagaggggttactcttgtgatgttatggaagttttggaaagtaataagttataattgtttaatagtttactcagtattattttgcct

SEQ ID NO: 401 - DNA, 1706 bp, Secale cereale
gactcccacggcgcgccggcgccgcccggtggtggtccgcgccaagatccgggagatcttcatgccggcgctcagctccacgatgacggagggcaagatcgtgtcctgggccgccgcggagggcgaccgcgtcgccaagggcgacgccgtcgtcgtcgtcgagtccgacaaggccgacatggacgtcgagaccttctacgacggcatcgtcgccgccgtcctcgtccccgcgggggagtccccccccgtcggcgcccccatcgccctgctcgccgagtccgaggaggacgtcgcgctcgccgtcgcccaggccaaggcgctctccagcggacagccccagcagcaggcccctgctccttcggacgccgacgcttcgccgccccctccggcggccccggtggctgctgctcccgcgcctgtggccgcggggacgaagggcgttgccacgccgcaggctaagaagctggccaagcagcacagggtggaccttgctaaggtgaccggcaccgggcagtacggccgaattacgccggctgatgtcgaggcagccgctggcatccagccaaagacaaaggtggctcctactcctgctgctgcgcctgtggctgcagcttcgtcagtaagggccgtgccgcaggcggccgtgcttccgccggtgcccggtgccacggtggttccgttcactgcaatgcaggctgcagtgagcaagaacatggtggagagcctgtcagtgccagcattccgtgttggttaccccattctcactgataagctcgacgcgctgtatgagaaggtcaagccaaagggggtgacgatgaccgtgttgcttgcgaaggccgctgctatggcgcttgcgcagcaccctgtggtgaacgctagctgcagggatgggacgagtttcacttacaacagttctatcaatattgctgtcgctgtatctattgatggtggactcatcacacccgtcctggagcaagctgataagctggatatatatttactctcacaaaagtggaaggaactagtcaagaaggcacgcgcaaaacagcttcaaccgaatgagtacaactctgggacatttacactgtccaacttgggcatgtttggtgtagatagatttgatgcaattcttccacctggccagggagctataatggctgttggagcctcaaaatctacagtggtggctgataaagatggttactttagtgttaagagcaaaatgatggtcaatgtcacagctgatcacaggattgtttatggtgctgatttggcagcattcctgcaaacctttgcgaaaattattgaggatcctgagagcctaactttgtaggattctcttggaagtggtctatgagttgttcaatcgtcagttcatttccatttggaagtgtatcgctcagttcattgtatctttgagtacccaaggggatgttgcttttcagctgttcgtactgttttcacttgggggaatagtggatactgctggaaaggggttactctgctgatgttatgaagttttggaaagaaataagttgtatttgtagaagagtttgcagatcatccttttgccttagttctttgtattctgatgacatgctggctttgacatggtccagtctattggtaatttaaaacatacactaatatttgtttaaacaaagtaaaaaaaaaaaaaaaaaaaaaaaaaaaaaaaaaacaaaaaa

SEQ ID NO: 402 - DNA, 2358 bp, Oryza sativa
gggaggtgatatagacttttcccaagtcgcgacagatggcttgcgtctgcgggttaatgggccggcccaatatactaaaacgagcccgatccaaaacagaaagttgagcccggccctgatagaggccaggtgagggggttgacgtcaggctcggcccggccctccccagcccatttcagcattcgtcggagtttccaaagctctcatccgcctcgctttctccgccctcgccgaccttctccttatacacccgacctcccccacctcgcctccgccgcctccacctcctcctcctccacctccacctctccaatggcgacgactccagcgcccgtctcgctctcggccgcggcctccaccgtgccggcgcgcctcctcgtggggcggggcgccgcggcggcgccggtggcgaggcggcgggcgaggatggtggtggtgcgggccaagatccgggagatcttcatgccggcgctgagctccaccatgacggaagggaagatcgtgtcgtggtcggccgccgagggggaccgcgtcgccaagggggacgccgtggtggtcgtcgagtccgacaaggccgacatggacgtcgagacgttccacgacggcatcgtcgccgccgtcctcgtccccgccggtgagtccgcccccgtcggcgcccccatcgcgctgctcgccgagtccgaggacgacctccaggccgccctcgccaaggcccaggagctctccaaggcccacccgcagcaggcgcctccaccctccgatgccgccgcgccgccaccgccgcctcctccacccgcggccgctccggcggctccggcgccggtggcagccggcacgaagggcattgccaccccgcaagctaagaagctggccaagcagcatagggtggacctagctaaggtggctggcactgggccgttcgggcgaattacgccggccgatgttgaggctgccgccggcatcgagccgaagccgaaggttgtgcctgctgcttctgctgctcccgtgccgctgtctgctccggcaattggcgccgtgccacaggccgcggagcttcctccggtgcccggtgccacggtggttccattcactggcatgcaggctgcagtgagcaagaacatggtggagagcctcgcggtgcccgcattccgtgtgggatacccaattgtgaccgataagctcgatgagctatatgagaaggtcaagtcaaagggggtgaccatgacagttctgctggcgaaggccgcagctatggcacttgcgcagcacccggtggtgaatgctagctgcagggatgggaagagcttcacttacaacaccaacatcaacatcgcggtggctgtcgcaatcgatggtgggctcattacacctgttctggaggatgctgataagttggatatatatttgctctcacaaaaatggaaggaactagtcaagaaagctcgtgcaaaacagctccaaccaaatgagtacagctctgggacatttacactgtcaaacttgggtatgtttggtgttgatagatttgatgcaattcttccacctggccagggaggcataatggctgtcggagcctcaaaacctacagtggtggctgataaagatggtttctttagtgtcaagagcaaaatgctggttaatgtcactgctgatcacagaattgtatacggtgctgatctggcagcattcctgcaaacttttgcaaagattattgaggatcctgagagcttaactttgtaagatttccttggaagtttcaactatcttcgctaatcattagtttgattcctatggaggtctattgtcgaataccatttttgtatctttaatcactcatcgggtattacttttcggttgtttgtactatttttccttctgaatgttgggtactgttggagagatgatactattaagttatggaaagcaataagctataactgtagaatagtttggtaattataatttttcgtaattcggtatatttttcgcccctcatgagttgttgttccttcagattctgttctatatgatgctaaaagccaaatgtattcctgaatttgtggagaaaactactttattgcataaggttcctaacctccattaacactcttggtagcattggtacaatcttggaaataactctaaagatcacaaattaagctagtatgtaaatctaggtgtatctgagccatctcaaattgtgtttgcatactggctttggaattggtttgtcatattggtgatttgtaatatttgcaaacattttctgcattattttactataattgtatttgcatatatggtaccaagagcaacattttctgcattatttcactaatattctaaccaaaatgaaaa

SEQ ID NO: 403 - DNA, 1937 bp, Panicum virgatum
cccacctttcacagccatccttgttaatgacgtggaaccggcccacactgacattgagcccggcccatgaatggatcgtcggagtttccaaagccaccctcgcctcgctttctccgccctcgctggagtcgcctcactccccttatacccaagcagccaagccccgtcccctccccgcctccgcctccgacctcgagcactcctctccaatggcgacggccccggcacccctctcgctctccgcctccaccgtgcccgcgcgcctccgcgccgcggcggtgccggcgggcgcgcgcggcaggcagccgcggcgcgggcggatggtggtgcgcgccaagatccgggagatcttcatgccggcgctcagctccaccatgacggagggcaagatcgtctcctggtccgccgccgagggcgaccgcgtcaacaagggcgacgccgtcgtcgtcgtcgagtccgacaaggccgacatggacgtcgagaccttccacgacggcatcgtggcggcggtcctcgtccaggccggggagtccgcgccggtgggggcgcccatcgcgctgctcgcggagtccgaggaggaggtgccccttgccctcgccaaggccaaggagctctccaacgggcagccgcagcaggcggcgcttgctccggcggaggatgacgccgcgacgccgcccccgcccccgacaccggcggctgctccggcgccggtggctgcggggacaaagggcattgccagcccgcatgctaagaagctcgcgaagcagcacagggtggaccttgccaaggtgaccggcaccgggccatacggtagaattacgccggaagatgttgaggcagccgccggaattcagccgaagccaaagcctgcggctgttgctgctgcatcagcacctgtggctgcgccttcagcggctgcagtgcctcaagcagcagtgctaccgcctgtgcctggcgcgactgttgttcccttcactaccatgcaagccgcggtgagcaagaacatggtggagagcttggcggtgcccacattccgcgtcgggtacccaattgtaaccgataagctcgatgagctgtatgaaaaggttaagccaaagggagtaacaatgacagtgctgctggcaaaggctgcggccatggcacttgctcagcaccctgttgtcaacgctagctgcagggatggaaagagctttacttacaacagtaacatcaacatcgcagtggctgtggcaattgacggtggccttattacacccgtcctgcaggatgctgacaagctggatatctatttgctctcgcaaaattggaaagatctagtcaaaaaggcacgcgcgaaacaactccagccaaatgagtacagctctgggacatttacactgtccaacctgggtatgtttggtgtagatagatttgatgcaattcttccacctggccagggagctattatggctgttggagcctcgaaacctacagttgtggctgataaagatggtttctttagtgtcaagagcaaaatgctggtcaatgtcactgctgatcacaggactgtatatggtgctgatttggcagcattcctgcagacttttgcaaagattattgaggatcctgagagcttaactttgtaagatctcttgaagagttatgatgttactcctatgtcctaatgtcctacctatgtgcccatcagtagtctgatttcagttggagttctattgctgatctccaatttttgtatcttcgatccttcagtgggatgttgttgtttgttcttgtgttttatttcgcaatatttggatcttgttggagagattatactgttgataccgtggaaattttggagagcaataaattataaactgtagaatagtttggtaactgtgatttgcctttgttctgcatattttgcacccatataatgatttatatccctgtttcac

SEQ ID NO: 404 - DNA, 2282 bp, Sorghum bicolor
ccacgacagcgtcatcggagtttccaaagccattctcgcctcgctttctccgccctcctcacggctttcccaccccgcatatacccaggccaaccagccaaagccccctcccccctctcatcgcctccgcctccgacctcgagcactcctctcccccaatggcgacggcacccgcacccctctcgctctccgcctccacgctgcccgcgcggctccgtgccggagcggtgccggcgggagcgcgctggaggcagcagccgcggcgcgggcggatggtggtgcgcgccaagatccgggagatcttcatgccggcgctcagctcaaccatgacggagggcaagatcgtctcctggtccgccggagagggtgatcgcgtctccaagggcgacgccgtcgtggtcgtcgagtccgacaaggccgacatggacgtcgagaccttccacgacggcatcgtggcggccgtcctcgtccaggccggcgagtccgcgccggtgggcgcacccatcgcgctgctcgcggagtcggaggaggaggtgccgctcgcggtcgccaaggctcaggagctctccaacggcaacgggcagccgcagcaggcgcctcctgctccgacggaggatgccgcagcggcgccgccccctcctcctccggctccggcggctgctcccgcgccggtggctgcggggacgaagggcatcgccagcccgcacgctaagaagctggctaagcagcacagggtggaccttgccaaggtgactggcaccgggccgtatggtcgaattacgccggcagatattgaggcggctgccggaatccagccgaagccaaagcccgcccctgctgctgctgcgccaccacctgtggctgcgccttcagtgggtgcagtgcctcaggcggcagtgctaccaccggttcctggcgccactattgttccattcactaccatgcaggctgcagtgagcaagaacatggtggagagcctggcagtgccagcattccgcgtcggctaccccattgtaaccgataagctcgatgcgctgtatgaaaaggttaagccaaagggagtgacaatgacagtgctgctggcgaaggctacagccatggctcttgtgcagcaccctgttgtcaatgctagctgcagggatggaaagagcttcacatacaacagtaacatcaacattgcagtggctgtggcaattgatggcggccttattacacccgtccttcaggatgctgacaagctggatatatatttgctctcacaaaattggaaggatctggtcaagaaagcacgtgcaaaacagctccaaccaaatgagtacagctctgggacttttacactgtccaacctgggtatgtttggtgtagatcggtttgatgcgatccttccgcctggccagggagctattatggctgttggagcctccaaacctacagtcgtggctgataaagatggtttctttagcgtcaagagcaaaatgctggtcaatgtcactgctgatcacaggattgtatatggtgctgatttggcagcattcctacaaacttttgcaaagattattgaggatcctgagagcttaactttgtaagatctcttgaagagttatctatatacccataagtagtctgattgcagttggagttctattgttgatctccaatttttgtatctttgagcattcaacaggatttgtctgatcttttttgtaccaattcctatctctcaatgttgtgggtcttgttggagaaattatactgttgatattatggaattgttggagagcaataagttataaactgtagaatagttctgcagattttatctctaaaatatggtttatatccctttttcatttatcttctgggaagtatattttcttgaaatttgtaaagtggtagagatcccatcttccctgaatatatcttgggaaaattcctcgctgtccttagactggcatgtaaatggacatgtactgttctgacgtgtactgcaacagtggcctgggcatgctgtctttggagtttgaaatttttaaagattattagcaaaatgaaaatatacaagaggacatgtttggcagttaccagtgactacaggagtatataggaccctccaaaacaataacatggtcagcattaagttgtgacttgtgagtgtattcaacaaatcgaaaaccatgcaatctaaacacaccatcattctaatacaattctgcatgtatacaaactctccgtaactgatacaaacccatctcaagctaataactatacacacattcacacaa

SEQ ID NO: 405 - DNA, 2292 bp, Setaria italica
cccactgctttcagtccatccttgttaatgacgtggggcccagaccacacggacagtgagcccggcccatcactgaatcgtcggagtttccaaagccaccctcacctcgctttctccgcccttgctcgagtcgcctcgctcttcccaccgctataccccaaccagccaagccccgccccctcctcgcctccgcctccagcttcgactcctcgagcactcctctccagtctccaatggcgacggccccggcacccttctcgctgtccacctccaccctgcccgcgcgcctccgggccgcggcggtgccggcgggcgcgcgcggcaggcagccgcggcgcggacggatggtggtgcgcgccaagatccgggagatcttcatgccagcgctgagctccaccatgacggagggcaagatcgtctcctggtccgccgccgagggcgaccgcgtcaccaagggcgacgccgtcgtcgtcgtcgagtccgacaaggccgacatggacgtcgagaccttccacgacggcatcgtggcggcggtcctcgtcccggccggggagtccgcgccggtgggggcgcccatcgcgctgctcgcggagtccgaggaggaggtgccgctcgccctcgccaaggccaaggagctctccaacgggcagtcgcagcaggcggcgcctgctccggcggaggaggccgccgcgacgccgcccccgcctccgcctccgacgccggcggctgcccccgcgccagtggccgccgggacgaagggcattgccagcccgcaggctaagaagctcgcgaagcagcacagggtggaccttgccaaggtgaccggcaccgggccgtacggtagaattacgcctggggatgttgaggcggccgccggaatccagccgaagccaaagcctgctgctgttgctgctgcatcaccacctgtggctgcaccttcagctgctgcagtgcctcaagcagcagtgctaccaccggtgcctggcgcgactgttgttccattcactaccatgcaggccgcggtgagcaagaacatggtggagagcctggcggtgcccgcattccgtgtcgggtacccaattgtaactgataagctcgatgagctgtatgaaaaggttaagccaaagggtgtgacaatgactgtgctactggcgaaggccgcggccatggcgcttgctcagcaccctgctgtcaatgctagttgcagggatggaaagagcttcacttacaacagtaacatcaacatcgcagtggccgtggcaattgatggtggccttattacacccgtcctgcaggatgctgacaagctggatatctatttgctctcacaaaattggaaggatctagtcaaaaaggcacgcgcaaaacagctccaaccaaatgagtacagctccgggacatttacactgtccaacctgggtatgtttggtgtagatagatttgatgcaattcttccacctggccagggagctattatggcagttggagcctcgaaacctacagttgtggctgataaagatggtttctttagtgtcaagagcaaaatgctggtcaatgtcactgctgatcacaggattgtatatggtgctgatttggcagcattcctgcagacttttgcaaagattattgaggatcctgagagcttaacgttgtaagatctcttgaagattatgatgttactcctatctatgtgcccatcagtagtctgattgcagttgaggagttctctccagtttttgtatcttcgagccttcagtgggatgtcgtctgatctgtttgtacttgtttttatttctcaatatttggatcttgttggagagattatactgatgatactatggaaattttggagagcaataagttatactgtagaatagtttggtaactgtaattttgccttagttctgcatattttttgcttacataatgctttatatccctgtttcatttatctgccagaaagtacatattcttaaatttacaatattataatccggtcttcccttaatatatatagggaaaaggtataattgcatttgcttcaatcctgacaataaattaaaatatttatcaatttagactggcatgtaaattgatctagaccgatttgaactgtaatggcatgctgcttttacagtttgaaatttgtccagcttataatggcaaaacgtacatagtatatgtttgcggatcatagctggctatatatccaagagaccaaaactataagttgttcagcgttaagttgtgagtatatttaacaaacttgaaaaccatgcaatccaaccgacc

SEQ ID NO: 406 - DNA, 1964 bp, Panicum virgatum
cggcccacgaatgaatcgtcggagtttccaaagccaccctcgcctcgctttctccgccctcgccggagtcgcctcactcccctccccttatacccaagcagccaagccccgccccctccccgcctccgcctcaacgacctcgagcactcctcttctccaatggcgacggccccggcgcccctctcgctctccgcctccaccgtgcccgcgcgcctccgctccgcggcggtgccggtgccgcggccgcggcgcgggcggatggtggtgcgctccaagatccgggagatcttcatgccggcgctcagctccaccatgacggagggaaagatcgtctcctggtccgccgccgagggcgaccgcgtcagcaagggcgacgccgtcgtcgtcgtcgagtccgacaaggccgacatggacgtcgagaccttccacgacggcatcgtcgcggctgtcctcgtccaggccggggagtccgcgcccgtgggggcgcccatcgcgctgctcgcggagtccgaggaggaggtgccgctcgcgctcgccaaggccctggagctctccaacgggcagccgcagcaggcggcgcctgccccggcggaggatgacgccgcgacgccgcccccgcctccgacaccggcggctgctgctccggcgccggtggccgccgcggggacaaagggcattgccagcccgcatgctaagaagctcgccaagcagcacagggtggaccttgccaaggtgaccggcaccgggccttacggtagaattacgccggaagacgttgaggcggccgccggaattcagccgaagccgaagcctgcagctgttgctgctgcatcagcacctgtagctgcgccttcagcggctgcagtgcctcaagcagcagtgctaccgcctgtgcctggcgcgactgttgttccattcactaccatgcaagccgcggtgagcaagaacatggtggagagcttggcggtgcccacattccgcgtcgggtacccaattgtaaccgataagctcgatgagctgtatgaaaaggttaagccaaagggagtgacaatgacagtgctgctggcaaaggccgtggccatggcgcttgctcagcaccctgttgttaacgctagctgcagggatggaaagagctttacttacaacagtaatatcaacatcgcggtggctgtggcaattgatggtggccttattacacccgtcctgcaggatgctgacaagttggatatctatttgctctcgcaaaattggaaggatctagtaaaaaaggcacgcgcaaaacagctccagccaaatgagtacagttctgggacatttacactatccaacctgggtatgtttggtgtggatagatttgatgcaattcttccacctggccagggcgctattatggctgttggagcctcaaagcctacagttgtggctgataaagatggcttctttagtgtcaagagcaaaatgctggtcaatgtcactgctgatcacaggaccgtatatggtgctgatttggcagcattcctgcagacttttgcaaagattattgaggatcctgagagcttaactttgtaagatctcttgaagagttatgatgttactcctatgtcctacatatgtgcccatcagtagtctgattgcagttggagttctattgcggatctccaatttttgtatcttcgatatcagcgggatgttgtctgatctttgtgcttgtttttatttcgtgaaattctggatcttgttggagagattatactgttgatactgtggaaattttgaagagaaataagttataaactgtagaatagtttggtaattgtgatttgcctttgttctgcatattttgcgcccatataatgatttatatccctgtttcacttatctgctggaaagcacattttattaaatttacaagatgatataatccaaccttctctcagtatatatttaggggaaaacataactgc

SEQ ID NO: 407 - DNA, 2313 bp, Zea mays
ctcagaacatgggctaaagcgctgatgagggtaacttccgtcgatgggctagattgctcacctttgttaatgacgtaggggcccgcagcaaaataaagcccggtccatgacagcatcatcggagtttccaaagccatcctcgcctcgctttctccgcccctcctcactggtttgcatccccatatacccaaccaggaccagccaaaagcccactctcctcctcgcctccgcctccgacatcgagcactcctcttcaatggcgacggcccccgcacccctctcgctctccgcctccaccctgcccgcccggctccgtgccggagtggtaccggcgggcacacggtggaggcagccgcggcgcgggcggatggtggtgcgcgccaagatccgggagatcttcatgccggcgctgagctccaccatgacggagggaaagatcgtatcctggtccgcgggcgagggagaccgcgtctccaagggcgatgctgttgtggtcgtcgagtctgacaaggccgacatggacgtcgagaccttccacgacggcatcgtggcggtggtcctcgtccaggctggcgagtcagcgccggtgggcgcccccattgcgctgctcgcggagtcggaggaggaggttcccctcgcgctcgccaaggctcaggagctctccaacgggcagccgcagcaggcgcctcctgctccgacggaggatgccgcagcggcgccgccccctcttccggctgcgacgactgctccagcgccggtggccgcggggacgaagggcattaccagcccgcacgctaagaagctggctaagcagcacagggtggaccttgccaagattactggcaccgggccgtacggtcgaattacgccggcagatattgaggcggctgccggaatcaagccgaagtcagagcccactcctgctgctgctgctgcgccaccacctgtggccgcgccttcagttggtgctgtgcctcaggcagcagtgctgccgccggttcctggcgcgactgttgttccattcactaccatgcaggctgcagtgagcaagaacatggtggagagcctggcagtgccagcattccgcgttgggtaccccattgtaaccgataagctcgatgagctgtacgaaaaggttaagccaaagggagtgacaatgacagtgctgttggcgaaggctgcagccatggctcttgcacagcaccctgttgtcaatagtagctgcagggatggaaagagcttcacatacaacagtaatatcaacattgcagtggctgtggcaattgatggtggccttattacacctgtccttcaggatgcagacaagctggatatttatttgctctcgcaaaattggaaggacctagtcaagaaagcacgtgcaaaacagctccaaccaaatgattacaactctgggacttttacactgtccaacttgggtatgtttggtgtagatcggtttgatgcaatccttccacctggccagggagctattatggctgttggagcctcgaaacctacagttgtggctgataaagatggtttctttagcgtcaagagcaaaatgctggtcaatgtcactgctgatcacaggattgtatacggtgctgatttggcagcatttctacaaacttttgcaaagattattgaggatcctgagagcttaactttgtaagatcacttgaagagttatgatcttatctatatgcccataagtagtcttattgcagttggagttctattgttgatatccaatttttgtatctttgagcattcaatagaattcatccgatctttttgtaccggtttttatctctcaatgttgtggatcttgttgggggagattatactgttgatattatggaattactggagagcaataagttataaactgtagaatagttctgcagattttatctctgaaatatggtttgtgtccctttaacatttatcttccgggaagtacattttcttcaaatttgaaaactgctagagatccctgttgcacttagactggcatgtaaatggacatgtactgtttagaagcgtactggcgcagtggtcctggcatgttgtctttaagagtttgaaatttttaaaacttattagcaaaacgaaaacatataatagtacaggtttggcagttaccagtaactacaggagtatataggaccctccaaaacaataacatggtcagtattgagttgtgacttgttcgaataattcaacgaattgaaaaccatgcaatctaaacacaccatcattctaatacaattatgcacgtgtacaaactctccgtaaaagatacaaacc

SEQ ID NO: 408 - DNA, 2072 bp, Zea mays
gtgttaaatgtaatacatgattgaatcataatctaacgggccagaaacttcgcttgcatgttgcacataaaatctgattgcatatttgttgttgccgttggaagtggtattatagattgaattctcctaagaattggcccatgaataataatatgaatttacatgggccagatatttgatgaccgtaaatggtctgggctcacaacctccgtcgatgggctagactggtttaatgacctaggtgggccacagtaagataaagcccggtccatgacagcttcatcggagtttgcaaagccatcctcgccttgctttctccgccatcctctctgctttccaccaccctataccaaaccagccaaagccctccactcctccccgcctccgcctccgacgtcgaacattcttctccaatggcgacggcccccgcatccctctcgctctccgcctctaccctgcccacccggctccgtgccgcagcggtgctggcgggcatgcgctggaggcagccgcagcgcgggcggatggtggtgcgcgccaagatccgggagatcttcatgccggcgctgagctccaccatgacggagggcaagatcgtctcctggtccgctggagagggtgatcgcgtctccaagggtgacgccgtcgtggtcgtcgagtctgacaaggccgacatggacgttgagaccttccacgacggcatcgtggcggtggtcctcgtccaggctggcgagtcggcgccggtgggcgcgcccatcgcgctgctcgcggagtcagaggaggaggtgccgctcgctctcgccaaggctcaggagctctccaacgggcagccgcagcaggcgcctcctgctccgacggaggatgccgcagcgacgccgccccctccttctgctccggccactgctcccacgccggtggccgtgggtacgaagggcattgccagcccgcacgctaagaagctggctaagcagcacagggtggaccttgccaaggtgactggcaccgggccgtatggtcgaattacgtcggcagatgtcgaggcggctgccggaatccagccgaagtcaaagcccgctcctgctgctgctgcgccaccacctgtggctgcaccttcagtgggtgcggtgcctcaatcggcagttctaccaccggttcctggcgcgactgttgttccattcactaccatgcaggctgcagtgagcaagaacatggtggagagtctggcagtgccagcattccgcgttgggtaccccattattactgataaactcgacgagctgtatgaaaaggttaagccaaagggagtgacaatgacagtgctgctggcgaaggctgcagccatggctcttgcacagcaccctgttgtcaatgctagctgcagggatggaaagagcttcacatacaacagtaacatcaacattgcagtggctgtggcaattgatggtggccttattacacctgttcttcaggatgctgacaagctggatatatatttgctctcgcaaaattggaaggatctagtgaagaaagcacgagcaaaacagctccaaccaaatgagtacagctctgggacttttacactgtccaacctgggtatgtttggtgtagatcggtttgatgcaatccttccacctggccagggagctattatggctgttggagcctcgaaacctacagttgtggctgataaagatggtttctttagcgtcaagagcaaaatgctggtcaatgtcactgctgatcacaggattgtatatggggctgatttggcagcattcctacaaacttttgcaaaggtaaggtccttcccgacaagccttatcagtcgagccagtccacgtgatagattcgagattgaacttttcaagtgtggcttgacaagatccagaagttccactgggcttatctgaagcctttgatccctgcgatcgctccatctcttggacgacaaagtgcaggagggttgtcttcccgtcagctccacgtatatctgacagcttcagcatgcaaaggacatcctgagatgggcaacttcgtcgtcaaaagtttccttgtacagcatcgcctcaatt

SEQ ID NO: 409 - DNA, 1493 bp, Avena sativa
tcgtgtcctggacagccgcggagggcgaccgcgtcaacaagggcgacgccgttgtcgtcgtcgagtccgacaaggccgacatggacgtcgagaccttctacgacggcatcgtggcggtcgtccttgtccccgcgggggagtccgcccccgttggcgcccccatcgcgctgctcgctgagtccgacgaggacgtggctctcgcccttgcccaggcccaggctctctcaagcggacagccccagcaggcttcccctccttcggatgcggccgctctgccatctccgcctccaccggcggaggctccggtggctgatcctgcgccagtttccgcggggacgaagggcattgccacaccgcaggctaagaagctagccaagcagcacagggtggaccttgccaaggtgactggcaccggccaattcggccgaattacaccagcagatgttgaagcgaccgccggcatacagccaaagccaaaggttgctcctactcctgctgctgcacctcttgcagctccatcggtgaaggctgtgccgcaggcggcagtgcttcccccggtacctggtgccaccgtggttccattcactgcaatgcaggctgcagtgagcaagaacatggtggagagcctgtcagtgcccacattccgtgtcgggtaccccattttaaccgataagctcgacgagctgtatgagaaggtcaagccaaaaggagtgacgatgactgtattgcttgcaaaggccgccgctatggcgcttgcacagtaccctgtggtgtacgctagctgtggggacggatcaagcttcacttacaacagttccatcaacattgctgtggctgttgccattgacggtgggctcattacacccgttctggagcaagccgataagctggatatatacctactctcacaaaagtggaaggaactagtcaagaaggcacgcgcaaaacagctccaaccaaatgagtacaactctgggacatttacactgtccaacttgggtatgtttggcgtagatcgatttgatgcaattcttccacctggccagggagctataatggctgttggagcctcaaaacccacagtggtggctgataaggatggtttctttagtgtgaagaacaaaatgctggtcaatgtcacggctgatcacaggattgtttatggtgctgatttggcagccttcctgcaaacttttgcgaagattattgaggatcctgggagcctaactttgtaagagtttcttggaagtgctatatgtgccggtcagtcattagttcgtttccactcggaagtttatcgctgtgttcgattttttgtatctttgagcactcaggaatattgcttttgagctgtttgtactgtctttactttggaacactggatactgttggagaggggttactcttgtgatgttatggaagttttggaaagtaataagttataattgtataatagtttactcagtattattttcctagtaattatattccga

SEQ ID NO: 410 - DNA, 1531 bp, Aegilops tauschii
cgcaccaccccctccggccaagctagctggcgcaggctgtcctcatgttccaaaagtctcgtcccatgtgactccccgattccaattcccatcaatctccatcccccatctcgcccaagcaacgaggcgcaagcaagtgttagtagcagcgaaggctactctctatgccagcctcggccagtataaaacaaggctctacgcacgccggcacaccgcattacgcaactctagctagctttggcgtggctaggaggagaggtagcggctagctagctgttgtgcattgccgggctcgctctcgagcgtaatggcgcagctcccgcccaagatcccgacggcggcgaccggggcgcaccactggcccggcgctggcgtggagcaccacggccacgggcccgccgcggtgtgggcggacgagttcgccgagttcgcggcggcgcgccggggcgcgcaccgcaggtcgctcagcgactcggtggccttcgtggagatggcgccgggaggctgcggcggggccggcgacttcgacaggctggacgacgaccagctcatgtccatgttccccgacgagggagggtcgacggccccggggtccgagaacggcaccagcgacagcgacggcgacaagcacggcaaggaccggtacgacgacgggcacaacgacgatgctaacccggaggagccggggccggggcaagccacgccgacctcgtccacggagacgatccgcgaccccaagagggtcaagaggatactggctaatcgccagtcggctcagagatctcgggtgaggaagctgcagtacatctccgagctcgagcggtgcgtcacaacgctgcagaacgaggtgtccgtactgtctccccgggtggcatttctggatcagcagcggacgatcctcaccgtcggcaacagccacctcaagcagcggatcgcagctctggcgcaggacaagcttttcaaggacgctcatcaggaggcgctcaaggaggagatcgagaggctgcggcaggtgtaccagcagcagaacctcaggatgtcgtccggcgcgggcgcggcctccgaccacggcgggccgccccctgtgcgcgcggagaaggagctcatgagctgaagcgatcatcgcatgtcccttccgcgcagccgccccgccgccgcatcattgacctgggagggaacacatggcatcatgaaatgcatgaatgaaaccgtccatgctttttttctcttgttcttctttttcttgtccattgacctgtgtatcattctttgcatgtcgatttcagttttgggttttttactgtgaagaaaaaactgaagagtgtgcctccgttgtaaattccgtgtgtagcattgcatcttgtgtacgtagactgttttcagtttagttttggagccatcgttttttaggaaagttttttgggaaaccacataagcacagctcttgctttgtatcctcgtactgatttagcggaattgttgtatgtattcttctgaatcccttgtttctcagtaaatgtatatgtgggct

SEQ ID NO: 411 - DNA, 1312 bp, Leymus cinereus x Leymus triticoides
ccgcccccgtcgccgttgctgtcggccagctttggctaggagaggtagcggctagctgttgcgcattgcccggctcactctcgagcataatggcgcagctcccgcccaagatccccatggcgaccggggcgcaccactggcccggggccggcgcgggagtcgacgggcaccacggccacggggcagccccggtgtgggcggacgagttcgccgagttcgcggcggcgcgccggggcccgcaccgcaggtcgctgagcgactcggtggccttcgtggagatggcgccggggggctgcggggccggcgacttcgacaggctggacgacgaccagctcatgtccatgttccccgacgagggcgggtcgacggccccggggtccgagaacggcaccagcgacagcgacggggacaagcacggcgccgccggcaaggaccgctacgacgacgctaacccggaggagccagggccggggcaagccacgccggcctcgtccacggagacgatccgcgaccccaagagggtcaagaggatactggctaatcggcagtcggctcagagatctcgggtgaggaagctgcagtacatctccgagctggagcggtgcgtcacaacgctgcagaacgaggtgtccgtgctgtctccccgggtggcatttctggatcagcagcggacgatcctcaccgtcggcaacagccacctcaagcagcggatcgcagctctagcgcaggacaagcttttcaaggacgctcatcaagaggcgctcaaggaggagatcgagaggctgcggcaggtgtaccagcagcagaacctcaggatgtcatccggggcgggcgcggcctccgaccacggcgggccgccccctgtgcgcgcggagaaggagctcatgagctgagcgatcattgcatgtcccttctgtgtgcgtatcattgacctgggactgggagggaaacatggcatcaatgcatgaatgaaaccctccatgcttctttttttctttcttcttcttctttctattgtccattgacctgtgtatcattctttacatatcgatttcagttttggtttcttttacggtgggaattgtgaagaagaactgaacccgttgtaaattctgttgtagcattgcatgcatcttgtgtacgtagacgactgtttctggttagttttggagcaactttttttagggaaagttttatgggagaccacataagcacaactcttgctttgtatcctcgttctgatttaggacaactggtgtccggatttcttctgttatgaatactttgtttcaaaaaaaccaaagccaaatgc

SEQ ID NO: 412 - DNA, 1354 bp, Secale cereale
ttgagcggctagctagctttggcgtggctaggagaggtagctgttgcgcttgcgcattgccgggttcgctctcgggcataatggcgcagctcccgcccaagatccccacggcgtccggggcgcaccactggccgtccggcgccggcgtggagcaccacggccacgggccctccgcggtgtgggcggacgagttcgccgagttcgcggcggcgcgccggggcgcgcaccgcaggtcgctgagcgactcggtggccttcgtggagatggcgccggggggctgcggggccggcgacttcgaccggctggacgacgaccagctcatgtccatgttccccgacgagggcgggtcgacggccccggggtccgacaacggcaccagcgacagcgacggcaaggaccggtacgacgacgggcagaacgacgatgccaacccggaggagccgggccggggcaagccacgccgacctcctccacggagaccatccgcgaccccaagagggtcaagaggatactggccaatcggcagtcggctcagagatctcgggtgaggaagctccagtacatctccgagctcgagcggtgcgtcacaacgctgcagaacgaggtgtccgtgctctctcctcgggtggcatttctggatcagcagcggacgatcctcaccgtcggcaacagccacctcaagcagcggatcgcagctctggcgcaggacaagcttttcaaggacggtcagtactcctacccctgctaaaaattatgggcgttcatgtcatgtgcactaggaataaccaaaatcggtttgatctgcagctcatcaggaggcgctcaaggaggagatcgagaggctgcggcaggtgtaccagcagcagaacctccggatgtcgtccggcgcgggcgcggcctccgaccacggcgggccgccgcctgtgcgcgcggagaaggagcttatgagctgagcgatcatcgcatgtcccttctgcgcagcccgccgccgcatcattgacctgggaggggaacatggcatcatgaaatgcatgaatgaaaccatccatggcttcttctttttctttcttgttcttctttttcttgtccattgacctgtgtatcattctttgcatatcgatttcagttttgggttttttactgtgaagaaaaaactgaagtgtgcctccgttgtaaattccggtgtgtagcattgcatcttgtgtacgtagactgttttttcagtttagttttggagccgtcgttttttaggaaagttttttgggaaaccacataagcacaactcttgctttgtatcctcgtactgatttagcacaactgttgtatgtattcttctgaatcctttgtttctcag

SEQ ID NO: 413 - DNA, 1345 bp, Arabidopsis lyrata
aatcttttgcctttcccaacacacactcctgtctctctttatctctctctctctctctctctctctttcccttcaaagatctcacaacttcttttgtgttctgtaatgatgaaaccagaaactaaaaaaacagaacaaaagcaaaaacaatcctcacaaatcaaagaagaccttcctcctgtgaccataccacctcttccacttccttacaagtcatgcagcttgaaagtttctattcactgtgaaggctgcaaaaagaaagtgaaaaaaatacttaccagtattgaaggtgtttataaagtggacattgatgtgaagcaacataaggtaacggtaataggaatcgtttcaccggagattcttttaaagaagcttcacaaggctggtaaaaacgccgaattgttaccggagatacccgacccggttgagaacaaacagaaaaccgtcgacccgaaagagaagaacaagaaaaagaagaatgaagaaaatgtgcaacgaaccgaagaagctacttctgccggtacggataaaccggaaaaaaccgaagtcggcaagagtgataaaccggaatctgaaaaaaccgacgccggagagtgttgttccggtgacggctgtgaagttgctccagtgaaagagaaaaaggatgttcttaaggagaaagattctgtcaaggaagaatctccgtcaccaccggcggattcagcggctccggtggcggagaagaaagctgaagaaaccggtggaggtggtaatggcaaagttggtaaaaaaaagaaaaagaaggggcaaaatttgaacactactaacaatcctaccgatggacctgcccgtactcaatcactccctcttcccactacaacagattacgaccgtccatttaatcagatcaatgaccaccatataataaccaataacaatccgccacgtcacgatatgtatccttatcctgcagcaggctattatgcgccgcaagtcatgtacggcgtaagttataacgttgctcaacctccggtgagtgtagacgctgcgtcgtattatacacctccaccaccgtattcgtacgcgtacatgcacaatggttatcaaccgtccgatcaaaacccttatcaacctcgaccgtcggattcatttgagttattcagcgatgagaatccaaacggttgttcggtaatttgatgtcaaattaccaaaaggaccttgaactctgcttatacgccttgtatgactaaaggatggtttcgtaatttgaagttttacacgtgcaagttagcttaatggtctttttagttaggtttatgaatgttgtattatgattatgattatgttaagataaagattaagcttt

SEQ ID NO: 414 - DNA, 1602 bp, Aegilops tauschii
gtcgccgtcgcgctgcagctgggctcgtccgaccacgcgtctccgaggatggaccagccgccgaatggcttcgccgccggaggtcttttcgttcagcacattgatgggcaaaaagcttctcccccttctgtaattgtgattggtggagggatttcaggcattgcatctgctcgtgccttgtcaaatgcttcatttaaggtcacattgctagagtcgcgggagcgacttggtggccgtgtgcatactgactattcttttggctgcccaattgacatgggagcatcttggttgcatggtgtttgcaatgagaattctttggcgccattgattaggcttcttgggcttagattatatcgcaccagtggtgataactctgtgctttatgaccatgatttggagagctacgcgctctttgataaagatggtcgtcaaattccccaggagatagtaaccaaagttggggaaatatttgagcagattctgaaggagacggtgaaagttagagatgaatatgcaaacgacatgcctcttgttcaagccatctcaatggtgcttgacagaaatccacatctaaagcttgagggtttgcagtatgaagtattgcagtggtgcatttgtagattggaagcatggtttgccactgacgtggataatatatctttgaaaaattgggatcaggaacatgttcttactggtggacatgggcttatggtgaatggctacgaccctgttatcaaagctctctctcgagatcttgatgtccacctgaaccacagggttaccaaaatcatccagcggtataataaagtcatcgtatgcgtggaagacgggacaagctttgttgcagatgctgctataataaccgtccctctcggtgtactcaaggcaaacatcatcaagtttgaacctgagctcccagactggaaactgtcggcaatctctgatcttggtgtcggcctcgagaacaagatagccctcagattcaacacaatattttggcccaatgtagaagtgctgggcagggttgcccaaacatcgaatgcgtgcggctactttcttaaccttcacaaagccacagggcatccagtccttgtatgcatggtggcgggcagattcgcatacgaaatggagaagctatcagacgaagaatccgtaaactttgtcatgtcacagctcaggagaatgctaccaggggccaccgagccggtccagtatctggtttcacggtggggaactgaccccaactcgctcggctcctactcgtgcgacttggtcgggaaaccggccgacctgtatgagcgattctgcgctcgtgtgggcaacctgttctttgctggggaggccgcctgcatcgaccactctgggtctgtgcacggagcgtattcgtcaggtatcgacgctgcagaggactgccgaaggcgcctctcgacgcagctcggtatctccgacctgttccaggtggggaagattgtgatgagggaggagatgactgaagtcatggtccccctccagatatccaggctgtgaaagaaaggaaggaagaacaaacctgtctactattattagcatcgtgttgttctgttaacatcgtagctgtaattt

SEQ ID NO: 415 - DNA, 2140 bp, Secale cereale
ggctcggcggcgtggctgtggctccgcgcgaagggatcgccggtgcgggcgccaccggtgacgggccgttttgggtatgagaggggacctccgcgaggcgccgagcaccaccgccgcagccagcgtcgacgtcggcgggggccccatggacggcctcctcgtcttcgtcttctacctctcgcttcctatacgtggcggccgcgaccactctaattgctagcctcccgccggcccggatcgatctcgccacactcttcaatctctctctgactctgttcctattcgacccgatcctccccgcctccgccgtcgccgccgccgtcgcgctgcagctgggctcgtctgaccgacgatggacccgccgccgaatggcttcgccgccggaggtcttttcgttcagcacatcgataggcaaaatgcttctcccccttctgtaattgtgattggtggaggaatttcaggcattgcatctgctcgtgcattgtcaaatgcttcatttaaggtcacattgttagagtcgcgggagcgacttggtggccgtgtgcatactgactattcttttggctgcccaattgacatgggagcatcttggttgcatggtgtttgcaatgagaattctttggcgccattgattaggcttcttgggcttagattatatcgcaccagtggtgataactctgtgctttatgaccatgatttggagagctacgcgctctttgataaagatggtcgtcaaattccccaggagatagtaaccaaagttggggaaatatttgagcagattctgaaggagacggtgaaagttagagatgaatatgcaaacgacatgcctcttgttcaagccatctcaatggtgcttgacagaaatccacatctaaagcttgagggtttgcaatatgaagtattgcagtggtgcatttgtagattggaagcatggtttgccactgacgtggataatatatctttgaaaaattgggatcaggagcatgttcttactggtggacatgggcttatggtgaatggctacgaccctgttatcaaagctctctctcgagatcttgatgtccacctgaaccacagggttaccaaaatcatccagcggtataataaagtcatcgtatgcgtggaagacggaacaagctttgttgcagatgctgctataataactgtccctcttggtgtgctcaaggcgaacatcatcaagtttgaacctgagctccccgactggaaactgtcagcaatctctgatcttggtgtcggcctcgagaacaagatagccctccggttcaacactgtattctggcccaatgtggaggtactgggcagggttgcccaaacatcgaatgcgtgcggctactttcttaaccttcacaaagcaacagggcatccagtccttgtatgcatggtggcgggcagattcgcatacgaaatggagaagctatcagacgaagaatccgttaactttgtcatgtcacagctcaggagaatgctaccaggggccaccgagccggtccagtatctggtttcacggtggggaactgacccaaactcgctcggctcctactcgtgtgacttggttgggaaaccagctgacttgtatgaaagattctgcgctccagtgggcaacctgttcttcgccggggaggccgcttgcatcgaccactctggatctgtgcacggagcatattcatcaggtatcgacgctgcagaggactgccgaaggcgcctctcgacgcagctcggtatctccgacctgttccaggttgggaagattgtgatgagggaggagatgactgaagtcatggtcccactccagatatccaggctgtgaaaggaaggaagaacaaacctgtctactattcaacaccttgttctgttaacgtcgtagctgtaatttacccctccgaaactgtacaatttcgcagtgtctgatctttgatgtacttatctctgaataacatgcaggctgtccctctgatttcatcggtattgctattgttgtctgtaagggtttttatcatttgtgtcattggttatgtctcactactcagttatgccactagaaatttcaactgctcaaaaatgtcatcgcttcgttagatgcatgctaaaaaatgccattaaataccaaaaaaaagtc

SEQ ID NO: 416 - DNA, 1665 bp, Triticum aestivum
agccgccgaatggcttcgccgccggaggtcttttcgttcagcacattgatgggcaaaacgcttctcccccttctgtaattgtgattggtggagggatttcaggcattgcatctgctcgtgccttgtcaaatgcttcatttaaggtcacattgttagagtcgcgggagcgacttggtggccgtgtgcatactgactattcttttggctgcccaattgacatgggagcatcttggttgcatggtgtttgcaacgagaattctttggcgccattgattaggcttcttgggcttagattatatcgcaccagtggtgataactctgtgctttatgaccatgatttggagagctacacgctctttgataaagatggccgtcaaattccccaggagatagtaaccaaagttggggaaatatttgagcagattctgaaggagacggtgaaagttagagatgagtatgcaaacgacatgcctcttgttcaagccatctcaatggtgcttgacagaaatccacatctaaagcttgagggtttgcaatatgaagtattgcagtggtgcatttgtagattggaagcatggtttgccacagacgtggataatatatctttgaaaaattgggatcaggaacatgttcttactggtggacatgggcttatggtgaatggctacgaccctgttatcaaagctctctcacgagatcttgatgtccacctgaaccacagggttaccaaaatcatccagcggtataataaagtcatcgtatgcgtggaagacggtacaagctttgttgccgatgcggctataataaccgtccctctcggtgtactcaaggcgaacatcatcaagtttgaacccgagctcccagactggaaactgtcggcaatctctgatcttggtgtcggcctcgagaacaagatagccctgcggttcaacactgtattctggcccaatgtagaggtactgggcagggttgcccagacatcgaatgcgtgcggctactttcttaaccttcacaaagccacagggcatccagtccttgtatgcatggtggcgggcagattcgcatacgaaatggagaagctatcagacgaagaatccgtaaactttgtcatgtcacagctcaggagaatgctgccaggggccaccgagccggtccagtatctggtttcacggtggggaaccgaccccaactcgctcggctcctactcgtgcgacttggtcgggaaaccggccgatttgtatgagcgattctgcgctccggtgggtaacctgttcttcgccggggaggccgcctgcatcgaccactccgggtccgtgcacggagcgtattcgtcaggtatcgacgctgcggaggactgccgaaggcgcctctcgacgcagctcggtatctccgacctgttccaggtggggaagattgtgatgagggaggagatggctgaagtcatggtccccctccagatatccaggctgtgaaaggaaggaaggaagaacagacctgtctgctattattagcatcgtgttgttctgttaacatcgtagctgtaatttacctcatgaactgtacaatttcgcagcttgacctttgatgtaatccctgaataacttgcagattttccctcttatttcatctgtattgctattgttatccattattatgtgtactctt

SEQ ID NO: 417 - DNA, 1666 bp, Triticum aestivum
tttcgttcagcacattgatgggcaaaacgcttctcccccttctgtaattgtgattggtggagggatttcaggcattgcatctgctcgtgccttgtcaaatgcttcatttaaggtcacattgttagagtcgcgggagcgacttggtggccgtgtgcatactgactattcttttggctgcccaattgacatgggagcatcttggttgcatggtgtttgcaatgagaattctttggcgccattgattaggcttcttgggcttagattatatcgcaccagtggtgataactctgtgctttatgaccatgatttggagagctacgcgctctttgataaagatggtcgtcaaattccccaggagatagtaaccaaagttggggaaatatttgagcagattctgaaggagacggtgaaagttagagatgaatatgcaaacgacatgcctcttgttcaagccatctcaatggtgcttgacagaaatccacatctaaagcttgagggtttgcaatatgaagtattgcagtggtgcatttgtagattggaagcatggtttgccactgacgtggataatatatctttgaaaaattgggatcaggagcatgttcttactggtggacatgggcttatggtgaatggctacgaccctgttatcaaagctctctcccgagatcttgatgtccacctgaaccacagggttaccaaaatcatccagcggtataataaagtcatcgtatgcgtggaagacgggacaagctttgttgccgatgctgccataataaccgtccctctcggtgtactcaaggcgaacatcatcaagtttgaacctgagctcccagactggaaactatcggcaatctctgatcttggtgttggcctcgagaacaagatagccctcagattcaacacaatattttggcccaatgtagaagtactgggcagggttgcccaaacatcgaatgcgtgcggctactttcttaaccttcacaaggccacagggcatccagtgctagtatgcatggtggcgggcagattcgcatacgaaatggagaagctatcagacgaagaatccgtaaactttgtcatgtcacagctcaggagaatgctgccaggggccaccgagccggtccagtatctggtttcacggtggggaaccgaccccaactcgctcggctcctactcgtgcgacttggtcgggaaaccggccgacctgtatgagcgattctgcgctccggtgggcaacctgttctttgctggggaggccgcctgcatcgaccactcggggtctgtgcacggagcgtattcgtcaggcatcggcgctgcggaggactgccgaaggcgcctctcgacgcagctcggtatctccgacctgttccaggtggggaagattgtgatgagggaggagatgactgaagtcatggtccccctccagatatccaggctgtgaaaggaaggaagaacaaacctatctactattattagcatcgtgttgttctgttaacatcgtagctgtaatttacctccgaaactgtacaatttcgcagcgtctgatctttgatgtactccctccgtttgtttttataagacgttcagacaacttgctttctgctgtttttgaacagtgtctgaaagtctaaaacatcttataaaaacaaacagaggtagtatctct

SEQ ID NO: 418 - DNA, 1771 bp, Avena sativa
ggacggcctcctcgtcttcgtcttctacctctcgcttcctatacgtggcgcccgcgtccactccttatcctccccctctaattgctagcccccgccggacgccgcttccccgccggcccggatcgattctgccacgcaccgcactctccgatctctctctgtaaactctgttccgattcgactcgactcgactcgatcctccgtcgagctgcagtttgacagcgccggaggatggaccagcccccgaatggcttcgccgccggaggtctttttgttcagcacattgatgggaaaaacgcttctcccccttctgttattgtgattcgtggtgggatttcaggcattgcatctgctcgtgcactgtcgaatgcctcatttaaggttacattgttagagtcgcgagaccgacttggtggccgtgtgcatactgactattcttttggctgcccaattgacatgggagcatcttggttgcatggtgtatgtaatgagaattctttggcgccattgattaggcttcttgggcttagattatatcgcaccagtggtgataactctgtgctttatgaccatgatttggagagctattctctgtttgataaggatggtcgtcaagtcccccaggagatagtaaccaaagtcggggagatatttgaggaaattcttaaggagacggtgaaagttagagatgaaaatgcaaatgacatgcctcttgttcaagcaatctcaattgtgctcgacaggaatccacatctaaagcttgagggtctgcagtatgaagtattgcagtggtgcatatgtagattggaagcatggttcgcaacggacgttgacaatatatctttgaaaaactgggatcaggaacatgttcttactggtggacatgggcttatggtgaatggctatgatcctgttatcaaagctctctctcgagatcttgatatccacctgaaccacagggttaccaaaatcatccagcggtataataaagtcattgtatgtgtggaagacgggacaagctttgttgcggatgctgctataataactgtccctctcggtgtactcaaggcaaacatcatcaagtttgaacctgagctcccagactggaaactatcagcgatcgctgatcttggtgttggtctcgagaacaagatagccctccagttcaacacaatattttggcccaatgtagaagtactgggtagggttgccaaaacatcaaatgcctgtggttactttcttaaccttcacaaagctacaggacatccagtccttgtatgcatggtggccggcagattcgcctatgaaatggagaagctatcagacgaagaatcggttaactttgtcatgtcacagctcaggaaaatgcttcccggggccactgaaccagttcagtatttggtctcacggtggggaactgacccaaattctctcggttcctactcatgtgacttggtcggtaaaccagctgacttgtacgaaagattctgcgctccggtgggcaacatgtttttcgccggggaggccgcctgcatcgaccactctggctccgtgcacggagcgtattcatcaggtatcgacgctgcagaggactgccgaaggcggctctcaatgcagctaggtatctccaatctattccaggttggcaagattgccatgagggaggagatgtctgaagtcatggttcccctccagatatctaggctgtgaaagtagaacaaacctgtatattatttagcaccgtgctgttttgttaacatcgtagctgatc

SEQ ID NO: 419 - DNA, 1675 bp, Avena sativa
ctcgactcgatcctccgtcgagctgcagtttgacagcgccggaggatggaccagcccccgaatggcttcgccgccggaggtctttttgttcagcatattgatgggaaaaacacttctgccccttctgtaattgtgattggtggagggatttcaggcattgcatctgctcgtgcactgtcaaatgcctcatttaaggttacattgttagagtcgcgagaccgacttggtggccgtgtgcatactgactattcttttggctgcccaattgacatgggagcctcttggttgcatggtgtatgtaatgagaattctctggcgccattgattaggcttcttgggctcagattatatcgcaccagtggtgataactctgtgctttatgaccatgatttggagagctatgctctgtttgataagtatggtcgtcaagtcccccaggagatagtaaccaaagtcggggagatatttgaggaaattcttaaggagacggtgaaagttagagatgaaaatgcaaatgacatgcctcttgttcaagcaatctcaattgtgctcgacaggaatccacatctaaagcttgagggtctgcagtatgaagtattgcagtggtgcatatgtagattggaagcatggttcgcaacggacgttgataatatatctttgaaaaattgggatcaggaacatgttcttactggtggacatgggcttgtggtgaatggctatgaccctgttatcaaagctctctctcgagatcttgatatccacctgaaccacagggttaccaaaatcatccagcggtataataaagtcatcgtatgtgtggaagacgggacaagctttgttgcggatgctgctataataactgtccctctcggtgtactcaaggcaaacatcatcaagtttgaacctgagctcccagactggaaactatcagcgattgctgatcttggtgttggtctcgagaacaagatagccctccggttcaacacaatattttggcccaatgtagaagtactgggtagggttgcccaaacatcaaatgcctgtggttactttcttaaccttcacaaagctacaggacatccagtccttgtatgcatggtggccggcagattcgcctatgaaatggagaagctatcagacgaagaatccgttaactttatcatgtcacagctcaggaaaatgcttcccggggccactgaaccagttcagtatttggtctcacggtggggaactgacccaaattctctcggttcctactcatgtgacttggtcggtaaaccagctgacttgtacgaaagattctgcgctccagtgggcaacatgttcttcgccggagaggctgcctgcatcgaccactctgggtctgtgcacggagcgtattcatcaggtatcgacgctgcagaggactgccgaaggcggctctcaatgcagctaggtatctccaatctattccaggtaggcaagattgccatgagggaggagatgtctgaagtcatggtccccctccagatatctaggctgtgaaaaacctgtctattatgtccctattatttagcaccgtgctgttctgttaacatcgtagctgatccgccctctgtatttgcctccagaattgtacaatttcgcagtttgatctttgatgtatctctgaataacttgcagacttaatctctct

SEQ ID NO: 420 - DNA, 2208 bp, Brachypodium distachyon
caacccgaactcgccacgaagcagctgcattccttcctgttcctgaatcctgaatcctgatccccgtctctctctgtgtgtctctgtcgtcgtctctcacgctctcctcccttcccccgaatcaatccgcggccccgttccggcggtcgggcggcgtggctccgcggaaaggaacagacggtgcggcggcggcgaggggactcgccggcggcgacgagctgggtcgttgggtatgagagggcgggtgtctcgcccccttgcggcttcagccagcaccacagccgacccctgctgccgccgcggctctatggacggcggcctcctcgtcttcgtcttctacctctcgcttcctatacgtggcggccgcgaccactccttaacctcctcctcgtctaattgctaatccaccccgcccggatcggtcgatctcgctctgcactgcactcactccccgcccgatctgtgtgtttcgattccattcccattcgattccgttcggttcggttctccccgccgcggttaggaccatttgaccgcgtcagtcaggatggaccagccgcctaatggcttcgccgccggaggtctttttgttcagcacattgatgggaaaaacgcttctgccccttctgtcattgtgattggtggagggatttcaggcattgcatctgcccgtgcattatcgaatgcttcatttaaggtcaccttattagagtcgcgggaccgacttggtggccgtgtgcatactgactattcgtttggctgcccaattgacttgggagcatcttggttgcatggcgtatgcaatgagaattccttggcaccattgattaggctgcttgggcttagattataccgcaccagtggtgataactctgtgctgtatgaccatgatttggagagctacgctctctttgataaggatggtcgccaagttccccaggagatagtaaccaaagttggggaaacatttgagcaaattcttaaggagacggtgaaagttagagatgaatatacaaatgacatgcctcttgttcaagccatctcaattgttcttgacaggaatccacatctaaagcttgagggtttgcaatatgaagtattgcagtggtgcatttgtagattggaggcgtggtttgccacagatgtggataatatatctttgaaaaattgggatcaggaacatgttcttactggtggacatggccttatggtaaatggctatgaccctgttatcaaagctctcgctcgagatcttgatatccatcttaaccacagggttaccaaaatcatccagcggtataataaagtcatcgtatgcgtggaagatgggacaagctttgttgcagatgctgctataataactgtccctctcggtgtgctcaaggcaaacattatcaagtttgaacctgagctcccagactggaaactatcagcgatctctgatctcggtgttggcctcgagaacaagatagcactccggttcgacaccatattctggcccaatgtagaagtgataggcagggttgcacaaacatcgaattcctgcggttactttcttaatcttcacaaagccacaggacatccagtgctggtatgcatggtggcaggcagattggcatacgagatggagaagctgtcagacgaagaatccgtggaatttgtcatgtcacagcttaagaggatgctaccaggggccaccgaaccggttcagtatttggtttcgcggtggggaactgacccgaactcactcggttcctactcttgtgacctggtcgggaaaccagctgacctgtacgaaaggttctgcgccccggtgggcaacctgttcttcgccggggaggcggcctgcattgaccactcgggatccgtccacggagcgtactcgtcaggcattggtgccgcggaggactgccgaaggcgcctctcgacgcagctaggcatctccgacctgttccaggtcgggaagattgtcatgagggaggagatggctgacgccatggttcccctccagatatccaggctgtgagagaaagaacacagctgtgtagtagcaaccgtgttgtcgtgttaaacattgtagctgtactatttcgaagcttgatcgatctttgttgtaatctctgaataacaaaatgcagaacttctctctctccgatttcatggacattgattatatttatattatatttatatatcagttatctgtac

SEQ ID NO: 421 - DNA, 2323 bp, Avena sativa
taccggttccggttggtaccgtccgacgtacgcgtagtccgactcggtaccgtacctacgtagtcgttcgtcgacctacgccacgacggaaacgtaactaacggaggaccgacacgtttgttccttcgttggtcgacctcggagttacctatacgtcctacgtcgaccaaataagtgaccgtcgggaagtacaacggaaggaaacccgtaacttaggtccacggtttccggtcgttccttattgatgctactaactgatcggactgccgacgcaagcaaccgagcccggccagacccaaccccgtcacgaccaactaacccaaccgtgggccctctgtcccgcctgcgcgcacgcactctcgctcgctctcctccgctccacctcacctgcatcgtccggcacgggcggcgtggctccgcgggagggaatcgccggtgcgggactctccggcgccgggccgttttgggcatgagaggggtcctccacgcggcgcccagcgtcggcccctgttgcggcggcagtggcggctccatggacggcctcctcgtcttcgtcttctacctctcgcttcctatacgtggcgcccgcctccactccctagtctcctccccctctaattgctagcccccgccggacgccgcttccccgccggcccggatcgattctgccacgcaccgcactctccgatctctctctgtctctgtaaactctgctccgattcgactcaactcgactcgatccctccgccgagctgcagcttgaccgcgccggaggatggaccagccgccgaatggcttcgccgcaggaggtctttttgttcagcacattgatgggaaaaacgcttctcccccttctgttattgtgattcgtggtgggatttcaggcattgcatctgctcgtgcactgtcgaatgcctcatttaaggttacattgttagagtcgcgagaccgacttggtggccgtgtgcatactgactattcttttggctgcccaattgacatgggagcatcttggttgcatggtgtatgtaatgagaattctttggcgccattgattaggcttcttgggcttagattatatcgcaccagtggtgataactctgtgctttatgaccatgatttggagagctatgctctctttgataagggtggtcgtcaagtcccccaggagatagtaaccaaagtcggggagatatttgaggaaattcttaaggagacggtgaaagttagagatgaaaatgcaaatgacatgcctcttgttcaagcaatctcaattgtgctcgacaggaatccacatctaaagcttgagggtctgcagtatgaagtattgcagtggtgcatatgtagattggaagcatggttcgcaacggacgttgacaatatatctttgaaaaactgggatcaggaacatgttcttactggtggacatgggcttatggtgaatggctatgatcctgttatcaaagctctctctcgagatcttgatatccacctgaaccacagggttaccaaaatcatccagcggtataataaagtcattgtatgtgtggaagacgggacaagctttgttgcggatgctgctataataactgtccctctcggtgtactcaaggcaaacatcatcaagtttgaacctgagctcccagactggaaactatcagcgatcgctgatcttggtgttggcctcgagaacaagatagccctccggttcgacacaatattttggcccaatgtagaagtactgggtagggttgccaaaacatcaaatgcctgtggttactttcttaaccttcacaaagctacaggacatccagtccttgtatgcatggtggccggcagattcgcctatgaaatggagaagctatcagacgaagaatcggttaactttgtcatgtcacagctcaggaaaatgcttcccggggccactgaaccagttcagtatttggtctcacgtggggaacgtgaccaaattctctcggtcctactcatgtgactggtcggtaaccagctgacttgtacgaaagattctgcgctccagtgggcaacatgttcttcgccggagaggctgcctgcatcgaccactctgggtctgtgcacggagcgtattcatcaggtatcgacgctgcagaggactgccgaaggcggctctcaatgcagctaggtatctccaatctattccaggtaggcaagattgccatgagggaggagatgtctgaagtcatggtccccctccagatatctaggctgtgaaaaacctgtctattatttagcaccgtgctgttctgttaacatcgtagctgatccgctctctgtatttgcctcc

SEQ ID NO: 422 - DNA, 1784 bp, Secale cereale
tggcttcgccgccggaggtcttttcgttcagcacatcgataggcaaaatgcttctcccccttctgtaattgtgattggtggaggaatttcaggcattgcatctgctcgtgcattgtcaaatgcttcatttaaggtcacattgttagagtcgcgggagcgacttggtggccgtgtgcatactgactattcgtttggctgcccaattgacatgggagcatcttggttgcatggtgtttgcaatgagaattctttggcgccattgattaggcttcttgggcttagattatatcgcaccagtggtgataactctgtgctttatgaccatgatttggagagctacgcgctctttgataaagatggccgtcaaattccccaggagatagtaaccaaagttggggaaatatttgagcagattctgaaggagacggtgaaagttagagatgaatatgcaaacgacatgcctcttgttcaagccatctcaatggtgcttgacagaaatccacatctaaagcttgagggtttgcaatatgaagtactgcagtggtgcatttgtagattggaagcatggtttgccactgacgtggataatatatctttgaaaaattgggatcaggaacatgttcttaccggtggacatgggcttatggtgaatggctatgaccctgttatcaaagctctctctcgagatcttgatgtccacctgaaccacagggttaccaaaatcatccagcggtataataaagtcatcgtatgcgtggaagacgggacaagctttgttgcagatgctgctataataactgtccctcttggtgtactcaaggcgaacatcatcaagtttgaacctgagctccccgactggaaactgtcggcaatctctgatcttggtgtcggccttgagaacaagatagccctccggttcaacactgtattctggcccaatgtagaggtactgggcagggttgcccaaacatcgaatgcgtgcggctactttcttaaccttcacaaagccacagggcatccagtgctagtatgcatggtggcgggcagattcgcatacgaaatggagaagctatcagacgaagaatccgtaaactttgtcatgtcacagctcaggagaatgctaccaggggccaccgagccggtccagtatctggtttcacggtggggaactgacccaaactcgctcggctcctactcgtgtgacttggttgggaaaccagctgacttgtatgaaagattctgcgctccagtgggcaatctgttcttcgccggggaggccgcttgcatcgaccactctggatctgtgcacggagcatattcatcaggtatcgacgctgcagaggactgccgaaggcgcctctcgacgcagctcggtatctctgacctgttccaggttgggaagattgtgatgagggaggagatgactgaagtcatggtccccctcagatatccaggctgtgaaaggaaggaagaacaaacctgtctactattcaacaccgtgttctgttaacgtcgtagctgtaatttacccctccgaaactgtacaatttcgcagtttttgatctttgatgtacttatctctgaataacatgcaggctgtccctctgatttcatcggtattgctattgttgtcagtaagggtttttatcatttatgtcattggttatgtctcactactcagttttgccactagaaatttcaactgctcaaaaatgtcatcgcttcgttagatgcatgctcaaaaatgcgattaaataccattactgtcagctcaaaaaaaagtc

SEQ ID NO: 423 - DNA, 2086 bp, Oryza sativa
ctcgagccaatctctcgctgtgtctctctcgcgctctccactagcaccggctcggctcggctcgcgcggcggcggcggcggggcggcgtggcgccgagggaggggaacgccggtgtggggagggcggcggcgaggggactcgccggcgacgagctggtttgggtatgagaggggttacccatgcggcgccgaccacgagcgtcccccgccgcggctccatggacggcctcctcatcttcgtcttctacctctcgcttcctatacgtggtggccgcgaccactcgttaatctcctcctctaattgttagccgatctcgcctctcccccacactctctgatcccgctctctctctctgcttcgattcgattcgattcgatcttctccacctcgtcgccgtcgaacgcaactcggatcgggaggataatggaccagccttctaatggcttcgccgccggaggtctttttcttcgtcacattgatgggcaaaatgcctctcccccttctgtcattgtgattggtggagggatttcaggcattgcagctgctcgtgcgctgtctaatgcttcgtttaaggtcacactattagagtcacgggaccgacttggtggccgtgtgcatactgactattcttttggctgcccaattgacatgggagcatcttggttgcatggtgtatgcaatgagaattcattggcaccactgattaggttgcttggccttagattatatcgcaccagtggtgataactctgtgctatatgaccatgatctggagagctatgctctctttgataaggatggtcgtcaagttccccaggagatagtgacaaaagtcggggaaacatttgagaaaattcttaaggagacggtgaaagtaagagctgaacatgaagatgacatgcctcttattcaagccatctcaattgtgcttgacaggaatccacacctaaagcttgatggtttgcaatatgaagtactgcagtggtgcatatgtaggctggaggcatggtttgccacagatgtggataatatatctctgaaaaattgggatcaggaacatgttcttactggtggccatgggcttatggtgcatggttatgatcctgttatcaaagctctcgcgcaagatcttgatatccacctgaaccacagggttaccaaaatcatccagaggtacaacaaaactatagtatgtgttgaagatgggacaagctttgttgcagatgctgctataataactgtccctcttggtgtacttaaagcaaatatcatcaagtttgaacctgagctcccagattggaagctttcatcaatatctgatcttggtattggcattgagaacaaaatagccctccgcttcaatagtgtattttggccaaatgtagaagtgctaggcagggttgccccaacatcaaatgcctgcggttactttcttaaccttcacaaagccacagggcatccggttcttgtatgcatggtagcaggaagattcgcatatgaattcgagaagctatccgatgaagaatccgtaaactttgtcatgtctcagctcaagaaaatgctaccaggagctactgaaccggtccagtatttggtttcaaggtggggaaccgacccgaattcgcttggttcttattcctgcgaccttgttgggaagccagctgacttgtatgaaagattctgtgctccggtgggcaacctgtttttcgctggggaggccgcctgcatcgatcactctgggtccgtgcatggagcttattcttcaggcattgttgctgcagaggattgccgaaggcatctgtcgacgcagctaggcatctccgaccttttccaggttgggaagattatcatgagggaggagatgactgaagtcatggtccccttccagatatccaggctgtgaaagaagaacaaagcctgcctatttagcaccgtgtttatcctgcagctgctatggttaatattgtagctgctgctctgtagtttcctaattatctcagatcctgtaccgtttcacagtttgatcgtttatgtgtattcaaataaaaacagaataattatatatcaacagaccttgttctctgaa

SEQ ID NO: 424 - DNA, 2105 bp, Setaria italica
gcgagagccgtaacaaccacccgctaccagtgtcctgtcccgcccgcctgtccgtgtgtccctcccgtcttctctctccaccgctcggctcgcgcgcgcaagcggcggggcggcgtggctacggaggcgggaagcgccggtttggggacgtcggcggcggcggcgggcctcgccggcggcgagctggtttgggtatgagaggggttatccatgcggcgccgaccaccagcgtcccctgcggattcatggacggcctcctcatcttcgtcttctacctctcgcttcctatacgtggcggccgcaaccactcgttaaccgcctctaattgttagccgccgccggccccgatcggtcggtcggcccacgtcgatctccctcgccgcacgcgctctcgtcactcacggtccacgacgccgtcgggcgcagctcggatcgggtccgcagaggatggaccagccaccgaatggcttcgccgctggaggttttttcaagcacatcgatgggcaaaactcttctcccccttctgtaattgtaatagggggcgggatttcaggcattgcagccgctcgtgctttgtcaaatgcttcatttaaggtcacgctcttagagtcgagggaccgacttggtggccgtgtgcacactgactattcttttggatgtccaattgacatgggtgcatcttggttgcatggtgtatgcaatgagaattctttggcgccattgattaggatgcttgggcttagattatatcgcacaagtggtgataactctgtattgtatgaccatgatttagagagctatgccctatttgataaaaatggtcagcaagttccccaggagatagttatgaaagttggggaaatatttgagaaaattcttaaggagacggtcaaagtaagagatgaacatgcaaacgacatggctctcattcaagccatggcaattgtgcttgacaggaatccacatctgaagctggagggcctggaatatgaagtgctgcagtggtgtatatgtagactggaggcatggtttgccacagacacggacaatatatctctgaaaaactgggatcaggaacatgtgcttactggtggacatggtctcatggtgaatggctatgatcctgtcatcaaagctctcgctcgagatcttgatgttcacctcaaccacagggtcacaaagatcattcagcgttataataaggttattgtttgtgtggaagatggcgcaagttttgttgcagatgctgccataataactgtccctctcggtgtacttaaggcaaatatcatcaagtttgaacctgagctaccaagagagaaactttcagcaatcgctgatcttggcgttggcattgagaacaagatagctctcaagttcaacactgtattttggcctaatgtagaagtactaggcagggttgccccaacgtcaaatgcatgtggttactttctcaaccttcacaaagccacaggaaatccagtcctggtatgcatggtagctggaagttttgcatacgaaatcgagaagctatcagatgaagaatctgtgaactttgttatgtcccagctcaggaaaatgctaccacaggcaactgaaccggttcagtatctggtttcacggtggggcagtgacccaaactcactcggttcctactcgtgcgatctagtagggaaaccagctgacttgtatgaaagattctgcgctcccgtgggcaacctgtttttcgctggggaggccgcctgcatcgatcactctgggtcagtgcatggagcttattcttcaggcattgccgccgcagaggactgccgaaggcgtctctcgacgcagctaggcatctctgacctgttccaggtcgggaagattgttgtgagggaggagatgaatgaagtcatggttcccttccagatatccaggctgtgaggaaaggaagttgtctatttgaacaccgtgttatcctgaagcagcagagaaggttaacacttaacaatgttagctgcttcgcagtatgtattgcgccttcaaaactgttgtactatcgcagtttgatgtttgatgtaacttcaataatatagaccttgttggaatttatggatgttaccgta

SEQ ID NO: 425 - DNA, 1615 bp, Triticum aestivum
gcatctgctcgtgccttgtcaaatgcttcatttaaggtcacattgctagagtcgcgggagcgacttggtggccgtgtgcatactgactattcttttggctgcccaattgacatgggagcatcttggttgcatggtgtttgcaatgagaattctttggcgccattgattaggcttcttgggcttagattatatcgcaccagtggtgataactctgtgctttatgaccatgatttggagagctacgcgctctttgataaagatggtcgtcaaattccccaggagatagtaaccaaagttggggaaatatttgagcagattctgaaggagacggtgaaagttagagatgaatatgcaaacgacatgcctcttgttcaagccatctcaatggtgcttgacagaaatccacatctaaagcttgagggtttgcagtatgaagtattgcagtggtgcatttgtagattggaagcatggtttgccactgacgtggataatatatctttgaaaaattgggatcaggaacatgttcttactggtggacatgggcttatggtgaatggctacgaccctgttatcaaagctctctctcgagatcttgatgtccacctgaaccacagggttaccaaaatcatccagcggtataataaagtcatcgtatgcgtggaagacgggacaagctttgttgcagatgctgctataataaccgtccctctcggtgtactcaaggcaaacatcatcaagtttgaacctgagctcccagactggaaactgtcggcaatctctgatcttggtgtcggcctcgagaacaagatagccctcagattcaacacaatattttggcccaatgtagaagtgctgggcagggttgcccaaacatcgaatgcgtgcggctactttcttaaccttcacaaagccacagggcatccagtccttgtatgcatggtggcgggcagattcgcatacgaaatggagaagctatcagacgaagaatccgtaaactttgtcatgtcacagctcaggagaatgctaccaggggccaccgagccggtccagtatctggtttcacggtggggaactgaccccaactcgctcggctcctactcgtgcgacttggtcgggaaaccggccgacctgtatgagcgattctgcgctcgtgtgggcaacctgttctttgctggggaggccgcctgcatcgaccactctgggtctgtgcacggagcgtattcgtcaggtatcgacgctgcagaggactgccgaaggcgcctctcgacgcagctcggtatctccgacctgttccaggtggggaagattgtgatgagggaggagatgactgaagtcatggtccccctccagatatccaggctgtgaaagaaaggaaggaagaacaaacctgtctactattattagcatcgtgttgttctgttaacatcgtagctgtaatttacctcctaaactgtacaacttcgcagcgtctgatctttgatgtatctctgaataacatgcggactttccctctgatttcatcaatattgctcttgttatctagtattatctgcaaagttttctcttgtgtggttccgctcatgttgaaaaccgtgcggtcaattccgcgatcatg

SEQ ID NO: 426 - DNA, 2328 bp, Panicum virgatum
taaaagccacgcctccaccgcgccacccccgcaccggcaccaccaccgcatctccaccgagagccgtgacaggcagccaaccgagaccgagcacctagctaccaggcgtcacctccctcctctctctccaccgctcggctcgcggcggggcaggcggcgtggctctgagggcggcgagcgccggtttggggacgtcggcggcggcggggggcctcgccggcggcgagctggtttgggtatgagaagggtggttacccatgcggcgccgaccaccagcgtcccctgcggattcatggacggcctcctcatcttcgtcttctacctctcgcttcctatacgtggcggccgcgcccaagcgctaagcgcctcgaattgttagccgccgccgccggccccgatcggtcggtcggcccgcatcgatcccgctcgctccgcgcacaccacgctctcatctccccgattcgagcctcctccgtccatgcgcagctcggatcgggtcagcttcgtctcgtcgcctcacaccatggaccagccaccgaatggcttcgccgccggaggttttttcaagcacattgatgggcaaaactcgtctcccccttctgtaattgtaatagggggagggatttcaggcattgcggctgctcgtgctttgtcgaatgcttcatttaaggtcacacttttagagtcgagggaccgacttggtggccgtgtgcacactgactattcttttggatgtccaattgacatgggtgcatcttggttgcacggtgtatgcaatgagaattctttggcgccattgattaggatgcttgggcttagattgtatcgcacaagtggtgataactctgtgttgtatgaccatgatttagagagttatgccctatttgataaaaatggtcagcaagttccccaggagatagttaccaaagttggggaaacatttgagaaaattcttaaggagacagtcaaagtaagagatgaacatgcaaacgacatggctcttattcaagctatggcaatagtgtttgacaggaatccacatctgaagctggagggcctagaatatgaagtgctgcagtggtgtatatgtagactggaggcatggtttgccacagacacggataatatatctctgaagaactgggatcaggaacatgtgcttactggtggccatggtcttatggtgaatggctatgatcctgttatcaaagctctcgctcgagatcttgatattcacctcaaccacagggtcacaaagatcatacagcggtataataaggttattgtttgtgtggaagatggggcaagttttgttgcagatgctgccataataactgtccctctcggggtacttaaggcaaatattatcaagtttgaacctgagctaccaaatgagaaactttcagcaattgcggatcttggcgttggcattgagaacaagatagctctcaagttcaacactgtattttggcccaatgtagaagtactaggtagggttgccccaacatctaatgcctgtggctactttctcaaccttcacaaagccacaggaaatccagttctggtttgcatggtagctggaagatttgcatacaaaatcgagaagctatcagatgaggaatctgtaaactttgttatgtcccagctcaggaaaatgctaccagaggcaactgaaccggttcagtatctggtttcacggtggggcagtgacccaaactcactcggttcctactcgtgcgacctagtagggaaaccatctgacttgtatgaaagattctgcgctccggtggccaacctgttttttgctggggaggccgcctgcatcgaccactctgggtcggtgcatggagcttattcttcaggcattgttgctgcagaggactgccgaaggcgtctctcgacgcagctaggcatctctgacctgttccaggtcgggaagattgttatgagggaggagatgactgaagtcatggtccccttccagatatccaggctgtaagagaagggtgttatctatttacttgtattatcctgaagcagcagaggggatgaacacttaacaatgtagctgcttcgccgaatgtgtaacattccaaactgttgtgttatcgcagcttgttgtttgatgtaagttcaaaataatgcaagaccttgctgttggaatttatggatgttgctgtggttcatcgacgacagcagtattctgctcgacactgatctcgttctgaattttattgatgaattagtgattgtatagtaggtttatgtggaggttgttggttgctgaatcatctgggaatatgggttgaatctgctgaaatcatgcta

SEQ ID NO: 427 - DNA, 1892 bp, Saccharum officinarum
gaccactcgttaatctctaattgttagccgccgccggtcggcacgccatcggtcggcccgcccccccacgcaccccgaaactctgcgctctcgatcctctcgtccacggtctacgcacgccgtcgcaagcctcaaaaacaggatcaggatcgatggaccagccaccgaatggattcgccgccggaggttttttcacacacattgatgggcaaaaccgttctcccccttctgtaattgtaattgggggagggatttcaggcatcgcagccgcacgtgctttgtcgaatgcttcatttaaggtcacactcttggagtcgagggaccgacttggtggccgtgtgcacactgactattcttttggttgcccaattgacatgggagcatcatggttgcatggtgtttgcaatgagaattctttggcgccattgattaggatgcttgggcttagattatatcgcacaagcggtgataactctgttctgtatgaccatgatttggaaagttatgctctatttgataagcatggtcagcaagttccccaggagatagttagcaaagttggggagacatttgagaaaattcttaaggagactgtcaaagtaagagatgaacatgcaaatgacatgcctcttattcaagccatggcaattgtgcttgacaggaatccacatatgaaactggagggcctggaatatgaagtactgcagtggtgtatatgtagactggaggcatggttcgctactgacatggacaatatatctctgaaaaattgggatcaggaacatgtgcttaccggtggacatggtctgatggttaatggctatgatcctgtcatcaaagctctcgctcaaggtcttgatattcacctcaaccacagggtcacaaagatcatacagcgttataataaggttattgtctgtgtggaagatggggctagttttgttgcagatgctgctataataaccgtccctctcggggtactcaaggcaaatatcatcaagtttgaacctgagttaccaagagagaagctttcagcaattgctgatcttggcgtcggcatcgagaacaagatagctcttaagttcaacactgtattttggcccaacgttgaagtgctaggtaggatcgccccaacgtcaaatgcctgtggctactttctcaaccttcacaaagccacaggaaacccagtcctggtatgcatggtagccggaagattcgcatacgagatcgagaagctgtcggatgaagaatccgtgaactttgtcatgtcccagctcaggaaaatgctaccgcaggcaactgaaccggttcaatatttggtttcacgatggggcagtgacccaaactcacttggctcctactcgtgcgacctggtgggaaaaccagcagacctgtatgaaagattctgcgctccggtgggcaacctgtttttcgctggggaggccgcctgcatcgaccactccgggtcggtgcacggagcttattcgtcaggcattgccgccgcagaggattgccgaaggcgtctctcaacgcagctaggcatctccgacctgttccaggtcggcaagattattgtgagggaggagatgactgaggtcatggttcccttccagatatccaggctgtaagagagaaacctattcactgaaacaccgtgttgtgttgtgtcatgtcatcctgaacctgaagcggcagagaaggttaacggtacaatatagctgcttcgattcgcgacatatattgccttcaaaactgttgtattgtcgcatgcagtttgttgtttgatgtaactctatctaaaataatgcaagatttccctaataataataataataataatgcaagaccttgttgttgtaaaaaaaaaacccacgcgtccgcccacgcgtccg

SEQ ID NO: 428 - DNA, 1723 bp, Echinochloa colona
cgccgcacgcgctctcgtctctctccgattcgagcctccccgtccacgacgccgtcggacgcgcctcggatcggaccagcttcctctcgccgcctcacaggatggaccagccaccgaatggcttcgccgccggaggttttttcaagcacattgacgggcaaaactcttctcccccttctgtaattgtaataggtggagggatttcaggcatcgcagctgcccgtgctttgtcgaatgcttcatttaaggtcacactcttagagtcgagggaccgacttggtggccgtgtgcacactgactattcttttggatgcccaattgacatgggtgcatcttggctgcatggtgtatgcaatgagaattctttggcgccattgattaggatgcttggacttagattatatcgcacaagtggtgataactctgtgctgtatgaccatgatttagagagttatgccctatttgataaaaatggtcagcaagttccccaggagatagttaccaaagttggggaaacatttgagaaaattcttaaggagacggtcaaagtaagagatgaacatgcaaacgacatggctcttattcaagccatggcaattgtgcttgacaggaatccacacctgaagctgtatggcttggaatacgaagtgctgcagtggtgtatatgtagactggaggcatggttcgccacagacacggacaatatctctctgaaaaactgggatcaggaacatgtgcttactggtggacatggtcttatggtgaatggctatgatcctgtcatcaaagctctcgctcgagatcttgatattcacctcaaccacagggtcacaaagatcattcagcgttataacaaggttattgtttgtgtggaagatggggcaagttttgttgcagatgctgccataataactgtccctctcggggtacttaaggcaaatattatcaagtttgaacctgagctaccaaatgagaaactttcagcgattgccgatcttggcattggcattgagaacaaaatagctctaaagttcaacactgtattttggcctaatgtagaagtactaggtagggttgccccaaggtcagatgcctgtggttactttctcaaccttcacaaagccacaggaaacccagtgctggtatgcatggtagctggaagatttgcatacgaaatcgagaagctgtcagatgaagaatctgtgaacttcgttatgtcccagctcaggaaaatgctaccagaggcaactgaaccggttcagtatttggtttcacggtggggcagtgacccaaattcactcggttcctactcatgtgacctagtggggaaaccagctgacttgtatgaaagattctgtgctccggtgggcaacctgtttttcgctggggaggccgcctgcatcgaccactctgggtcggtgcatggagcttactcttcaggcattgctgctgcagaggactgccgaaggcgtctctcaacgcagctaggcatctccgacctgttccatgttggaaaggttgttatgagggaggagatggctgaagtcatggttcccttccagatatccaggctgtaagaaaagaaggaacctattcgcttaacactcaacaatatagctgcttgcctgctttgctgtatgtattaccttcaaaattgttgtattgtcgctgtttgttgtttgatgtataacttcaaaataatgtaagaccttgtcagaattta

SEQ ID NO: 429 - DNA, 2144 bp, Sorghum bicolor
aggcaggcacacagagcgatcgagcgagcccgagccgtgccaaacaaggaccacccacccacccactaccagccccgcttcctctctgtctctccaccgctcgcgcgcggcgggcggcgtggctccgagggcgggaagcgcgggctcggcggggcgactcgccggcggcgacctgcaggtttgggtatgagaggggtcacccacgcggcgcccaccggaagcgccccctgcccactccgcggacgactcgtcatggacggcctcctcatcttcgtcttctacctctcgctgcctatacgtggcggccgcgaccactcgttaatctctaattgttagccgccgcccggtcggcacgccatcggtcggcccgcacccccgaagctctgcgctctcgttcgtctcgtgtctacggtctacgcacgccgccaccaccgccagcctcacacacaggatcaggatcgatggaccagccaccgaatggattcgccgccggaggatttttcacgcacattgatgggcaaaaccgctctcccccttctgtaattgtaatcgggggagggatttcaggcatcgcagccgcacgtgctttgtccaatgcttcatttaaggtcacactcttggagtcgagggaccgagttggtggccgtgtgcacactgactattcttttggttgccccattgacatgggagcttcatggttgcatggtgtttgcaacgagaattctttggcgccattgattaggatgcttgggcttagattatatcgcacaagcggtgataactctgttctgtatgaccatgatttggaaagttatgctctatttgataagcatggtcagcaagttccccaggagatagttagcaaagttggagagacatttgagaaaattcttaaggagactgtcaaagtaagagatgaacatgcaaatgacatgcctcttattcaagccatggcaattgtgcttaacaggaatccacatatgaagttggagggcctggaatatgaggtactgcagtggtgtatatgtagactggaagcatggttcgctactgacatggacaatatatctctgaagaattgggatcaggaacatgtgcttaccggtggacatggtcttatggtgaatggctatgatcctgtcatcaaagctctagctcaaggtcttgacattcatctcaaccacagggtcacaaagatcatacaacgttataataaggttattgtttgtgtggaagatggggcaagtttcgttgcagatgctgctataataacggtccctctcggggtactaaaggcaaatatcatcaagtttgaacctgagctaccaagagaaaagctttcagcaatcgctgatcttggcgttggcatcgaaaacaagatagcccttaagttcaacactgtattttggcccaacgttgaagtgctaggtaggatcgccccaacgtcaaatgcctgtggctactttctcaaccttcacaaagccacaggaaacccagtcctggtatgcatggtagctggaagattcgcatacgagatcgagaagctgtctgatgaagaatccgtcaactttgttatgtcccagctcaggaaaatgctaccgcaggcaactgaaccggttcagtatttggtttcacgttggggcagtgacccaaactcacttggctcctactcgtgcgacctggtggggaaaccggctgacctgtatgaaagattctgtgctccggttggcaacctgttcttcgctggggaggccgcctgcattgaccactccgggtcggtgcatggagcttattcgtcaggcattgccgctgcagaggactgccgaaggcgtctgtcgacgcagctaggcatctccgacctgttccaggtcgcgaaggttgtcatgagggaggagatgaatgaagtcatggttccctttcagatatcgaggctgtaagagagaacaccaacaccgtgttgtgtagtgatgattgtgccatcctgaagctgacgcggcagacaaggttaacgcggaacaatatagctgccttcaattcacggcatatattgccttcaaaactgttgtattgtcgcatgcagtttgttgttcgacgtaactctatctaaaataatgtaagacctttgttgttggaagattctatag

SEQ ID NO: 430 - DNA, 1820 bp, Secale cereale
aactcagccagccccgtctcggcaaagcagcgacccaaccgtgcatctctctctcccacacgcacgcaccctcgcgcgctctcctcctcctcctcaccaccaccacctcacccgtccgggctcggcggcgtggctgtggctccgcgcgaagggatcgccggtgcgggcgccaccagtgacgggccgttttgggtatgagaggggacctccgcgaggcgccgagcaccaccgccgcagcagccagcgtcgacgtcggcgggggccccatggacggcctcctcgtcttcgtcttctacctctcgcttcctatacgtggcggccgcgaccactctaattgctagcctcccgccggcccggatcgatctcgccacactcttcaatctctctctcactctgttccgattcgacccgaccctccccgccgccgccgtcgccttcgccgtcgcgctgcagctgggctcgtctgagcgaggatggacccgccgccgaatggcttcgccgccggaggtcttttcgttcagcacatcgataggcaaaatgcttctcccccttctgtaattgtgattggtggaggaatttcaggcattgcatctgctcatgcattgtcaaatgcttcatttaaggtcacattgttagagtcgcgggagcgacttggtggccgtgtgcatactgactattcttttggctgcccaattgacatgggagcatcttggttgcatggtgtttgcaatgagaattctttggcgccattgattaggcttcttgggcttagattatatcgcaccagtggtgataactctgtgctttatgaccatgatttggagagctacgcgctctttgataaagatggccgtcaaattccccaggagatagtaaccaaagttggggaaatatttgagcagattctgaaggagacggtgaaagttagagatgaatatgcaaacgacatgcctcttgttcaagccatctcaatggtgcttggcagaaatccacatctaaagcttgagggtttgcaatatgaagtattgcagtggtgcatttgtagattggaagcatggtttgccactgacgtggataatatatctttgaaaaactgggatcaggaacatgttcttactggtggacatgggcttatggtgaatggctacgaccctgttatcaaagctctctctcgagatcttgatgtccacctgaaccacagggttaccaaaatcatccagcggtataataaagtcatcgtatgcgtggaagacgggacaagctttgttgcagatgctgctataataactgtccctcttggtgtactcaaggcgaacatcatcaagtttgaacctgagctccccgactggaaactgtcggcaatctctgatcttggtgtcggcctcgagaacaagatagccctccggttcaacactgtattctggcccaatgtagaggtactgggcagggttgcccaaacatcgaatgcgtgcggctactttcttaaccttcacaaagccacagggcatccagtgctagtatgcatggtggcgggcagattcgcatacgaaatggagaagctatcagacgaagaatccgtaaactttgtcatgtcacagctcaggagaatgctaccaggggccaccgagccggtccagtatctggtttcacggtggggaactgacccaaactcgctcggctcctactcgtgtgacttggttgggaaaccagctgacttgtatgaaagattctgcgctccagtgggcaatctgttcttcgccggggaggccgcttgcatcgaccactctggatctgtgcacggagcatattcatcaggtatc

SEQ ID NO: 431 - DNA, 1632 bp, Panicum virgatum
tctataaaattgatggttctcatgcaatggatacctttcacgtttgccatcaggttttttcaagcacattgatgggcaaaactcgtctcccccttctgtaattgtaatagggggagggatttcaggcattgcagccgctcgtgctttgtcgaatgcttcatttaaggtcacacttttagagtcgagggaccgacttggtggccgtgtgcacactgactattcttttggatgtccaattgacatgggcgcatcttggttgcacggtgtatgcaatgagaattctttggcgccattgattaggatgcttgggcttagattgtatcgcacaagcggtgataactctgtgttgtatgaccatgatttagagagttatgccctatttgataaaaatggtcagcaagttccccaggagatagttaccaaagttggggaaacatttgagaaaattctgaaggagacagtcaaagtaagagatgaacatgcaaacgacatggctcttattcaagctatggcaatagtgtttgacaggaatccacatctgaagctggagggcctggaatatgaagtgctgcagtggtgtatatgtagactggaggcatggtttgccacagacacggataatatatctctgaagaactgggatcaggaacatgtgcttactggtggccatggtcttatggtgaatggctatgatcctgtcatcaaagctctcgctcgagatcttgatatccacctcaaccacagggtcacaaagatcatccagcgttataataaggttattgtttgtgtggaagatggggctagttttgttgcagatgctgccataataactgtccctctcggggtacttaaggcaaatattatcaagtttgaacctgagctaccaaatgagaaactttcagcaattgccgatcttggcgttggcattgagaacaagatagctctcaagttcaacactgtattttggcccaatgtagaggtactaggtcgggttgccccagcatctaatgcctgcggttactttctcaaccttcacaaagccacaggaaatccagttctggtatgcatggtagctggaagatttgcatacgaaatcgagaagctatcggatgaagaatctgtaaaatttgttatgtcccagctcaggaaaatgctaccagaggcaactgaaccggtccagtatctggtttcacggtggggcagtgacccaaactcactcggttcctactcgtgcgacctagtagggaaaccagctgacttgtatgaaagattctgcgctccggtgggcagcctgtttttcgctggggaggccgcctgcatcgaccactctggatcggtgcatggagcttattcttcaggcattgctgctgcagaggactgccgaaggcgtctctcgacacagctaggcatctctgacctgttccaggtcgggaagattgttatgagggaggagatgactgaagtcatggtccccttccagatatccaggctgtaagagtaagggtgttatctattcacttgtggtctgtgttatcctgaagcagcagagagggtgaacacttagcaaatcgtagctgcttcgccgtatgtcgtacttcaaaactgttgtattatcgcagcttttgtgtttga

SEQ ID NO: 432 - DNA, 2045 bp, Zea mays
accgcagagagaggagcgagagcgagcgacccccccgagccgtgccaaccaagaaccatccacccaccaccaccaccccggccgcttccttgtccctgcccctccgttggtctcctttgcccatctcatcctctctctctctctccctctctctctctctggcggtcggcgtggctccgggggcgcgaagcgcgggctcggcggggcgactcgccggcggcgacctgcaggtttgggtatgagaggggtcacccacgcggcgcccaccacaagcgccccccgcccccgcggacgcctcatggacggcctcctcatcttcgtcttctacctctcgctgcccacccgtgccggccgcgaccactcgtcaatcgccgcctctaattgttagccgccgccggcacgccattgctcggcccgcctcccgagaagctcgatctgcggcctagccagccagcctcacgcgggatcaggatcgatggaccagccaccgaatggattcgccgccggaggttttttcacgcacattgatgggcaaaaccgttctcccccttctgtaattgtcattgggggagggatttcaggcatcgcagctgcacgtgctttgtcgactgcttcatttaaggtcacactcttggagtccagggaccgacctggtggccgtgtgcacactgactattctttcggttgcccaattgacatgggagcatcatggttgcatggtgtttgcaatgagaattctttggcaccactgattaggatgcttgggcttaggttatatcgcacaagcggtgataactctgttctgtatgaccatgatttggaaagttatgctctttttgataagcatggtcagcaagttccccaggagatagtaagcaaagttggagagacatttgagagaattcttaaggagactgtcatagtaagagatgagcatgcaaatgacatgcctctttttcaagccatagcgatcgtgcttgacaggaatccgcatatgaagctgcagggcctggaatatgaagtactgcagtggtgcatatgtaggctggaggcatggttcgctactgacatggacaatatatctctgaaaacttgggatcaggaacatgtgcttaccggtggacatggtcttatggtgaatggctacgaccctgtcatcagagctctcgctcaaggtctcgatattcacctcaaccacagggtcacaaagatcatacaacgctataacaaggttattgtctgtgtggaagatggggcgagttttgtcgcagacgctgctatagtaaccgtccctctcggggtactcaaggcaaacatcatcaagtttgagcctgagctaccgaaagagaagctctcggcaatcgccgaccttggcgtcggtatcgagaacaagatagctctcaagttcgacactgtgttttggcccgacgttgaagtgataggtagggtggccccgacgtcaaacgcctgtggctactttctcaaccttaacaaagccacaggaaacccggtcctggtgtgcatggtggccggaaggttcgcgtacgagatcgagaagctgtcggacgaagagtccgtgaacttcgtcatgtcccagctcaggaacatgctgccgcaggcaactgacccggttcagtatctggtctcgcgctggggtagtgaccccaactcacttggctcctactcgtgcgacctggtggggaaaccagctgacctgtatgaaaggttctgcgctccggtgggcagcctgttcttcgccggggaggccgcctgcattgaccactccggatcggtgcacggagcttactcgtcaggcatcgctgccgcagaggactgccgaaggcgtctgtcggcgcagctaggcatctcggccggcctgttccaggtcgggaaggctgccatgagggaggagatgacggctgaagccatggtccccttccagatatccaggttgtaagagagaatctattcaacaccgtctttgtgtcaccggtttgttgcttgatgtaattgtaaaatggtgtaagaccttgtttgttggaata

SEQ ID NO: 433 - DNA, 1730 bp, Pennisetum glaucum
cctctcccccttccgtaattgtaatagggggtgggatttcaggcattgcagccgctcgtgctttgtcaaatgcttcattcaaggtcacactcttagagtcgagggaccgacttggtggtcgtgtgcacactgactattcttttggatgtccaattgacatgggtgcatcttggttgcatggtgtgtgcaatgagaattctttggcgccattgattaggatgcttgggcttaggttatatcgcacaagtggtgataactctattttgtatgaccatgatttagagagctatgccctatttgataaaaatggtcagcaagttccccaggagatagttacaaaagttggggaaatatttgagagaattctcaaagagacggccaaagtaagagatgaacatgcaaacgacatggctcttattcaagccatggcaattgtgcttgacaggaatccacatctgaagctggaggggctggaatatgaagtgctgcagtggtgtatatgtaggctggaggcatggtttgccacagacacggacaatatatctctgaaaaattgggatcaggaacatgtgcttactggtggacatggtcttatggtgaatggctatgatcctgtcatcaaagctctcgctcgagatcttgatattcatctcaaccacagggtcacaaagatcattcagcgttataataaggttattgtttgtgtggaagatggcgcaagtttcgttgcagatgctgccataataactgtccctctcggtgtacttaaggcaaatatcatcaagtttgaacctgagctaccaagagagaaactttcagcaatcgcagatcttggtgttggcattgagaacaagatagctctcaagttcaacactgtattttggcctaatgtagaagtactaggcagggttgccccaatgtcaaatgcatgcggttactttctcaaccttcacaaagccacaggaaatccagtcctggtatgcatggtagctggaagtttcgcatacgaaatcgagaagctatcagatgaagaatcagtgaactttgttatgtcccagctcaggaaaatgctaccgctggcgactgaaccggttcagtatttggtttcacggtggggcagcgacccgaactcactcggttcctactcgtgcgacctagtagggaaaccagctgacttgtatgaaagattctgcgctccggtgggcaacctttttttcgctggggaggccgcctgcatcgatcactctgggtcagtgcatggagcttattcttcaggcattgccgctgcagaggactgccgaaggcgtctctcgacgcagctaggcatctctgacctgttccaggtcgggaagattgttgtgagggaggagatggctgaagccatggttcccttccagatatccaggctgtaataaaaggaagtcatctatttgaacaccgtgctatcccgaaggagcggagaaggtcaattatatcactaaacaatgtagctgccccgcagtatgtattgcctccaaaactgtttgcattatcacagtttgatgtaacttcaaacagtatggaccctgtgttagaatttatggatgctatgctaccgtactcttctgtttgattcagctgccaatgcttgatttgggaaactggtgactcagctgttcaaccatctcgttctgaattttattgaatgacgaatttggcgattgtgtggtgatgtttcttaaaaaaaaaaa

SEQ ID NO: 434 - DNA, 1516 bp, Panicum virgatum
catatgagcagccagcctttctctcgtccacttcctgccaacagaggggtcctcttctccaaagaaaccaaacgccacagcaaacagttgctggcacagagatcttcaatggcggacttctcatcgcaccactctctcctcctcaagatgcctgcagctttgaccaatggccactcccacaacctctcaagcctcttgttctacggccaaaaccatggccaaggagcaacggcgaatgcaaatgcagcgtctggaacagcagcggccatggcggaggacgcttcgcttgagagctcctctgcagtggttgacacctcccctcagggaagtgcatctccaatggacaggaagaggaaggccacagaggacagtgccacgttgagctctgctcactccaaggattgcaatcaggagggcaagagcaagagagggaagaggtccaacaaggaggctgaggagaagagcaccactgatgatgaggcccccaaggggtacatccatgtgagggcaaggaggggtcaggcaacagacagccacagccttgcagaaagggtgaggagagagaggatcagtgagaggatgaggatgcttcaagcattggtccctggctgtgacaaggttactggaaaggccctgattttggatgagatcatcaattatgtgcagtccttgcagaaccaagttgagttcctttccatgaggattgcctccatgagcccagttttgtatgggtttggactggacagtgatggccttcatgaccatgcacaaaagatgggaggcatgttccaagaagcccttgcaatgcctggtccagttctgagccaagctagcccagctccatctcaagccatcatagagactacttccaccacacccttctcactccagggccagggtgccatctctttctctcaggacaatggcagcacttacctgatgcaacaagcagtgggggagccaacaaggcaggaactgctcaaccagttggtgttcaacaacatgtgctctttccagtaggggaagagtgtgagagagggggggcccacattgacaataggaggaaataatgctgcaagatttgataggcgcaccagatgagtttgagatgttggatctagtccatccccttgtcttgatttggagagagcagcaagtagagtctgctgttcacacattttcagagactttgtagtatttctagctcctttattaggcattgtccatgaagattttctcagcggctgcatctgtcatcatcgccattgtagtcgaccttgagcaatcggttgttaatacataagagagctatttttgtactctgaactgtgtctgtgattaacagtacatccagtcccattttttttttaaaaaaaacaaaccttatattgtaaaaaacaaaccttacattgttttctttaaaaccaagaatctttacaaagtgaggatgggagttcctacagttgtagtccaatcattccaaatccaaagagtgatggacgattagtttgttccc

SEQ ID NO: 435 - DNA, 1097 bp, Pennisetum glaucum
ggccactcccccaacctctcaagcctcttgttctacggccaaaacaaccatggacaaggagcaccggctaatgccaacgcggcatcaggaacggcagcagccatggcggaggacgcttcgcttgagacctcatctgcagttcttgacacctctccccagggcagttcgtctccaatggacaggaagaggaaggccaccgaggacagtgctacacttagctctgctcactccaaggattgcaagcaggagggcaggagcaagagggggaagaagcctcacaaggaggctgaggagaagagcaacactgatgatgaggcccccaaggggtccatccatgtgagggcaaggaggggtcaggcaacagacagccacagccttgcagagagggtgaggagagagaggatcagtgagcggatgagaatgctgcaagcactggtccctggttgtgacaaggttactggaaaggccttgattttagatgagatcatcaattacgtgcagtccttgcagaaccaagttgagttcctttccatgaggattgcctccatgagcccagttttgtatgggtttggactggacagtgatggccttcatgaacatgctcaaaagatgggaggcatgctccaagaagcccttgcgatgcctggtccagtcctgagccaagctagcccaactccatctcaaaccatcatggacaccacctcctccacaccctattcactgcaaggccatggtgccatctctttctctcaggacaatggcagcaattacctgatgcaacaatcagtgggggaaccaattacaaggcaggagctgctcaaccagttggtcttcaacaacatgtgctctttccagtaggagaagaatgagagagagagtgagagagagagagagaaggggccccacattgacaataggaggaaataatgctgtaggagcaccagatgagtttgagatgttggatctagtccatccccttgtctggatttggagtgagcagcaagtagagtctgctgtttgcacgttttcagagacctttgtaatatttgtagctcctttattagggcattgtccatgaggattttctaagcggctgc

SEQ ID NO: 436 - DNA, 1445 bp, Sorghum bicolor
cactatgagcagcggcaccaatgagtagtagccaaccttgctctccatttcctgccaagtgccaacaagtccctctcctcctcctccaaagagactaaaccacaagatcgagagaatagttgcagggaggcacagggatcttctttcaatggcggacttctcacagaacgactcgctcctcctcaagatgcctagccactccccaaacttctcaagcctcctgttctacggccacaaccatggcgaagcagcagctcctgcaaatgcaaatgcaatggtagaagacgcctcacttgagagctcttctgctgtggttgacacctccccacaggacagtgcatctccaatggagaggaagaggaaggctacagaagacagtgctacactgagctctgctcaatccaaggattgcaagcagcaggagagcaagagcaagagggggaagaggcccaacaaggagactgaggagaagagcaccactgaagatgaggccaccaaggggtacatccatgtgagggcaaggaggggtcaggcaacagacagccacagccttgcagagagggtgaggagagagaggatcagtgagaggatgaggatgctgcaagcactggtccctggttgtgacaaggttactggaaaggccctgattttggatgagattatcaattatgtgcagtccctgcagaaccaagttgagttcctttccatgaggattgcctccatgagcccagtgctatatgggtttggactggacagtgatggcctccatgatcacgcacaaaagatgggaggcatgttccaagaagcccttgcaatgccaggtccagtgctgagccaagctagcccagctccatctcaagccatcatggacaccacctccaccacaccctactcactgcaaggccagggttccatctctttctctcaggaaaatggcagcacttacctgatgcagcaagcagtgggggagccaacaaggcaggagctgctcaaccagttggtgttcaacaacatgtgctctttccagtaggggaagagtatttgtgtgagaggaagcgagaaagggaccccacattgacaataggaggaaataatgctgcaagatttggtaggagcaccagatgagtttgagatgttggatctagtccatccccttgtctggattggagagagcagcaagtagagcctgctgtttatttacacattttcagtgactttgtaatatttgtaactcctgtattaggcattgtccatgaggattattttctcagcggctgcaccgtcatcgtcaccagctcaccgttgtagtctttgagcaatcggttgttaatataagagagctattttgttctttgccaacagtgattaaccgcattcagtccaactcccagcatctacaaatcattaaattgttttctttaaaccaagaatcgaacaaagtgaga

SEQ ID NO: 437 - DNA, 457 bp, Eragrostis curvula
cgggtcttgtgtgacgccacatccctccttcccacgagcgctagggtttgcttgaggcgcggcggcggcgaaggaaggcggcgatggggcactccaacgtgtggaactcccaccccaagaactacgggcccggctcccgcgtgtgccgtgtctgcgcgaaccctcatggactgatcaggaagtatgggctgatgtgctgccgccagtgcttccgcagcaacgccaaggacatcggcttcatcaagtaccgctgaagtctgctgggctacatgccagtgatgggaacctatctggggtgaagaaatggatcatttgaaagaagatgttatttgaattccagaaatatagataattagctgagagcctggtagtgaactctggataatgtacatgtaggataactgaattatctggatgtaaaccatgagacagtagccatattggaacaaatgcgcgc

SEQ ID NO: 438 - DNA, 431 bp, Eragrostis curvula
gacatgtgtgcaggaagcagagagggtaggttacaggcgagactcctccttcgccgccgccgccaccatgggacactccaacgtgtggaactcgcaccccaagaactacggccctggatccagggtttgccgtgtgtgcgccaacccccatggcttgatccggaagtacgggctcatgtgctgcaggcagtgcttccgcagcaacgccaaggacatcggcttcatcaagtaccgctgaagcttgagttcgaggaacagaaataggattatggattggaaacgttacattttcctggatctgtttttggcttctttccaaaaatgaaaccgtgtaatgaattattgtatgttttggacctatttagctgatgagtgtacttccgtgctctagcttaagcatgtcgaacaattgtatcaaatgacaattgccc

SEQ ID NO: 439 - DNA, 475 bp, Pennisetum glaucum
ccgtctctcttcctcacgagcgctagggtttcctgcggcggcggcggaaggaggcgacgatggggcactcgaacgtgtggaactcgcaccccaagaactacgggcccggatcccgcgtctgccgggtctgtgccaaccctcatggactgatcaggaagtatgggctgatgtgctgcaggcagtgcttccgcagcaacgccaaggacattggcttcatcaagtaccgctgaagtgctatgtgaactccatctgggtgtgggatggggaccatgtgaggcaaggcgaggcgataatttgaattccagtaatttagatgttttgttcagaactaaattaagtctgtctttgaacttagccatgtctgtcatgtttgaaccatgagttacctgcatatgtgcagaatttgagctaccttgtttgacagccattttatctgtgttttgctgagcatctgcttggctggttatttgccaaa

SEQ ID NO: 440 - DNA, 554 bp, Pennisetum glaucum
tgtcgccctcccgcgccgccgccgagaagaagaggaggaggaaggagaaggcggagatgggccactccaacgtctggaactcgcaccccaagaactacgggcccggctcccgcgtctgccgggtctgtgccaaccctcatggactgatcaggaagtatgggctcatgtgctgcaggcagtgcttccgcagcaatgccaaggacattggcttcatcaagtaccgctgaagatattgccttgctgctgttgtcgaaaacttcacctgcatcaaagaagaaagtgatccttcagtagaaggctcagtttatgtgttttagctttttgttcagacatgagaactgatgtgctagctacttgttaaagttttgattggtgctgaaactaattatataattaaaagattgaagtatttggcatgtgaggtctctatcttgcttgtgttgctgccctctttagttattgtatacttgcttcatgtatgaggtttgtactgatgaaatgtcgaaactggaatgacaaaactactgttgattcttatatttgtatcagtggtg

SEQ ID NO: 441 - DNA, 548 bp, Pennisetum glaucum
gaaggttagggtttacggtttaccagtcgagacctcctcctccgccgccgccgccgccatgggacactccaacgtctggaactcgcaccccaagaactacggccccggatccagggtttgccgcgtgtgcgccaacccccacggcctgatccggaagtacgggctcatgtgctgcaggcagtgcttccgcagcaacgctaaggacatcggcttcatcaagtaccgctgaaaacttaaggcggtccacagcattaccagaatgggagaaccgatgaggagcatcttcttggaaccgtcctttgcttagtactatcataatcataccatgtaatgaattgtttgggtttaaaatggaccaagtcattgtattctggctggcagtctactgcatgctagtagttgagaatgtaaaacatcaatgatcagactaatctcagtgttattgtgccattactgttgctatcgtccctgcacaggagttcctcatcgaaaggttcagaccattttatttgctgtgttctctgcactgttactgtgctttgatttca

SEQ ID NO: 442 - DNA, 609 bp, Pennisetum glaucum
gagtgccccatctccgcctgctccttcttccgcctcctcacctctcacgtccccccgcgccgccgccgccgacgagaaggaagaggaggaggaagaaggagcaggcggagatgggccactccaacgtctggaactcgcaccccaagaactacgggcccggctcccgcgtctgccgggtctgtgccaaccctcatggactgatcaggaagtatgggctcatgtgctgcaggcagtgcttccgcagcaatgccaaggacattggcttcatcaagtaccgctgaagatattgccttgctgctgttgtcgaaaacttcacctgcataaagaagaaagtgatccttcagtagaaggctcagtttatgtgttttagctttttattcagacatgagaactgatgtgctagctacttgttaaagttttgattggtgctgtgttcttcaactaattatataattaaaagattgaagtatttggcatgtgaggtctctatcttgcttgtgttgatgccctctttagttatgtatgaggtttgtactgatgaaatgtcgaaactggaatgacagaactactgttgattcttatacaaatatcagtggtggtacactttgg

SEQ ID NO: 443 - DNA, 781 bp, Saccharum officinarum
gtcgacccacgcgtccgcatctctctgttcctcgcgcgccgccgccgtgaaggaaggaaggaggagcaaagagcgcgacgcgatgggccactccaacgtctggaactcccaccctaagaactacggccctggctcccgcgtctgccgggtctgtgcgaaccctcatggtctcatcaggaagtatgggctgatgtgctgcaggcagtgcttccgcagcaacgccaaggacattggctttatcaagtaccgttgaataatccactctgctgctgtggggaacttcctgcatcaaagaaatgggtccttcattagaaggcctaaactatgtgctttagctttttgttcagaacttgagactgatgtgctagtaaacttgacttgttaaagttttgatgggtaccatgtgcctgttggaccagctataatcagaagattgaaatattttgtcacgcgtgatactttgtgctcttatcttgctggtatttggtgcttttcatgtgttattggtaaaaacaaaaatataatatatatatattattttacttatttatattttttaattttttatttttattttatttatacatttttttttctttactattttattctttttattaattgttatattattatactattttttttattaattagttgtattttttttttagtttagatgggttaaatagttttgtatttgatttcattttgttatgatataataatagttatgaatatatggtgatttaggaatagtgaatatgaatataggatatga

SEQ ID NO: 444 - DNA, 512 bp, Saccharum officinarum
actccatctctctcctcctcacgagcgcttgcggcggcggcggcggcagcggaaggaagcggcgatggggcactccaacgtgtggaactcgcaccccaagaactacgggcccggatcccgcgtctgccgggtctgcgcgaaccctcatggactgatcaggaagtacgggctgatgtgctgcaggcagtgcttccgcagcaatgccaaggacattggcttcatcaagtaccgctgaaatcagctgggctatgagttggcatatggaccctatggtagatcaaggccacaattttaattccagtaatttagatgttttgttcagaactctgctagtaaagtctgccatgtttgtcatattgaacatgagttacctgcgttgtgcttaagctatcttgtgtcctaccatcatatttgtcacccgttgggtatcaggaactctgtaatgtcgaatggttaaggtgccataataatccttgtatgtgcaacctggacggatcaatgtttccatttgt

SEQ ID NO: 445 - DNA, 428 bp, Saccharum officinarum
gacaaggttagggtttactcgtgaggcctcctctgccgccgccgccgccatgggacactccaacgtgtggaactcgcaccccaagaactacggccctggatccagggtttgccgtgtgtgcgctaacccccatggcctgatccggaagtacgggctcatgtgctgcaggcagtgcttccgcagcaacgccaaggacatcggcttcatcaagtaccgctgagctccaaagcatgacaagaatggaggcatggatggggaacctaaaatacagattgtaatcgtattatcataataccgtgtaatgaattatttggctttgattgaagtggaccaagttggtgtattctggatgccactcttattgcttcctgctagttgaacatgtcgaaccactatgatcagacaatacagtgtcattgttatcactc

SEQ ID NO: 446 - DNA, 520 bp, Cenchrus ciliaris
cgatggggcactccaacgtgtggaactcgcaccccaagaactacgggcccggatcccgcgtctgccgggtctgtgccaaccctcatggactgatcaggaagtatgggctgatgtgctgcaggcagtgcttccgcagcaatgccaaggacattggcttcatcaagtaccgctgaagatattgccttgctgctgttgtcgaaaacttcacctgcatcaaagaagaaagtgatccttcagtagaaggctcagtttatgtgttttagctttttgttcagacatgagaactgatgtgctagctacttgttaaagttttgattggtgctgaaactaattatataattaaaagattgaagtatttggcatgtgaggtctctatcttgcttgtgttgctgccctctttagttattgtatacttgcttcatgtatgaggtttgtactgatgaaatgtcgaaactggaatgacaaaactactgttgattcttatatttgtatcagtggtggtacactttggttcggtgac

SEQ ID NO: 447 - DNA, 448 bp, Cenchrus ciliaris
atgggacactccaacgtctggaactcgcaccccaagaactacggccccggatccagggtttgccgcgtgtgcgccaacccccacggcctgatccggaagtacgggctcatgtgctgtaggcagtgcttccgcagcaacgccaaggacatcggcttcatcaagtaccgcttaaaacttatggcggtccaaagcgtcaccagaatgggagcaccgataaggagcatcttcttggaaccgtcctttgcttagtactatcataatcatacaatgtaatgaattgtttgggtttaaaatggaccaagtcattgtattctggcaggcagtctactgcatgctagttgagaatgtagaacatcaatgatcagaccaatatcagtgttattgtgccacattaccgttgctatcgtccctgcactggagatcctcatcgaaagcttcatgccatttt

SEQ ID NO: 448 - DNA, 536 bp, Cenchrus ciliaris
ttttttaatttaacttaaactagccatttcttccgcgcgctagggtttcctgcagcggcggcggaaggaggcggcgatggggcactcgaacgtgtggaactcgcaccccaagaactacgggcccggatcccgcgtctgccgggtctgtgccaaccctcatggactgatcaggaagtatgggctgatgtgctgcaggcagtgcttccgcagcaacgccaaggacattggcttcatcaagtaccgctgaagtgctatgtgaactccatctgggtgtgggatggggaggcaaggcgaggcgataatttgaattccagtaatttagatgttttgttcagaactgaattaagtctgtctttgaacttagccatgtctgtcatgtttgaaccatgagttacctgcatatgtgcagaatttgagctaccttgtttgacagccattttatctgtgttttgctgagcatctacttggctggttatttgccaaaccagtgatatttagtgtgctgtatatatattttcatataatcctttttcggt

SEQ ID NO: 449 - DNA, 363 bp, Echinochloa colona
gccgtcgccgccatgggacactccaacgtgtggaactcacaccccaagaactacggcccgggctccagggtttgccgtgtgtgcgccaacccccacggcctgatccggaagtacgggctgatgtgctgcaggcagtgctttcgcagcaacgccaaggacatcggtttcatcaagtaccgctgaatacttagctccaaatcatcaggagagtgggagcatccttttggatctgtcttttgcttagtactatcataatcataccatgtaatgaatatttgggtttgaaatggaccaagttggtgtattctggtttgcactctagtgccccctagttgagcatgtagaactgctatgatcagacta

SEQ ID NO: 450 - DNA, 598 bp, Echinochloa colona
aggaaggcggcgatggggcactccaacgtgtggaactcgcaccccaagaactacgggcccggatcccgcgtctgccgggtctgcgccaaccctcatggactgatcaggaagtacgggctgatgtgctgcaggcagtgcttccgcagcaacgccaaggacattggcttcatcaagtaccgttgaagtcagctgggctacaagtatgccatccgctggtatgacatgggccaggtgatggattcgaagtgataatttgaattccagaaatttagatgttttgttcagaactctgcaagtaaagtcactggcttgtgtttttggtggtgaacttagtctgtaatgttggaacaatgagttacctgcatatgtgcagaatttgagataccttgtgtgacagccatcttatctgtggcctgttcaccgttttatggccaaacctgcgttgtttaaccctccattaaggcctgtttgtggtgctttggttcctgggatatagaacgtgttatgtagatgcaaatatagacggagcatcgtttgtgtcttttttgcagttatattaggaaccgtgttgtgttgaatgattttgctaatgagcggg

SEQ ID NO: 451 - DNA, 477 bp, Echinochloa colona
gcggcgatggggcactccaacgtgtggaactcgcaccccaagaactacgggcccggatcccgcgtctgccgggtctgcgcgaaccctcatggactgatcaggaagtacgggctcatgtgctgcaggcagtgcttccgcagcaacgccaaggacattggcttcatcaagtaccgctgaagacatttccctgctgctgttgtggagaacttcacctgcatcaaagaaaaaatggatccttcaatagaaggctaaatttatgtgttttagaattttgttcagacttgagagtgctagtaaactctacttgttaaagttatgttgggtactgtctgcctgttgaactagctataattaaagattgaatattttgtcatctttgatttcttgtctaccctgcttccattgatgccttctgaattgttgtccttgacttaacgtatgatcatgctactgatgaatgatgacttgtatctggcg

SEQ ID NO: 452 - DNA, 415 bp, Echinochloa colona
atgggacactccaacgtgtggaactcacaccccaagaactacggcccgggctccagggtttgccgtgtgtgcgccaacccccacggcctgatccggaagtacgggctgatgtgctgcaggcagtgcttccgcagcaacgccaaggacatcggcttcatcaagtaccgctaaagacttgagctccaaatcatcaggagagtgggagcatccttttggatctgtcttttgcttagtactatcataatcataccatgtaatgaatatttgggtttgaaatggaccaagttggtgtattctggctggcactgtagtgccccctagttgagcatgtagaactgctatgatcagactaatacagtaacattgtcatcgtaccacaatatagttgctatcgtgctgtatttgagttcctcgg

SEQ ID NO: 453 - DNA, 1028 bp, Zea mays
cctgtaagaacgacggctcggcccataactgaaccaggacgaccgggagagccaccgtatggcaaaaggaacccatctaagcccacgttcctattcagcaaaggccaggcccaaggcccggtcacagagtagggtttcttccacgcctgccacacctcgctatgtatatatagtatccaccctcggccgcaccttagatttcccaactttttgttcctcgcgccgccgccgccgccgccgtgacggaaggaagaggaggagcaaggagcacgacgcgatgggccactccaacgtttggaactcgcaccctaagaactacggccctggctcccgcgtctgccgggtctgcgcgaaccctcacggtctgatcaggaagtacgggctcatgtgctgcaggcagtgcttccgcagcaacgccaaggacattggtttcatcaagtaccgttgaagaggccactgtgctgctgtggagaacttcctacatcaaagaaatgggtccttcattagaaggcctaatttatgcgctttagctttttgttcagaacttgagactcatgtgttaaactcgacttgttaaagttttgatggctactttgtgcttgttggaccagctataatcagaagattgaaattttctcactcatgatgtttgttcttatcctgcgtgtatgctcagttttctttcttgagttactgtattacctgggtaactgttcctcgcttcatggatgattctgctgaagttgaatgatgactattgtactcaagtgtatatgctgagattgaaaatttctgctacatacatagttttaccttggtaaaagttttcctcttagattctgagtagcatcactcaagttaacccactcattgtcctactaaaattcttataggagtgaacggttagattgctttatcataaattcataactcatcatatctagattgcattttaagaataagccctgtagctaacataaacaagcccctattatgctctaacccgttcaacattgtcccagaacttc

SEQ ID NO: 454 - DNA, 911 bp, Zea mays
gtaaagatatgcttttgcgagccgtgcctttatggaccgtgctatgtgccgtgacgtgccagaccagcccaaatgtacagatatagagagagttggactgaaccacaaagaaactggaccaggagcttcatttcggcccaataataggactatggaaccacggattgctcggcccaatcggacaagctcctgcgttagggtttagctcgcggcgtctgctatataaacttccgcttctccaaacggcaccgccactctccatctattcctcacgagcgattgcggcggcggaagtaagaggcgatggggcactccaacgtgtggaactcgcaccccaagaactacgggcccggatcccgcgtctgccgggtctgtgcgaaccctcatggactgatcaggaagtacgggctgatgtgctgcaggcagtgcttccgcagcaacgccaaggacattggcttcatcaagtaccgctgaagtcagctgggcgggctatctgaatgccatctcttggacagtgtagtagaggcgatgccacaattttaattactgtcatttagatgttcccttcagaactctgctatttaagtccgccatgtttgtgatggagaacttaagctttgtttgttatactgattatgagttacctgtgctttgcttaagctttcttgtcttctactctcatatttggatggctaaggtgtcataatagttgtacgtggattagatgccttcattttagaaggctgcagtcattgttcgtattaactcgcagcaatagtataattcggacggattagactgattagtagtttgctgcagcatcatgcatagcagagtctgggctctgaactgcagagctcgcttccgttgtgaaaacagcgtaccaccaaggcagcaactgtggtgtcaag

SEQ ID NO: 455 - DNA, 1205 bp, Sorghum bicolor
atgaactccaaaccggtaaacaacctttctcaactttttaatggtgattctatcttttttatattcgagctagggttccgcgcctcccaccccactatatattctccgctccacctgccgcggccgcctgctacgcttcccatctctctgctgttccttgcgcgccgccgccgccgtgaaggaaggaagaggaggagcgaagagcacgacgcgatgggccactccaacgtctggaactcccaccccaagaactacggccccggctcccgcgtctgccgggtctgtgcgaatcctcatggtctgatcaggaagtacgggctcatgtgctgcaggcagtgcttccgcagcaacgccaaggacattggcttcatcaagtaccgttgaagaatctactctgtgtagtggagaacttcctggatcaaagaaatggatgcttcattagaaggcctaaattatgtgcttaagcattttgttcagaacttgagactcatgtgctagtaaacttgttaaaatttttgatgggtaccatgtgcctgttggaccatctgtaatcagaagattgaaatattttgttacgcttgatatttggtgttcttatcttgtttgtattggttcttacatgtgttattggtgtcaaagatgaatgatggctattacactcaaggatattgaagtgtgaatgtaataacttctggtttgtttggctggtatagtggatggtactgtgatgtgcagcttaggtggaatttagctctcattgatgatattctagagtttccattgtggattgatttgatagcttttgtagttaatttatcttactgttttactactattgttttgtgagccatggttgtatggatcaatacacagatttgaagctgtgctataaatatatgtgagcatattgtttgtacaaaacagcattgggttgaaattgtaactgttttcaacctttcagtgctccttgaggattggctctggctagctgaatcatttcttctggttaacactgcccagcagaattatttctgctgattggcaacctggcaagctcagaattatttcagcagaactattccagctgcagtgcgtagcctgtttcctgagatgatattattataccataaccttgatatgcttggatttggtttttgtttgaataaggtttcaattatgtttttgtttttgttctgagtggacca

SEQ ID NO: 456 - DNA, 1053 bp, Sorghum bicolor
gcccaatcaggcccgctcctgcgttagggtttacctcgccgcgtctgctatataatcttccgcttctcccaacggcgccgccactcgcgaccagcaccgtctctctcttcctcacgacacgagcgcttgcggcggcggcggcagcggaaggaggcgacgatggggcactccaacgtgtggaactcgcaccccaagaactacgggcccggatcccgcgtctgccgggtctgtgcgaaccctcatggattgatcaggaagtacgggctgatgtgctgcaggcagtgcttccgcagcaacgccaaggacattggcttcatcaagtaccgctgaaatcagctgggctaccagggtgaggtttggcatggaccctatgaggacgaggattgacatgggccctggtggtagatcaaggccgcaattttaattccagtaatttagatgttttgttcagaactctgctagtaaagtctgccatatttgtcatattgaacatgagttacctgcgttgtgcttaagctatcttgtgtgctaccatcatatttgtcactcgttgggtatcaggaactctgtaatgtcgaatggttaaggtgccataataatctttgtatgtgcaaccttcaagtgtggacggattaaattttgtagtgcactctttcgaaaatgttgctgggcctgtacagcatcaatatcaggcatcacaccataggattactctgctccatggaaaatattgcccttgttatctgatggatgctgaatagaaataggattccacggtatctatcctttaccctgtcagtgacccattatctgatggaaaatatttctatgcttcctgacagtgacccattcagtgtttatgttaaatactactgcatagcccctatgcccatgagtaatgccacgccagaaccgcatacacatacctgatactcggcgctgcgccatgtacatgaacagtacttacccgaactgtgccacgccatgcgcataaacataaacagtagatcatgtgtatgaacagtacccatcttttatctagctagctagatc

SEQ ID NO: 457 - DNA, 1666 bp, Panicum virgatum
tcctcgggcccaatatcccctagcccataatcaccgggctcggcccggcaccaacttaaccgggccaagcgggagattatactccatagcctaattaagcccacgtccaggatggctctcgctcgccgctcacaggcccagcgtgtccccatttcacaggcccagtgtgttacgcgctagcgggccgagcgagcggggaaagaaaaaaaaaggaagcacttttccatagcccagttaggcccatgttcccaaccagactaggcccagcccaacgcgcgggtcaagagctagggttccgcgcctcccaccccactatatattctcctcaccacctcgcgccgccacttctgcgcctccccgtctctctcgtcctcgctcgccgccgccgagaaggaaggaagaggaggaggaaggagcaagcggagatgggccactccaacgtctggaactcgcaccccaagaactacgggcccggctcccgcgtctgccgggtctgtgctaacccccatggattgatcaggaagtatgggctcatgtgctgcaggcagtgcttccgcagcaacgccaaggacattggcttcatcaagtaccgctaaaggcattgccttgctggcgtcgagaacttcacctgggttgaaaagaaatggatccttcaatagaaggctcaacttatgtgcattagattttcgttcagacttgagactgctagtaaactacttgttaaagttttgatgggtactatatgcctgttaaactaattataattaagtgattggagtattttgtcatgtttgatatctggtgtactcaacctgcttgtattggtgccctccaaggctcccaagttattgtactgccaattctattccttgcttcatgtatgagcttggcacttttgaatgatgacaattagtctgtgatatcaaactgtaatgtgataataattacagtgtgtatttgctggtacaacgggtgttacaccggttgcccgagtaggctgaggcactgcatccatgaggcaatatggctactgcagtacagtgttgctttctgcttcagtcatttcactgtctattcttgctctattgcagattctgtaatctgttagctagattgaaatttagctgacacttttgttcaatgttctgcataatatgcttggatttgatgtctttgatttatttaatgctcattaagattgaaattcagaactggagcatcaaggtgttgcacaagcaggcaaatgcttcttgctgatgtgttcagtctatcatagttcctagctctattgttgcaaattctttgctttgctgctttggtgtaacatagatgacaattatgttattcctttacttgatttgcttggatctggttgtttaaatagggttggggatgaatatttcttgtgaattgaccgaaagctcaaaatggctgctgcagctgtgcagtcatatcttgattttccaagatcttatccttgtacaatgtgctgtggaataaagtgtacaatgtgaatcacattctggagtacattatattcattgttcattgtgctgggttgcatatgatttgaacgccggagtttgcatttgtatacactgatgttgagtgaacaaaaacttatggtgatctgatatcttcttgggctattaacacgctttctttt

SEQ ID NO: 458 - DNA, 900 bp, Panicum virgatum
gcggcccaacgagcccacgggcccaattccagccccgaaaaggcccgtgaagctacgggccgctcggcccaatcgggcccgctaatggactagggtttaccgcgcctgctatataatcctacgcccctcccacccacggccgcctctcgccaccaactctctcactttctcaggagcgctagggtttcctgcggcggcggcggcggaggaaggcggctatggggcactccaacgtgtggaactcgcaccccaagaactacgggcccggatcccgcgtctgccgggtctgcgccaaccctcacggactgatcaggaagtacgggctgatgtgctgcaggcagtgcttccgcagcaacgccaaggacattggcttcatcaagtaccgctgaagtcagctgtgggcaataagaataccatcttccagtatgacatggaccatgtgatagaagcagggcgataatttaaattccagtgatttagatgttttgttcagaactctgcaagtgaattctgttgcctgtgttttttatggataacttggccatgtccataatgttcgaatcatgagttgcctgcatatgtccagaatttgagctaccttgtttgatgaccatattagctgtgtccttttgtccatgaagttggatggttattgctcaacttgcgatatataacttgcaggttatctcattgtgcattggcactgtagattctgcacgaatcatttcttaaatgaggtgtgaaaggcgaatcgctgatgagctttagagattgttaatttcttatttgttcttccgttgttcaggatccgatactactgaggaattatattgaacgttgaccttcctttgggatctatcacaaattaaaatagcagcataacattgctgaatatttcta

SEQ ID NO: 459 - DNA, 568 bp, Panicum virgatum
accgacctctctcttcttatagaagcagccaggcattctcgcgacgcgctcagcgtcacaagcgaagtcagagaaggttagggtttcccagtcgcgacctctgccgccgccaccgccaccatgggacactccaacgtgtggaactcgcacccgaagaactacggccccggatcccgggtttgccgtgtgtgcgccaacccccacggcttgatccgaaagtacgggctcatgtgctgcaggcagtgcttccgcagcaacgccaaggacatcggcttcatcaagtaccgctaaaaacttgagaggtctgaagcatcacgaaaatgggagcatggatgaggagcatcttcgatccgtcttttgtttagtactgtgataatcataccatgtaatgaattatttgggtttgaaatggaccaagtcgtattctggctggcactctagtgcaccctagttgagcatgttgaaccgctatgatcagactaatacaatattgttactattgtggctctattggagtaactcgtctgagaggttcatgcctttttcttgccgctgcatctgcgctgag

SEQ ID NO: 460 - DNA, 3432 bp, Panicum virgatum
taggcccacgtcccgggtagaacaggaccaggcccagtgagcggttggctctgggcccacgtcaaggatggctctctcggctctcaaggcccaggcccagcccagttaggcccatgttcccaaccggactaggcccagcccaacgcgcgggtcaagagctagggttccgcgtcccccaccccactatatagcctctccaccacctcgtgccgccacttctacgcctccccatctcctctcgccctcccgcgccgccgccgagaaggaaggaaggagcaggcaggcggagatgggccactccaacgtctggaactcgcacccgaagaactacgggcccggatcccgcgtctgccgggtctgtgctaacccccatgggttgatcaggaagtatgggctcatgtgctgcaggcagtgcttccgcagcaacgccaaggacattggcttcatcaagtaccgctgaagacattgccttgatggcgtcgagaacttcacccggggttgaaaaagaaatcgatccttcaataggaggctcaatttatgtgctttagctttttgttcagacctgagactgatgtgctagtaaactacttgttaaagatttgatgggtactatatgcctgttaaactaattataattaagtgattggagtattttgtcatgcttgatatctggtgtgctcaacctgcttgtattggtgccctccaagctattgtactgccagttctattccgtgcttcatgtatgagcttggcgctgatgaatgatgacatgtctgtgctatcaaactgtaatgtgatactaataattacagtgtgtatttgctggtacaatgggtaacacctagtaggctgaggcactgtatccttgaggcaatattgctactgcagtatggtgttgccctcctcttctgtcatttctctgtctatccttgctctattgcagattctgtaatctgttagctagtttgaaatttagctgacacttctgttcaatgttttgcatgataatatgcttggatttgatggttgctttgatttaatgcttattaagattgaaagttggaactggattactggaacttaaaggtgttgcacaagcaggcaaatgtttcttgctgatgtgctcagtctgtatcctagttcctagctctattgttgcaaattctttgatttgctgctttggtgaaacatagctgataattatattaaatcttttccttgatattcttggatttggttgtttaaataggggttgggatgaatattttcttgtgaattagccaaaagctcaaaatggttgctgcaccagtgtgtcgtatcttgattttccatgatcttgtcgttgtataacaaaatatagcctgcagctgtgctgtggaatgaagtggacaatgcgaatcacattctgtagtacattataattattgttcattgtgctccgtagcatgtgatttgaacgctcgagttattgctcagactcagtgagcaaagatgtacattgtttgcatttgtatactgatgttcagcgagcaaaaacgctttatggtgatctgatatcttcttgggctattaacacgctttcttttgtattttttgagcgggtgatagtgttgttgaatgagatggctgaatgatgctttaaagaaactaaaatccttaaaaagagtcttcattgtgaagctggacattatatccttgtaaatgcctgcataattctgtacgccacacatgtctgtactggcttgggggcataattcagtaaaatataggcaatttggcaaaatgaagtggacttcactttatagtgaattgcctgttgcataatggtgtccacaacaatcttgttcttgcgttgcacattgaatggaaactgaagtcctgggagctggcattgcattattagtagtattaagtaacattatttttcttactagtgcccttttctcttggcatttcatattcccatacacaatcagtggatctctccattctggaattttctgatgacagtgtttctgaagtcaggttgagttaaattattgctcgtgggtcattaatatcctgatgatcatttcagaggcagtacccaactgaagggcagcttgctagtttttttgttgggaaggccgaaagcattgatgaacttggacaatttgcaggaagattgagggatggggcattgcgtttcaggcattaactactatcatctagctgtcattctaatctgtttaagattgggatggaactcgagtcaaatttatatctgaaaagattccccgagaatgcagtataaatgatgtcctcacctgcaccatgcatacagacatattaccaagattcctcacatagcttcgaagtagaaaatatcaacagaatggaagcaaagggcgcatccatttggagtgaggaatctgagatgattgctcacctgcagtccatgttctggaacagcagcgatgctgatgtcagcctttcttcccccaacagtagcactagttcttgtattgaacctagcacattgcctactgccttgttccttccatttaatgaaaaagagagttatgacacagcgccattgcagaacgctgccacagattggtgctttgatcaccagagtgagtcctttggttcaattgatactgcagttactggtgacaagagggcccttctcatggatgagagaaggaagaagagtaacaagaaaccccgtattgttgccccagtactgatgacaacttcaagtgctcttgatgataaggccaataccgagcttatcaatatcagcagctcctggtgctgtagctctgaagatgattctattggcgtgtgcgaggaatctgttgttctgaaacaaagttgcagttctagaggtcgtagtcggtcctcgaagaattcacagagtctttacgcaaagaagagaagagagaggattaatgagaggttaaaaacactgcagcagctaattcccaacggcaccaaagttgacatgagcactatgctggaggaggcagttcagtacgtcaagtttctacagctgcaaataaagctgttgagctctgatgagacatggatgtacgctcctcaaccactcgagcattgatattaatttgaattcttctgtgaagaaatgatgactatccaaaaagaattgggcaaacttatcattcagaaggattggacctgtcaagtcaaacccagtacatgttgcatctgtttttagacctgtaattaaccctgactttacataattcagttgcttcttgtaagtaagagcaagagattaatttatgataaagttggagcaaggatctcccttgtcaaatgatgaaataatgtatcaaagatttctacacagtttacgatcatgaggtcacagtggcctacacacatagtaaaagtctgaacagccttggtttaggcaattcacttttg

SEQ ID NO: 461 - DNA, 1438 bp, Panicum virgatum
atctcaccgttgttcacgaaaattgaactgtggggattccaaacgatcccgcagagaattcgagcaggagggaggtgatccaaacctggagcacggggagtccggcgggggcacgccctcgaggtcggccgcaccagcgggcggcatggtgccgaggtgcgggcagctggtccgcgcctccacccaccccgccgccgcaccgtagaggtcgcccagatccacttccccctccaccaccgcaaccccctcctcccggtggctctcgccggcaccgccggcgccgtcctcctccttctccttcccttcgggacgacgacgagtcctcaccggcggcggaggacatggtcggagcggcgagtcacggcggcggcggcggaggaggaggaaaagagaggagacgacgaatcgaccagcggagtcgtcgtcgcgctcgtgccagagcttggactaaaactcgcgcagaccagcggcccaacaagcccatgggcccaattccaggcccggtggacctacgggccgctcggcccaatagggcccgctagtggactagggtttaccgcgcatgctatataaacctacgccctcccgcccgccgccgccactcgacgcaccaactctctctctctctctctctctcacttcctcaggagcgctagggttttcctgcggcggcggcggaggaaggcggcgatggggcactccaacgtgtggaactcgcaccccaagaactacgggcccggatcccgcgtctgccgggtctgcgccaaccctcatggactgatcaggaagtacgggctgatgtgctgcaggcagtgcttccgcagcaacgccaaggacattggcttcatcaagtaccgctgaagtcagctgtgggctatgagaatgccatcttcgggtatgacatggaccatgttttagaagcgaggcgataatttaaattccagtaatttagatgttttgttcagaactctgcaagtgaagtctgttgcctgtgtttttgatggagaacttggccatgtcggtcatgtttgaatcatgagttacctgcatatgtgcagaatttgagctaccttgtttgataaccatcttatctttgtctagttgagcatcaagtggatggttattgttgaacttgcgatatttaacatgccataaagacccatttgtggtgcctttggattgatattggaatattgaacatgtgatcaagatgcaaatttggacggatcttagtttgggtctccgttggttgccgttggttgtgcattagcaactgtaaactctgtgttgatcttttcagaaattgtagctgcttatttgttgttctaatgttggtcaggatatttttatgttgaacatgggcaagccttagggatatatcataaactctatcgtaatgttgagtttgttatctgcgatgagcatctttgacaaatgt

SEQ ID NO: 462 - DNA, 690 bp, Panicum virgatum
atgaaagcccagtgaaggatggcaccgacctctcttcctattagaagcagccaggcattctcgcgacgcgctcagagaaggttagggtttaccagttgcgaccgccgccgccaccatgggacactccaacgtgtggaactcgcacccgaagaactatggccctggatccagggtttgccgtgtgtgcgccaacccccacggcctgatccggaagtacgggctcatgtgctgcaggcagtgcttccgcagcaacgccaaggacatcggattcatcaagtaccgctaaaaacttccggcccttgcttccttcactgcaacataggtagtggtttacatggttgaatattgcacaaccgtacgtgttatcctgttctgctatgccatagcccatactatgcctcgccacgatgtatctgtgttggtcgaactggtactagtttatatggtggtttcatggttccatagaactgaaactgttagagatggttcccataatatttcacttatatcctgttgttaatggtagcttggacgttgcataatttcgtgctcctgttctgtggtaatctgttgctttacatatgaaatttctgtctttctgggtcaccagtgtcatctccaggctagtatctagtaaattgttgagattgtggtgtgattgtccgaagattgtacctggtaatttacagt

SEQ ID NO: 463 - DNA, 340 bp, Panicum virgatum
ctgcgcctccccgtctctctcgtcctcgctcgccgccgccgagaaggaaggaagaggaggaggaaggagcaagcggagatgggccactccaacgtctggaactcgcaccccaagaactacgggcccggctcccgcgtctgccgggtctgtgctaacccccatggattgatcaggaagtatgggctcatgtgctgcaggcagtgcttccgcagcaacgccaaggacattggcttcatcaagtaccgctaaaggcattgccttgctggcgtcgagaacttcacctgggttgaaaagaaatggatccttcaatagaaggctcaacttatgtgcattagatttt

SEQ ID NO: 464 - DNA, 360 bp, Zea mays
ctatctcttccccacgaacgcttgcggcggcggcggaattaggaggcgatggggcactccaacgtctggaactcgcaccccaagaactacgggcccggatcccgcgtcagccgtgtctgtgcgaaccctcatggactgatcaggaagtacgggctgatgtgctgcaggcagtgcttccgcagcaatgccaaggacattggcttcatcaagtaccgctgaaatcaggtgggaatggaccatgtggtagaggcgaggctgtagttttatttccagtaatttagatgttttgttcagaagtctgctagtaaagactgctacgtttatgatgaagaacttagccatgttggtcatattgatcat

SEQ ID NO: 465 - DNA, 597 bp, Echinochloa colona
ctccccatctctctccctcgccgtcgcgccggcgcagccgagaaggaaggaagaggaggagcaagcggcgatgggccactccaacgtgtggaactcgcaccccaagaactacgggcccggatcccgcgtctgccgggtctgcgcgaaccctcatggactgatcaggaagtacgggctcatgtgctgcaggcagtgcttctgcagcaacgccaaggacattggcttcatcaagtaccgctgaagtcagctgggctacaagtatgccatttactggtatgacatgggccatgtgatggatgcgaggcgataatttgaattccagtaatttagatgttttgttcagaactctgcaagtatcactggcatgcgtctttgatggagaacctagtctgtaatgttggaaccttgagttacctgcatatgtgcagaatttgagataccttgtgtgacagcaagcttatctgtgccctgttcagtattttatggtcaaacctgcgttgtttaaccttccataaggacagtttgtggtgccttggttcttgggatatatgcagatgcaaatataggtgtatcatcgtttgttccttttttgcggcc

SEQ ID NO: 466 - DNA, 734 bp, Oryza sativa
ggaaaaccccggcccaagttgaggcccaacttgtcagccatcactaaaagcccattaggccggcccaggtcaacccgaccgattagggtttagctctgcgtgctcctataaaaagccttctcgcttctctccgccgccgccaccctcccacacgcgcgcgcctctctagggtttcccacctctcaccggcggcggcggaaggcgaaggcggcggcggcggcggcgaagatggggcactccaacgtgtggaactcccaccccaagaactacgggccgggctcccgcgtctgccgggtgtgcgggaaccctcatggactgatcaggaagtacgggctcatgtgctgcagacagtgcttccgcagcaacgccaaggacatcggcttcatcaagtaccgctaaagtcatcttggtttcctcagccctactgctgggtgaagagatggagcatttaatggaaggcttaatttcagttccagtaatttagctgtttgtttggtactctgcagactaaagtggtttatgtttctgatgctatttgaatgatgtggatgctaagtatgaattaatcgcgcatcaaaaaaaatcctttaatactattatatatgtgctcctgtgagggatcgtatgattttttgctgttgaatggagatgttcaggttagcagtcagctgctgcattttggacaggcacattttcagtttggtggtttaaacgcagttttagcagttaaattg

SEQ ID NO: 467 - DNA, 3983 bp, Oryza sativa
ccgccgccgccgccatgggacactccaacgtgtggaactcgcaccccaagaactacggccccggatccagggtttgccgtgtttgcggcaacccgcatggcttgatccggaagtacgggctcatgtgctgcaggcagtgcttccgcagcaacgccaaggacattggcttcatcaagtaccgttgaaagttgggagctcaagtggaatgggagcttagatcgggaaaatttttatggaagtgtaaaagccttgtcgagtattatcccttttgatacaattgtcgtcttatgatatgtaacagattattgatatttgaaagtgagttatggtctgatggacaatacatgttctggtattaattctcatattatcgagcatgttctagtgctgtaatagaagatgattatatgctatcttgagtagcaagcttcccttatttctgatgctggcactttgacccttaaccggtctcagcttgctttgatatcttatatgctttattattagattgttttgatagttcaggctgacaatttggccgggtacaataggcaacggccattcggccaacggtgcaaaaatgccaggtggcactgcacaaagatttcaactcgacatatgggacaatatggagatatttcacagctggatagagtatttcgtctaatcttactgtgttttctacaacaaacagtaaattgatgggtttagaggtgattttttaactttcgtgaaagtatagggtataaaatggaacctgcgaaggagcaacaaatcttcaattgagcgtctgaacctataaacaataaactaataagatatattagtataaagaataatattgatactataatttactctttttcccggactatataatgtactctacgatacatgtttttttagataaagtttattctacacgttgtccaaacaatattcttgtatttccattaatgccatggtagagtatcagacgagccgagctccaagcctcacatagcattgctcgagccgagctcgagcctaacaaccctcaagagttcaatactaggatagggcgataggctccagagccccgactcggctttgagcctattcaggttggctcgctcgagctcggctcgttcaccgccctttggtcccaaattcccctccgccgctcaccgccaccctctccatctcactagctccggcggcgagcatgccctagcttcgtctccatcgcaatcgcagcctcctcgagcaggtttggatccagaggcgacgccgccggcctccatcgcatcgcggttcgaatcgaaggtatttcattcttctttttctctagtagctcttcctccccctcgctcagcttggattgaacatccattcagaattcgattgttgtttgtttcaatccaattaatccatccagtttcctgtcgatttcatgcgtgatgcagtactaatcgaagcaatttgtttccaggatcaagaaaaattgggggttcagctgagctctatgccccaagtgaggcctgcctctgccgagaagccgactcggcaatgggcggcatggacacgccaagaggaacagagctttttcaatgcgctgcgcctggaaggaaaaaattttgagaagatcacgctccgtgtccagagcaaaaacaaggatcaggtcagacattattactatcgtcttgttcgacgcatgaagaaacttcttggtcctgagttctcacttgatgcaaaaaattcaaaggacactgttgctgctatgctccgctggtggtctctgcttgaaaaatttagctgcagtgcatcaaaactgcatctgaagcctcggagattcaaaacattcgtagaagcattgggaaatcaactgctaaaggacaggaataaaaccagaaaaaagtgtccacgaggggatgagtgcctttcttcttcatctccaattctgaacaggactgctggaaatgaatcttcctcagtaaaactcctacctgtggatgtctcaaatggtagcaaagtagcatcttcaaaaggggcagttttcaagaggggtgcagaaccaaattccaataacaagtcaggttcaactaaatgggacctctctgccacaattactgtgaaacagaaaaggagagcaggtggtggcattgcatctactgcatataaaaaatgggagagagatgccatggctggtgtttctttagtcgctgatgcagctgaagagcttgagcgcaacacagtgaatgttgatgcaaggacattatctccctcatcaaacaatgtttgtaccgttgatgatccaggcacaaatcgtatgaatgaagcagatcaacaagcacctgcaaagctgaaattgcagttatttccaatcaatgaagccacacgaaaggcattggaaaaggatgaacataatccacatctggaactcacagttagcgctaggaaaaaaatatcttctgtactagaacatcttaaccgcaagtggggcagctcaaacattgcgtctggagagcttttgctttttccatattgtgctcaccgagaagatttagctacctatcagagatggaccacaagagatacagttgtggtggctgatgtttttctttctgtgaatagcccgcctgtttttcgattaaggtatggttggttttcccttgctgagcttgaaggaggaagtggaatatcttcaactcattttaagaattgcatgatgcctgaagacatccatgccaaatctccctcagacgcttgtgtgcagaaggatggtacttttctcaatagttgtgctcctgaggaacacctttgtaattcaaaagatcggccggcattatttcttgctatgacatttagtacaggcaagagcgctaaggggcaagagcagcacagtgattttcccgcctcatggtttagcaggcagaagcaagaaaaagattccacaaaccaagttttagaggctaatctggggatggattgtgctataatatctgaaggagagtgggcagatacccttactgatatcagtgttggatacttactaacagaagcatccataggtactaatacagattgtccagggacagctattgccaaaaacacattgtttcttgagaatccctgcagctatgattcatttgatgctgctgttgctcttcacgcttctcgtcataaaacagtagagcagccagcccttgcatcccattcgaccatctggggtgctgaagaaacctgtgatgagttcagttttaacttggcagcatctaggaagcaagaaagttcaaacacttcagctagcagctgtcctggtagtgatagtggtgttcttccttcaacctcacaagggtttcaaggctttcttcaggacttagcaggagcaaaggttgctgataatccttgtatggatgatgccaaagatatggaggcactttgtgccaattctccacctcgaagtaaaagtgattctgggttaaaggatcaatctctagctgacttatattgggctgattcacttggaccactggacttagagataccatccgtgagataccaagctgaggacttactcttaggagacagtcagaatagttggaatcgcatgatggtgaatagcctggatgcgtttcgaaacctgtcattcttcatggcagataagaatgactcaatcccatccatcatgtagaactgtgaattctgggcgccgttcattgctctcgtcgcttgctatattggctagtgaagtactaccaaggatgcatctcgctgtagaggagggtttgcattgtccaagtgaagctgtttgtgggaaatccaacagctgcggacttgctgttctttgcagtcaagagggacgcattctgctgtgtaagatatatagtaagagctgtactaagatgttacatgtatgtcgtgtaaattgtggtgtccctgtacaaaaagctcacacaatctcttggttacagtaaagcttctgatgactgccgtgtatacag

SEQ ID NO: 468 - DNA, 1083 bp, Oryza sativa
cgaaatagtttagtcctaacaagctgatggactttcctgacatttaagcccaatagagcagaacatcaaggcccatatattccacgaagtaaaaaagcccacaaaacagggcccatattaggcccaataagccgcctcgagcgagctagggtttcgcaccaccctccccactatataaacctcaccaccaatcccacccgcgccgccgccttctccagctcctcgccgccgcatccgatccgacaaggaagggaagcgagagctcgaggtcaccctcaccggcggcgagcgatgggccactccaacgtgtggaactcccaccccaagaactacgggcccggctcccgcgtctgccgggtctgcgggaaccctcatgggctgatcaggaagtatgggctcatgtgctgcaggcagtgcttccgcagcaacgccaaggatattggcttcatcaagtaccgctgaaggccattttgcctcgccgttgagcctgagaactccgcctgaaccagagaaatggatcttttagtataatactacatttatgtggtttagcttttgttcggagtaccgtcctattaaacatgtttaagttttgatgggaaccatgaggttgttgaactaactttgtgatcaaatattgaagtactctcttatgtttgaggtcttgtgtatttgatactactgtgatggctcagttactggtttacagcattccagcttgtttcagtttttttttatgattccaatgttcattactgtagatatacaacataaaaaaagttcagaatgcagaataaatggaaattggactttgatcaagttaacatgtgatctattctattttctttcaaaagtacttcaattgcactgaaatgtaaaattctgagtaaacctatggctgacgctcttaagatttcactgcttattttcctttgtcactaaagcttggtagttttctacctattttcaactcttgaagcagtgaattctcaatttcttcgtggtgaaatttagttttgaacgtgacgatatgtttctccaacatttttgctatattttttagaggatgatggatcaactgtg

SEQ ID NO: 469 - DNA, 716 bp, Oryza sativa
tatatatccatacttgcatctagtctagcatgggccccggcccatgatacgttcacctgaaagcccactcatgcgacgacttgtcaaagcccaacaagcgaagaagccgatgcttatagaggaagcccggctaccaccacgccaacgcgctcatttcgttcattctagggtttacaactcacgacctccgccgccgccgccatgggacactccaacgtgtggaactcgcaccccaagaactacggccccggatccagggtttgccgtgtttgcggcaacccgcatggcttgatccggaagtacgggctcatgtgctgcaggcagtgcttccgcagcaacgccaaggacattggcttcatcaagtaccgttgaaagttgggagctcaagtggaatgggagcttagatcgggaaaatttttatggaagtgtaaaagccttgtcgagtattatcccttttgatacaattgtcgtcttatgatatgtaacagattattgatatttgaaagtgagttatggtctgatggacaatacatgttctggtattaattctcatattatcgagcatgttctagtgctgtaatagaagatgattatatgctatcttgagtagcaagcttcccttatttctgatgctggcactttgacccttaaccggtctcagcttgctttgatatcttatatgctttattattagattgttttgatagttcaggctg

SEQ ID NO: 470 - DNA, 1762 bp, Sorghum bicolor
cccagtgaagcgatgacatccgtctcctatagagcggccgcctgcaggaaaacaatcgcaagagtcagacaaggttagggtttactcgtgaggcctcctgctccccctgccgccgccgccgccgcctccatgggacactccaacgtgtggaactcgcaccccaagaactacggccctggatccagagtctgccgtgtgtgcgctaacccccacggcctgatccggaagtacgggctcatgtgctgcaggcagtgcttccgcagcaacgccaaggacatcggcttcatcaaggtacgcgccaaaatcttccggcctctgctcgcttccctgaaacgtaggcctgcgttagtagtggttaccggtttccctgattgggtgggtaatccataagcgtacgatttattctgctatgccatttgccatgccataacccatagtatgcctcgccatgatgtatctgtgttggtccagctggtgccagtttaattagtctgttacatggtttcttacaagtggaagcaatgcccatgatgcccatattgttgcgctcatggccgctgtcaaaacttgcttggattttgcataatttcttatcctgtttggtagtgtagctcttagtctagctgtgtagttgtttgcattcgaataagagtcttgctgaattacagagtgtcatctctagtggaccttgtaaactgttgtgattggcccaattttttaattagtagtttagactggctagtgaggtaacagcttaattctttaatttgcaatatgaagatactagcaagactgtggatctcagattttggcattagcaatttggaacctgtgaagtttcttgttgtaagagctggtctatagttgacatattcttactgctccacttgtgaataacctctgaagcatggttgtttctatatctagccagtgtttcttatgatctagagctttcaaatgcctcttctacgatgaagatgttaggtacattttagttgtaggtagacaattgtgctgtggcttctgattctgaaaagttggatcagcaatttggaatgtaaagtcttctgtcataaaattaagccttaccgctgaagcttgaggagctccaaagcatgacaaaaatggaggcatggatgggaacctaaaagatagattgtactcttattataatactatgtaatgaattgtttggctttgagtggatgaagttggtgtattctcatttctcaatgctactctaatacttcctgctagttgagcatgtcgaaccactatgatcagacaatacagtatcattgttacaagtgtcttgttgatattgttctgttgttcatgctgtttttttttattgcttcatatggagtgatttagtcccatatcttctcagctttgctttgattgattgtatgtggaggttggtatggatttggataatcctaaatccagttggatctgtccgataccgattgtgaggcatgatccctatcgtatggttgtaacttgtaagcgatgaatgatgtaaataccatactggatgaatttgtttgggattaaaaaacaagtacagtgtcttttcttttgacatacaaatacttgtgacagtaaatacatgcaagtagattggatattagtcattttgtattggggcaggattggaatcggatttttgtcccgattcgatttcaatgaatttgcccacatggattttgaccctaattcactctcacatgtatgttttaatttagttaaatcaactagg

SEQ ID NO: 471 - DNA, 1694 bp, Aegilops tauschii
cgatcggcaaagtttcgcaagtgtacaagtgagcccagcaagtgaagcctgccaggctatatagaaaacccggcgccctcgcgacccgacctcctcattctagccaggcgagagcaaaaggtagggtttccagttgcaagccgccccgccgccgccgccatgggacactcgaacgtctggaactcgcaccccaagaactacggccccggatccagggtttgccgtgtctgcggcaactcgcatggcctgatccgcaagtacgggctgatgtgctgcaggcagtgcttccgcagcaacgccaaggacatcggcttcatcaagtaccgttaagaatggaaacctcaaaggaagcaagggctaggaaattatcaacgaactgtggtgcttcatcgagtctgatctttatcctataagctatgtaatgaactactattaatgtttgaatcctggtgacaaaaccatgaaaccatgttagtgactgctgtttgagcatgtgaaaccgataattctgttcctgtcgtgccattatggttagaaggttgctctgcatccttatatttttattattttgtgaaggccggccatgctttgttttgatgctctaattttatattcctcgttttcatacctttcttgcttggcttctgttcttaatcagtctctgctgtgctctactatcccctctgtggttgtttatgatcttcttcgtttgttgaacagttgtccttagctgccctgactttgcttaagctagaaaatatgtctgtaattgttaaatggtcatctataacacttgtcaatgctgagcttctcttgagtattaggtgcgggtcaaaacaagcactagtggaattattcgttggtcacagaaaaaccgcccaaattgttaaatggtcatctatatgaattcgatgcgcgactgtcctgctaccgcccatattttgccacccagatggttagaaatcgtcagaggccaacaatttcttgccaccctcttgttctaatcgtgaaaaacctggagcatccaatggcagatctgacagccaacgatgccaaatgatacctgtatcccactcataatttgagcatgtatcacatcgtcaaaatcgagcgtctccaggggttaggtgtgctttctgctgtccttttgtatttgtgcgtgaacaagcatgagtggaattattccttcgtcacctcctgaataaagtagaattcttagtgtacctcaaaaaagagaatagaaagctttccctcaaaaaaaaagagagtagaaagctttccctcaaaaaaagagagtagaaagcttagtgatacgattgcatatgaatttgatgtgtgatctaggagtaggatgcatggatgcttcgtactccctccgttcctaaatatttgtcttttaggagatttcaaatggactatcacatacggatgtatatagacatattttataatgtaaattcactcattttgcttcgtatgtagtcacttgttgaaatctttagagagacaaatatttaggaacagagggagcagaaacagtgtatctgtattggatataacgtatctgatatggatatctaccccctgatcatcagggaatataaactatttaaaacaagagttaaatacactatgagtgcctaaacttgttctgtgcggttagtttagtgcctaaacttgcaaaaatacacaaa

SEQ ID NO: 472 - DNA, 813 bp, Aegilops tauschii
cttggcttagggtttaccggcgtctccctatataagcctctcccgctcgcaccgccgccaactaccctttcattctcccacgcgcatcctagcaaccggcggcggcaggcggaaggcgaacaagaagatggggcactccaacgtctggaactcccaccccaagaactacgggcccggctcccgcgtctgccgggtctgtgggaactcccatggactgatcaggaagtatgggctgatgtgctgcaggcagtgtttccgcagcaacgccaaggacattggcttcatcaagtaccgttaattcacctggtcctgctaccctgaagtgatgctgatcagggttgaaggaatggagcacttaatagaaggcttaattacaattccagtaatgtttgctctgtactccgagagtggctttatgttttgatggatactgaatgatgtaattgttgaacatgagttaattacccatggagaagtctttatcattctgttgactgtgtttgtcccctctcattgccattggtagttataagtaacttgtttttttattagaacgtattgggtcaatggctgtaacagaccagcaacccagcaaatatgcttatttcatttctatctgttgttgcataaagtggcctttaaaacgcttatggaagacgctctataaaaattatggaagcacatgaaggactgaatcgatgcaccgtacaaccgtgaagtaccataggtaaaattatggaagcacatgaaggactgaatcgatgaaccgtacaaccgtgaagtaccgtaggtatctactccctccgttccata

SEQ ID NO: 473 - DNA, 666 bp, Musa acuminata
gggttcccgatgcgatgctataaaacgcagctccctcctcaatcgtccatcgacgacggatcaaggctcggcgcgacccagcgtgagaacggcgagcggagagagatggggcattcgaacgtgtggaactcgcatccgaagaactacggccccggatcccgagtttgccgtgtttgtgggaatcctcatggattgatcaggaagtatgggcttatgtgttgcagacagtgcttccgcagcaatgccaaagcaattggcttcattaagtaccgctgaagaggtttgctattggtagggatggaggctgtgaaattgaaaggagctcttttatttcacatgttctttttccatatgaactctggtaatatgtgtgatctgctggattttgttcacctattgaacccttaaagacagttggaacaatgtagtaagctaaattccaatggttttatcacggttatcgatgccatctttgctaggttttgacttggttaagacttttattggaatatattttaaccatatgaacaagttgcactgtaatgttatagatcgttaatggttgcttctggacttcaggttattagtagggcacattgatgtcgatggctctttatatattttttaaattttatccagtgaatatgaatttgtagacttagtttg

SEQ ID NO: 474 - DNA, 811 bp, Musa acuminata
tgttgcacccgtccgatcacggatggacggctgatattaatagatgggggcaaccgacagttggatcccttgctcccagttgggggtcggtcaagattagggtttctctgggacccatataatccgaacactccccctcgaggctgcgacggtgagagattggggttcggcgcgatcgagcttgagagttgcgtgacgagagagatggggcattcgaacgtctggaactcgcatcccaagaactacggccctggatctcgagtttgccgggtttgtgggaaccctcatggactgatcaggaagtacggacttatgtgttgcagacagtgtttccgcagtaatgccaaagaaattggcttcattaagtaccgctgaagatgtttgcattcacagagactgagcctgcggaatggagctcttattgtctcagaatgtgttttctatgaactctagttatgtgatctgctggattatagttcacctattaaactttcaatttattggaacaatgtagcaagttaaattccatggaatatttttatggtgatcaatgtgatgctcctatgtttcttcccatacgtttaagtgcatatattggttcatttgttggactcgaatttcaattaaaatcatacaattttgtaaatgtgtataaagtttcatgccataagagttgggtgatggtatttatgttatcatgagttgtcaaaacctttcaagtatgcgttattgacagtcttttatctgcattcattcatagcaagactcattagcttttatatgttaaattgaatttatagatagaatgctc

SEQ ID NO: 475 - DNA, 932 bp, Musa acuminata
gtcataactagggtttgttcctctgctataaaagaccccctcgcttggctatgatcccgtcttcctcgttagccgtcgttacataggtgtttggagttagggttcgtcggggactgcgattctagcgaagggagagggatggggcactctaacgtctggaactcgcatccgaagaactatggccctggatctcgggtttgccgggtgtgtgggaacccccatggactaattaggaagtatggtctaatgtgttgcagacagtgcttccgcagcaatgctaaggaaattggctttattaagtatcgttgaaaatattgggttcacccgaggcagactgctgaatgaactaccacgcaccagaaggctttttacttatcgtgtagtcggacctctatgctttgcttttaacatttttcacgtattaaatcttgtgattttgtttgacccatatactttagagtattttttaaggtcttcctttccaactcatgatcaactgtttagcaccttttcattatgagatctctattgtctactgctggcactagtttgtactagtttgtactggagtagttggtgtctggtaagtgtgcctaattcattagagatctttgtgtaattgcagtccctactgctacctaaagaaattgatgcctcaactggtctggacaaaattgaaccattcttatggcattaaatatcagcaaggattatatgggcacgaggaaattttgacctctctctagatcgttgtcctatggaacacttgcagctataggttaactctttggtgtgtagaatgatttggggttcatgtgactgcataggcgaaaatattgctatgaattggtttgcaacgatcagaatcaatgaatgcaatgaacgataaatgggttgatattgagttgaaatggtgtgtgcgcccgcccatt

SEQ ID NO: 476 - DNA, 784 bp, Musa acuminata
ataaaaacaaagagaggataaaaataaagaaattataaactcaaccgtctgatcagaaaagcacgggcaagattgatagactgggtaaccgacggcggatcgctggcgtctgttttggactcggtcaaggttagggttttagtgggcatataatgaaacgatccctgcacttggatccttccttggcgaaagattagggtttggggcgttcgagcgatagagcggcgcgacgagagggatggggcactcgaacgtctggaactcgcatccgaagaactacggaccgggatcccgagtttgccgagtttgtgggaacccgcatggactgattaggaagtatggacttatgtgttgcagacagtgcttccgcagcaatgccaaggaaattggcttcatcaagtaccgctaaagatgcccttctatgaggcgaagcctgtaaaatgcagcacttatgatgtttggagtttttattactgaactcaacttatctgatccactgggtttttgtttaagacttgttatttaattggaacgatgtagtgagttgatttcatttctatggaactattatggttgtcaatgctatctgtggcctcttcttcgtcattctccttacattgtaatctgccatccatgagcgtgttttgtggttgtcaatacttggttcatagcattcacaatagcgtgaacgccattagacacctttgtgacggtcaccattttgtgaaagatatggtgatcgacgaacttaatgatgtctgtcgtctgtcgtcttccggccaca

SEQ ID NO: 477 - DNA, 801 bp, Musa acuminata
aaaagcttggacccgtccctcgacgcgttgttattggtcgagggatttgaggcgatcgggcgagagcgcggcgcggggcgggcagagagatggggcactcgaacgtctggaactcgcaccccaagaactatggacctggttctcgtgtttgccgagtttgtgggaacccccatggactgatcaggaagtatggacttatgtgttgcagacagtgcttccgcagcaacgccaaagaaattggctttattaagtaccgctgaagatgtttgcattattcgagatggagcctgcaggatggagcttgtctcagaagtttgttactgaactccattaatgtgatcctatgaattttgtttacctattgaactttttgatttagttggaacttaacatagtgatctgaatcacattgacttgttatggttgttgatgtcatttctccggttgtcctatttcattcttctcatgcttgaactgcagccatatctgtttaattctatgcatattttttttgtagaaatgaaatacatgcatgtttcaatgttgtataacctatggctctatagtctctttgtacatgatgatgtaattttcagaggtccagcattattttgggaggtcctaaggaaaggtgtgtttaatgatttgactcatccttgtacctcctgttctccccaatcttggagaggacttcgtatggcatgaaacatgagaaactgcttgtacctcacaaaccacctatgttttgggatctttttggcttttgggggctttattgttcagctaaaagtacttgtgccg

SEQ ID NO: 478 - DNA, 1068 bp, Brachypodium distachyon
agtttttttttctctagaaaggtccattgcagatgagacttgggctgagacgtgcgacgcagtcgctcactaaacctatcggcccttcaactcatctgtctagccatgtggcgagaatctgtcttaggggtaactgagagtccagtattttgctcaaaaagaaaagaacccgagagcccaggaaacttatgaaacccgacagcccagcaagtaaggcctgtctgcctatagaagaagctagcgccctcgcgacccgctcatttctgccaggcgagagaaagctagggtttgcagttgcaagtcagcacctccgccgccgccgccgccatgggacactcgaacgtctggaactcgcaccccaagaactacggccccggatccagggtttgccgtgtctgcggtaattcgcatggcctgatccggaagtacgggctgatgtgctgcaggcagtgctttcgcagcaacgccaaggacattggcttcatcaagtaccgttaagaatggaaacctcaaaagaagcatggattggaaagttctcatcaaactgtgatgtttcattgaggacgatctttatcatatattatgtaatgactattaatgtttgaatctgagtaatgaaccactgcgactatcctctggaacaatgtgaaacacataattttgttgctcttcagtctcaattgtgatggaaaggatgcgcttgttcttatttttactttgatgaaggatgccaggcacttcagttcgatgctaaatttgtatctatatggccctctgttttgttctttaaatctatgtctgctctcttttgttatgcttgctctgatttttttttatcatcttctgcatagtattaatgtctggtctagattgagcaagtgttctgacgtgttgcagtgtttaattttgttgggagatatgttttggtctggttggcaaaccatttgcccataacattgctaagatgtttccgtatatattcctggctcattcctgtactgttttttttgggaatttcatagcagtattaccccttgttagcatatggaaatggtatgtttacacgaa

SEQ ID NO: 479 - DNA, 958 bp, Brachypodium distachyon
aggcccagcccaaggagagaccgcgggagtcaccgagctagctagggttccacgctttgccgagacctatatcagtctcgccattgcgccgccgccgccgccctcccccaaactcctcgcacgcatcgagctcgcgcgccgccgccgtcgcagcacccggaacgaccgaccgacctcggaggccgaggcgacgatgggtcactccaacgtgtggaactcccaccccaagaactacggccccggctcccgcgtttgccgggtctgtgggaactctcatggtctgatcaggaagtacgggctcatgtgctgcaggcagtgcttccgcagcaacgccaaggatattggcttcatcaagtaccgttgaagacattccgctgctactatgcctgaggtcgtcacctgcttaagagaaatggatcccaatcgatgaaggcttacttgtgctgttagtttttgtttggagtgctgttatagtaaacttgtttgagttttggtgcgaaccatgtggttgttaagctgactatgtaacacttcaaatattttgttattcaactggtttacctgatcttacttacaatgctgtcttggtgttatggtgtacaatgttatatattactgtgtcatgcttcacttttggatgacactactatatagtttctgcacatggaaactgcaatgtgaaagagttgatcttaattcttaagctagtttgtatggatcactgtacccagtgaaacaaaatgtgaactgtattttgttttctgtgggacaggttatttccaagtttctgtactatgatgccatgtggtaaatgcttagtaaaacacaattagtgtgtgtatcactgcttcagcctaacttcattattgtaatcttgtattcattatttgtaattgaatattttccagatcacaatgtagaagttttgttctcaattgattgcatgtttttccaagat

SEQ ID NO: 480 - DNA, 537 bp, Brachypodium distachyon
atctcgctgctccctatataatcctcgcccgttcgccccgccgccacctactcgcctcttcttcccacgcgcgcccccagggttctccacctctaaccggcggctgcgggcaggcggaaaggcgaagagcggcggcgatggggcactccaacgtctggaactcccaccccaagaactacgggcccggctcccgcgtctgccgggtctgtgggaactctcatgggctgatcaggaagtacgggctgatgtgctgcaggcaatgcttccgcagcaacgccaaggacattggcttcatcaagtaccgctaaatcgccttggcttccatgatgagaagctaatcaggagcaaacggtccatttgatagaaggcttaatttcaattccagtaatttagctgtttgctcagtactctactagtaaaactttgtggtttatgtttttgttggaaactgaatgatgtggatgttgaacatgagttaattaccgatcgaaaagccttttgccatgtgttaccatggactgctgttctattttacta

SEQ ID NO: 481 - DNA, 1172 bp, Brachypodium distachyon
gccgccgccatggggcactccaacgtctggaactcccaccccaagaactacgggcccggctcccgcgtctgccgggtctgtgggaactctcatgggctgatcaggaagtacgggctgatgtgctgcaggcaatgcttccgcagcaacgccaaggacattggcttcatcaagtaccgctaaatcgccttggcttccatgatgagaagctaatcaggagcaaacggtccatttgatagaaggcttaatttcaattccagtaatttagctgtttgctcagtactctactagtaaaactttgtggtttatgtttttgttggaaactgaatgatgtggatgttgaacatgagttaattaccgatcgaaaagccttttgccatgtgttaccatggactgctgttctattttactaccattttgatctgattacctattactattggttgatgagaagttgataaagacgacaatggttgctgtttggatacggtacaaaagtgtgagcagttctagcagatcctacatatgaacggcctgtaaactattactgtatgtgaaatttcgtatacagtaattactttgtgctcaattcatcagttcatacatatcgcacataaacgtcacaaatgcatttgtctcaactctaaacgataacgacattagggttaaaagtagctcagtacataggagtgcattaatacagttcaacattaaccaaacacaagacctttgtctgggcgggccttgtcctcagccaaactggacagcgacgccgcaagggccttcacaccacaacgtagtcgacggcgtagtgtgacagcggctctacgcctccttccaaaggaggcagcaggagcttttcggtgaggtggcagcacgggagctcccctcgtcggcagcaggataggcgccaaggtaacatcggagggcgctgtgcttctgcgccgccttcgatcttaagcggcggcggaggcgtcatcgggctgcacggggagatggactggcctccgcggtgaccccccgccccgagttggtagggaggcgaaagggttttaagcggcggagtcggcgttctccctgccctcttctctgcctgaaatatgtgaaaaatctggcgaccaacagttgcgagctttttttatctatgtactgcttctaattataatcaacacaag

SEQ ID NO: 482 - DNA, 335 bp, Chrysanthemum coronarium
ttagccaggcgagagaaaggtagggtttacagagccaggacctccgccgccgtcgccgccatgggacactcgaacgtctggaactcgcaccccaagaactacggccccggatccagggtttgccgtgtctgcggcaactcgcatggcctgatccggaagtacgggctgatgtgctgcaggcagtgcttccgcagcaacgccaaggacattggcttcatcaagtaccgttaagactggaatcctcaaaggaagcatggagtaggaagtcatcatcgaagtgtgttgtttcatcgaggacgatctttgctatatattatgtaatgaactaaatgtag

SEQ ID NO: 483 - DNA, 518 bp, Cocos nucifera
accacgaaaagctagggttaggggtttgtgagtcgtcctcggagcctagcttgtgatttccgctgccttcgataccagcgaagatgggtcactccaacgtttggaactcccatcctaagaactacggccctggatccagggcttgccgcgtgtgtggcaatcctcatgggttgattcggaagtatgggctcatgtgttgcaggcaatgcttccgcagcaatgccaaggacattggcttcatcaagtatcgttaagaagaagaaagcgcctagggcaggcaatagagcaagaatcgccgccatggtttatacattgaattgcttattagattctgaaataggatggatcgtgaagacattgtggttccttgaaactagttattaaagtttgtttctcttggattttgtagaatctgcaccgagttatcgttcaaatgtgacggttcctcttcctgatttcatatagcgtatggtaattttgtggctttgtgacatttatttactgttccaagcgtgttt

SEQ ID NO: 484 - DNA, 1852 bp, Zea mays
tgaactttggcaaaaacaaaatgataaatgaaatttttctggaagaataaagaaagatcacatatcgggccaagtttgggttcaatttaagcaccaagatagatcaagtcatctttgttgggttggtctaatgaaaagcccagtgaagcaatgccatccatctcctacagaagaagccgaacgttttcggttccgctcagagtcataagccaggtcagactaggttagggtttacctgtgaggcctgctcccctgccgccgccgccatgggacactccaacgtgtggaactcgcaccccaagaactacggccctggatctagggtttgccgtgtgtgcgctaacccccacggcttgatccgaaagtacgggctcatgtgctgcagacagtgcttccgcagcaacgccaaggacattggcttcatcaaggtactggccaaaagtttccggcctctgcttccttccctgcaacataagcctgcgttaggtagtggttacctgtttcattggttgggtaatctatgacctaccgtttcttctgttctattatgccatggtccatggtatgtttcgccgtgatgtatctgtgttggtccagctggtactagtttaaatagtctgttactggcttcttagaacttgaagcaatgtccatggcgcccatattgttgcacttatatgcccattgccaatactttgttggattttgcatatcctgttctgtagggtaggtcttagtttagttgtttgcattcgaattagtgtctttctggattttgagtgtcatctctatgcggacacatagcagactgctgtgattatggtgaattgtcccatgattcccagattttggcacctcagcaatttggaaccagggtcaagtttcttattgcaagagttcgttaataattaacatctttttactgctccgcttgtgtgtaagctctgaagcatggttgtttccatatccaaccatagtttcttatgatctagagcttccaaatgactcttttatgatgaagatgccatgcattttagtcgtggtaaacagttgtgctgtggcttcttatttgaaaagttgcattctttttatgcagtaccgctgaaacttggggagctccaaagcatggcaataatggaagcatggatggggacctaaaagatagcctgtactcttattcttatgataaaaccatgtaatgaattgtttggctttgtgtggacgaagttggtgtattctagatggtactcttgaatcttgatgcttccctgctatgctagctgagcatgtcgaaccgctatgaatcagacaatacagtatcaatgttaccactcagtcttgttatttgctgctgcgtatggggagtgatcgacagtctccgccgtgcattgattgtttgtttgtagaggttggagtggatttggataatcctaaatccaattggatctgcctgaccaccctatctgatggctgtgttagatggacataaaaaccttagccttgtgttaatactagggatagatcatagattggaccatactgattggatttgtgcttaaaaacaagctgggcattagtcattttgcattgaagtgggattggaatcggagttttatcacttggattggattgcaatgaatttgtctgcatggattttgaccctaatttatattttcatatgtatgttttaatttaatgaaatcaactagatgtggggcttgtgtcatatgaaaccgttttgtcgtgtgagcagggcataaaaacacccccgtgccaataaagatatttttgtccatattgacttgacatctagtagaacataggtataggctgggctggaatgagcgtggga

SEQ ID NO: 485 - DNA, 359 bp, Avena sativa
atgggacactcgaacgtctggaactcgcaccccaagaactacggccccggatccagggtttgccgtgtctgcggcaactcgcatggcctgatccggaagtacgggctgatgtgctgcaggcagtgcttccgcagcaacgccaaggacattggcttcatcaagtaccgttaagactggaaacctcaaaggaagcatggagtaggaagttatcatcaaagtgtgttgtttcaatgaggacgatctttattatatatcatgtaatgaactaaatgtttgaatcggagtaacaaagcatgaaaccatgttggtcactgctgcttgagcacgggagacagatagttctgttgctattgtggctc

SEQ ID NO: 486 - DNA, 447 bp, Avena sativa
gccgccacctactccttcctcctcccacgcgcaccaaggttttcgcaccggcggcggtggcaggcggaaggcggaaggcgaacgcgtcgacgatggggcactcgaacgtctggaactcgcaccccaagaactacgggcccggctcccgcgtctgccgggtctgtggcaactcgcatggactgatcaggaagtatgggctgatgtgctgcaggcagtgcttccgcagcaacgccaaggacattggcttcatcaagtaccgttaagtcacctggacttgctgccctgaagtgaagctaatcaggggtgaagaaatcgatcattaatagaaggcttaattttaattccagtaatttagttgtatgctccgtacttttccagtaaactttgtgttattatgttttgatgggaactgaatgatgtgattgttcaacacgagttactgcacat

SEQ ID NO: 487 - DNA, 388 bp, Avena sativa
agagaaaggtagggtttacagagcaaggacctcctcctcctcccccgccgccgccatgggacactcgaacgtctggaactcgcaccccaagaactacggccccggatccagggtttgccgtgtctgcggcaactcgcatggcctgatccggaagtacgggctgatgtgctgcaggcagtgcttccgcagcaacgccaaggacattggcttcatcaagtaccgttaagactggcaacctcaaaggaagcatggagtaggaagttatcatcaaagtgtgttgtttcaatgaggaagatctttattatatatcatgtaatgaactaaatgtttgaatcggagtaacaaaccatgaaaccatgttggtgactgctgcttgagcacgggagac

SEQ ID NO: 488 - DNA, 421 bp, Avena sativa
cctcattttagccgagcgagagaaaggtagggtttacagagcaaggacctcctcctcctcccccgccgccgccatgggacactcgaacgtctggaactcgcaccccaagaactacggccccggatccagggtttgccgtgtctgcggcaactcgcatggcctgatccggaagtacgggctgatgtgctgcaggcagtgcttccgcagcaacgccaaggacatcggcttcatcaagtaccgttaagactgacaacctcaaatgaagcatggagtaggaagttatcatcaaagtgtgttgtttcatcgaggacgatctttattatatattatgtaatgaactaaatgtttgaatcggagtaacaaaccatggaacaatgttggtgactgctgcttgagcacgggagactgttgctattttgtc

SEQ ID NO: 489 - DNA, 348 bp, Avena sativa
atgggacactcgaacgtctggaactcgcaccccaagaactacggccctggatccagggtttgccgtgtctgcggcaactcgcatggcctgatccggaagtacgggctgatgtgctgcaggcagtgcttccgcagcaacgccaaggacattggcttcatcaagtaccgttaagacatggaaacctcaaaggaagcatgaagtaggaagtgatcatcaaagagtgttgtttcatcgaggacgatctttattatatatcatgtaatgaattaaatgtttgaatcggagtaacaaaccatgaaaccatgttggtgactgctgcctgagcaggggagacaaatagttctgtag

SEQ ID NO: 490 - DNA, 507 bp, Elaeis guineensis
agtcgttcccagagcttagcttgagttctccgccgccagggaagatgggtcactccaacgtctggaactcccatcccaagaactatggccccggatctcgggcttgccgcgtttgtggcaatccacatggtttgattcgcaagtatgggctcatgtgttgcaggcagtgcttccgcagcaatgccaaggacattggcttcatcaagtatcgttaagaagaagaaagcatggtcgggacaggcaatagaggaagaagacgtgtggacatggtttcccttgaattgctttttttagtttctaagataggatagttactgaagacattgtagttcctcaaaagtaattgtagaagtttgcttccctttcttcgggattttggagaacatgtactgagttttcattcagatgtgagagttcctcttcctaaattcaggtattgcctgcattttgtgttatcctcttgaaatttattactagttggaagctttttctttcaaaaaaatgtgt

SEQ ID NO: 491 - DNA, 510 bp, Elaeis guineensis
cgagagtgcaataaaggccctagctttggacggcacttcaattccaaaagtcgaagagcagagagaaagcggcgcgagagagatggggcattctaatgtctggaattcccaccccaagaactacggccctggatctcgagcttgccgagtttgtgggaaccctcatggactgatccgaaaatatggattgatgtgctgcagacagtgcttccgcagcaatgccaaagacattggctttattaagtatcgctgaatatgttacttcgcttcgaggaatggacttatggagctctcacagttcggaagaagatctttattgctataatttatcaatgtcatctgcttatttgtttatctggtaaacatcatggttaagcaaattataaactgagttatgaaaaaatcggtgattgatcttgttctgccttagaactattaggcggtccttttttaaattactgcaatgattgtcggcattatcgcaatcaaacatctcaatcactttggcta

SEQ ID NO: 492 - DNA, 922 bp, Ananas comosus
cgtgccttttacggtgatgcctagctgtaataaaatcataattgggggtgttttacgaaaaagtacaatccctcgctcaaaattagggttttggccgccacaataaaaacctcttcctctctccacgccgcacaccgccacatcctccacgagcttgagactattagggtttcttctgcgatctagcgaaggaacaagcgagggagaaagagatggggcactcgaacgtgtggaattcgcatcccaagaactacggtcccggatctcgtgtttgtcgggtttgcgggaaccctcatggactcatccggaagtatggactcatgtgctgcaggcagtgcttccacagcaatgctaaggacatcggattcattaagtatcgctgagaacttttcttttaaagcgcggatcccttattggtcaaggaaatggatctgccacctatcagggaacttcatattgaactttttggcaatctctgttgtttaatgatttcctagttatttttggctggtctcagttgcttgtgcaccatttactgggatgatgtggttttttctgtcttaatgggaatttttccctagcatttccattgtagcactcaatactttttttaagtggaggtatttgcattttgcatgtttttttttagcattatttgattgcttattgtagtttgtttatattaggcaaaacttacgaaatgtcccatgaaaattgcatttttattccatcggttatcgagacttactgataacacccttgatttataaatgggtattatttgacctctattgtaaagggttaaaattttatgattttctagccaaaaagtgtggagtactgaggttttcacttgtatcttttttcaatttaacccttgaaaaatttataatttgccaaataattttatgaaaattttatt

SEQ ID NO: 493 - DNA, 507 bp, Secale cereale
ggcgagagcaaaaggtagggtttccagttgcaagccgcgccgccgccgccgccgccatgggacactcgaacgtctggaactcgcaccccaagaactacggccccggatccagggtttgccgtgtctgcggcaactcgcatggcctgatccgcaagtacgggctgatgtgctgcaggcagtgcttccgcagcaacgccaaggacattggcttcatcaagtaccgttaagaatggaaaccaaggaagcaaggactaggaaattatcatcgtcgaactgtggtgcttcatgaggccgatctttatcctataaactatgtaatgaactactattaatgtttgaatcgtagtgaaaaaactgtgaaaccatgttggtgacttctgtttgagcatgtgaaaccgataattctgttactgttgtggcattatgattagaaggttgctctgcatcattttatattccttagtgttcatacctattcttgcctggattctgttcttaatccgtctc

SEQ ID NO: 494 - DNA, 605 bp, Secale cereale
ctcccacgcgctcctagcaaccggcggcggcgcggaaggcggaaggcgaaggcgaaggcggcgacgatggggcattccaacgtgtggaactcccaccccaagaactacgggcccggctcccgcgtctgccgggtctgtggaaactcgcatggactgatcaggaagtatgggctgatgtgctgcaggcagtgtttccgcagcaacgccaaggacattggcttcatcaagtaccgttaattcacctggttctggtaccctgaagtgaagctaatcagggatgaaggaatggaacacttaatagaaggcttaatttcgattccagtaatgtttgctcagtactctgcgagtggctttatgttttgatggatactgaatgatgtaattgttgaacatgagttaattacccatggagagccttttatcatactgatgcctgtctttgtccccttccattgtcatggtagttagaagtaagtaattgttttattagcacgtatttggtcgatggctgtaacagaccagcaaccaagcgaatagacatatccctaactcaaaaaaaaaaaaaaactaagagactagcacgacgacacaggaggtagggaggg

SEQ ID NO: 495 - DNA, 467 bp, Secale cereale
agagcaaaaggtagggtttccagttgcaagccgcgccgccgccgccgccgccatgggacactcgaacgtctggaactcgcaccccaagaactacggccccggatccagggtttgccgtgtctgcggcaactcgcatggcctgatccgcaagtacgggctgatgtgctgcaggcagtgcttccgcagcaacgccaaggacattggcttcatcaagtaccgttaagaatggaaacctcaaaggaagcaaggactaggaaattatcatcgtcgaactgtggtgcttcatcgaggccgatctttatcctataaactatgtaatgaactactattaatgtttgaatcgtagtgaaaaaaccgtgaaaccatgttggtgacttctgtttgagcatgtgaaacccataattctgttactgttgtgccattatgattagaaggttgctctgcatcaattttaaaaaaaaaaaaaa

SEQ ID NO: 496 - DNA, 568 bp, Triticum aestivum
gcaaaaggtagggtttccagttgcaagccgcgccgccgccgccgccgccatgggacactcgaacgtctggaactcgcaccccaagaactacggccccggatccagggtttgccgtgtctgcggcaactcgcatggcctgatccgcaagtacgggctgatgtgctgcaggcagtgcttccgcagcaacgccaaggacattggcttcatcaagtaccgttaagaatggaaacctcaaaggaagcaaggactaggaaattatcaacgaactgtggtgcttcatcgaggctgatctttatcctataagctatgtaatgaactactattatgtttgaatcctggtgacaaaaccgtgaaaccatgttagcgactgctgtttgagcatgtgaaaccgataattctgttactgcgtgccattatggttagaaggttgctctgcatccttatatttttattatcttgcgaaggccggccatgcatttgttttgatgctctaattttatattcctcgtgtgttcatacctattcttgcctggcgtctgttcttaatcagtctctgctgtgctctact

SEQ ID NO: 497 - DNA, 647 bp, Triticum aestivum
atgggacactcgaacgtctggaactcgcaccccaagaactacggccccggatccagggtttgccgtgtctgcggcaactcgcatggcctgatccgcaagtacgggctgatgtgctgcaggcagtgcttccgcagcaacgccaaggacattggcttcatcaagtaccgttaagaatggaaacctcaaaggaagcaaggactaggaaattatcaacgaactgtggtgcttcatcgaggctgatctttatcctataagctatgtaatgaactactattatgtttgaatcctggtgacaaaaccgtgaaaccaagttagtgactgctgtttgagcatgtgaaaccgataattctgttactcttgtgccattctggttagaaagttgctctgcatccttatatttttattattttgtgaaggccggccatgctttgttttgatgctctaattttatattcctcgttttcatacttggcttctgttcttaatcagtctctgctgtgctctactatcccctctgtggttgtttatgatctttgttgttgaacggttgtccttagctgccctgactttgcttaagctagaaaatgtgtctgtaattgttaaatggtcatctataacacttgtcaatgctgggcttctcttgagta

SEQ ID NO: 498 - DNA, 570 bp, Triticum aestivum
ccacgcgcatcctagcaaccggcggcggcaggcggaaggcgaacaagaagatggggcactccaacgtctggaactcccaccccaagaactacgggcccggctcccgcgtctgccgggtctgtgggaactcccatggactgatcaggaagtatgggctgatgtgctgcaggcagtgtttccgcagcaacgccaaggacattggcttcatcaagtaccgttaattcacctggtcctgctaccctgaagtgatgctgatcagggttgaaggaatggagcacttaatagaaggcttaattacaattccagtaatgtttgctctgtactccgagagtggctttatgttttgatggatactgaatgatgtaattgttgaacatgagttaattacccatggagaagtctttatcattctgttgactgtgtttgtcccctctcattgccattggtagttataagtaacttgtttttttattagaacgtattgggtcaatggctgtaacagaccagcaacccagcaaatatgcttatttcatttctatctgttgttgcataaagtggcctttaaaacgc

SEQ ID NO: 499 - DNA, 569 bp, Triticum aestivum
tttcctcctcccacgcgcatcctagcaaccggcggcggcaggcggaaggcgaacaagaaggcggcgacgatggggcactccaacgtctggaactcccaccccaagaactacgggcccggctcccgcgtctgccgggtctgtggaaactcccatggactgatcaggaagtatgggctgatgtgttgcaggcagtgtttccgcagcaacgccaaggacattggcttcatcaagtaccgttaattcacctgttcctggtaccctgaagtgaagctgatcagggatgaaggattggagcacttaatagaatgcttaatttcaattccagtaatgtttgctcgtggttttatgttttgatggatactgaatgatgtaattgttgaacatgagttaattacccatggagaagtcttttatcgttctgttgtctgtgtttgtcccctctcattgtcattgttagttataagtacttgtttttttattagaacatattgggtcaatggctgtaacagaccagcaacctagcaaataagcttatttcatatctatctgtgcttgtatataagcacatg

SEQ ID NO: 500 - DNA, 433 bp, Triticum aestivum
cgcatcctagcaaccggcggcggcaggcggaaggcgaacaagaaggcggcaacgatggggcactccaacgtctggaactcccaccccaagaactacgggcccggctcccgcgtctgccgggtctgtggaaactcccatggactgatcaggaagtatgggctgatgtgctgcaggcagtgtttccgcagcaacgccaaggacattggcttcatcaagtaccgttaattcacctggtcctgctaccctgaagtgaagctaatcagggatgaagtaatggaactcttaatggaaggcttaatttcaattccagtaatgattgctcagtactctgagagtggctttatattttgatggatactgaatgatgtaattgttgaacatgagttaattacccatggggtagccttttatcattctgttgcctgtgtttgtc

SEQ ID NO: 501 - DNA, 527 bp, Cynodon dactylon
aaatcagagaggtagtagggtttacaagtcgagaccgcgccgccgccgccgtcgccatgggacactccaacgtgtggaactcgcaccccaagaactacggccctggatccagggtttgccgtgtgtgcgccaacccccatggcctgatctacgggctcatgtgctgcaggcagtgcttccgcagcaacgccaaggacatcggcttcatcaagtaccgctgaagcttgagaggtcacggaactggaaacagcaccatggattgggaacatctccagcatgtcttttggcttagtctaaaatcaaaccatgtaatgaattgtgtgatttgaaccaattgacctcgagtgttatgcatgatgtgcaccttaagccctgtttgacatgattcctgtcgtgcccctctgcaatttttcgtttgaatagatgtttgaagtgattcctgggtttccctttggtgatgcttctactgcacccctgtatcagagatttagagctgagttttttgttcgatctgtacaacttcttag

SEQ ID NO: 502 - DNA, 477 bp, Pseudoroegneria spicata
gcaaaaggtagggtttacagttgcaagccgcgccgccgccgccgccgccatgggacactcgaacgtctggaactcgcaccccaagaactacggccccggatccagggtttgccgtgtctgcggcaactcgcatggcctgatccgcaagtacgggctgatgtgctgcaggcagtgcttccgcagcaacgccaaggacattggcttcatcaagtaccgttaagaatggaaacctcaaaggaagcaaagactaggaaattatcatcgaactgtggtgcttcatcgaggccgatctttatcctataaactatgtaatgaactactattaatgtttgaatcggagcgacaaaaccgtgaaaccatgttagtgaccgctgtttaaaccatgttggtgactgctgtttgagcatgtgaaaccgataattctgttactgtcgtgccattatgattagaaggttgctctgcatccttatattttta

SEQ ID NO: 503 - DNA, 417 bp, Malus domestica
ccccgagtgaatcagctggtaccgccatagcttctgcttccgccgactaaatcatggggcactcaaacgtctggaattctcaccctaagaactacggccctggatcccgcacctgtcgcgtgtgtggaaaccctcatgggttgatcaggaagtacggcctcatgtgctgcaggcagtgcttccgcagcaatgccaaggagatcggcttcattaagtaccgttaaatggcagacattcaacattccaggactcgatgttttggcccaagaagagtagtattggtttctgagttctcctcaacttttaagaaatatttttgttttagttgatctgctgttgaacttgaattggtcgtcagactaagaatactgtgttattaatgaattaaagtttgatttatgtcctctttcttgtggc

SEQ ID NO: 504 - DNA, 736 bp, Fagus grandifolia
ttttcgattagctcttgctcgcgcagctctgcaaatttggctccttactcatacacagcaagaaccaatcatggggcactcaaacgtttggaactctcaccctaagaactacggccctggctcccgtacctgtcgtgtgtgcgggaatccccatgggttgatcaggaagtatggtctcatgtgctgcagacagtgcttccgtagcaacgccaaggaaattggcttcatcaagtaccgttaaatggatgcaacaatagaggttttggcccaagcaatcatcagattagtgatttcaaagattgaaggaactttttcattttctgttttagtttatcgaatgttgaacttctgttgattgtgggattatgaatatttttgcggtatttatttgaggttaaatcatataacactatcctttgtttgctgtccttatatatatttttgttatctactatatctttttgctcactatggtattttgatggtatcattatataactcatgggtgttaaatattgaaaaagtgtttattgagattccagttggttgctcaaggaagtgagatgaatatttgtatctgaaagcttcattgctcgcccattctataatggtttaaggattatgactgttatttgcattggtgggcatggtggttaatttcatttgtaacaacctgtggagtacttgtgtgtttcttgattggctgcagttgcggttatgagttgactctgcctgt

SEQ ID NO: 505 - DNA, 371 bp, Fagus grandifolia
tcaaatccttcattttttcttgcaaaaaacataagctctcaaagcgccgcactgagttagagcttctcagagaaaaatggggcactccaacgtgtggaactcgcatcctaaaaactacggccctggttctcgtacttgccgggtctgtggtaaccctcatgggttgatccggaagtatgggctgatgtgttgcaggcagtgcttccgtagcaatgccaaggaaattggctttatcaagtaccgctaaaggatgggaggatttaatccacattgacaaagttttcgtccaaagaaatggtgcttgcttggcttgctcccaccccttttcttttgttttcgtgatgtagtctattgcttgaactagaagttat

SEQ ID NO: 506 - DNA, 921 bp, Ricinus communis
taaatactgaatgtagaaagaaaatagaaaatacataaaataaatttggattcacacccatgggtccaaacccgaatgaaaagtttgactagggtttttgtttggcatctctataaatactttctttactcttcgaaaatcccctgctaatcttagagttttctgcaactctcgagcggctctgcgtttccaaatcttcaaaagaaatcatgggtcactccaacgtttggaactctcaccctaagaactacgggcctggttctcgtacctgccgtgtttgtggaaatccccatgggcttatcaggaaatatgggctcatgtgctgcagacagtgcttccgtagcaatgccaaagaaattggcttcatcaagtaccgctgaagggtaacctcttgttctacaatagcagagaacaagtatggagtaatggtttctgtttgaattgaagtctaaggaaactttttgtttagatgatgtattgaactcgaattgatgttggacaaaacatatgtggaatgcagcgagaatattttggaatcactcctttaaggatgattctttttctgattctatctcttttgttttcatgtattcttacatctgttcaatgtatggtgttatgcctgtgggatcagttaaaagcgagaatttttactagccatagagtcaatgatcttgtttaacttgcaaagtttggcattatatggcaatacttgccttggataaccatgacaaccacattaaaggacagatttgaaccaccgctacacacacgcaagtagtagagtaatacatcatcattgacattgagttgccgccccccacattaggttgtttgtaagctcaaagacaatattagtgctaacaaactagacaaagatgaccaattagcatgtgagttttcttcccttttatgtgatat

SEQ ID NO: 507 - DNA, 1049 bp, Ricinus communis
tgcaacatgagattattaaaataaaaaattatttcttacttgtttctccccgtaacataaatttaggggctaatttatagcacagtaaaaatgtatacagcatagttgttatttatgaccaaggcggtgcgttttcggaaaaacggtcacgtgcttagacccagacctataaaatgcaacaaaatttctattttcctcccacaaaatcagagtttagggtttttagctccagagaggcggcgcgaagcaagtcaatctctcaatctcaggaaaacaatgggtcactcaaatgtctggaactcgcatcctaagaactacggtcccggttctcgtacttgccgcgtttgtggaaaccctcacggattgattaggaagtatggcctcatgtgctgcaggcagtgcttccgcagcaatgccaaggagattggatttattaagtatcgctgaatgttcgatggatctgctatgcatttccaaggctttgcctccagtatgacgctgagaagattttcatttttttctgcttcaatcagtaatgtaatgctggattaagaattgctgattgtattattagttcaatgctcgagcagtattagagtaattttgttatatggatttaagtaaagagttgctttgagttatttcttctgttttagttttctatactgctttttatactcctttgtttctaaattcatatggatggctgtgaagaaaggttaattagatggtggttttagaatggcctctgggcttgtttttaattcgaaccttgagtaggtatttatgtgcaaattcatctatattctcttgttcttcatatgtttatccgcaaatttgaagtagatgtatcgtggggtaaaaagaaccttggatagaatttagctcttgccccttgtcctttatcatgggatatttctttggatttggaagcagggatattaaacactctggttgatgcttgttatcaaatttagtgcagggtattacgcctttaaaatagttccaacttctagatccattcgagcactgttttccggatccttagg

SEQ ID NO: 508 - DNA, 772 bp, Cocos nucifera
gctcgccgccccccggccgaaggccccctaaaagatcgcctaattgcgagttttccgccggctaaaattagggtttcgagggtgcgataaaggcccacctttgacggcacctcaattccaaaagtcgaggagcagtgagctagcggcgcgagagagatggggcattctaatgtctggaattcccaccccaagaactacggccctggatctcgagcttgccgagtttgcgggaaccctcatggactgatccgaaaatatggattgatgtgctgcagacagtgcttccgcagcaatgccaaagaaattggctttattaagtatcgctgaatatgttacttcgcttcgaggaatggacttgtggagctctcacagttccgaagaaaatctttgttgctataatttatcattgttatctgcttatttgttcatctggtaaacttcatggttaagcaaattatgaactgagttgtgaaaaaattggtgattgatcttgttctgccttcgaactaggctgtcctttctttaaactactgcaatgattgtaggcattatcgcaatcaaacatctcaatcactttggctaggcttctagcaagtactgcaagattggtttctaagtggcatggatttgaatgctggcagtggtagaagatgttccttttggagtagattttatgccgtagaatttgagggagagctatcactttttggaatgtgatcactctgatttgccagaacttttgtttactttaggtagctggtgttgtttatcc

SEQ ID NO: 509 - DNA, 744 bp, Cocos nucifera
aggtacaagtctaaacagtgctatagttctaatagctcgcttcttctgtcgattaaaaatcccaggtcttgacggaaacttaccgtgcttaaaaagtggtcgagtgtctccgggtcttaagccggcttcaattagtgtttcaagggtgctataaaaaccctagctttctacatagtagacggaggactaggtttcgcgtgcgatctgagagcgagcggcgcgagcgagatggggcattctaatgtctggaattcccatcccaagaactatggccctggatctcgagcttgtcgagtttgtggtaaccctcatggactgatccggaaatatggattgatgtgctgcaggcagtgcttccgcagcaatgccaaagaaattggctttatcaagtatcgctgaagatgttatgtccacatgaggaccggacttgtgaagctgccgtgttgccggagaaagtcttttgtgctctaatgtatcaatgtgatatgcttcatctgttcacttggtaaacttcatggttttgcaaattatgtagtgaactgagtttgagagattggtgataggacatattctgccataaaacgttttttgtgatcctttctttaaataactgcaatatttgtctacattatatatgttaaaatcaaacacctcagtcacttcagacagtttttcagtaactatgagactggtttcgaaatgacatagatacgaatgatggtagcgatagaaaaccgacttccc

SEQ ID NO: 510 - DNA, 485 bp, Vigna unguiculata
ggattgatatttgaccctaacaaaaccctaatttcagtgtttgtctataaattgatatctgcaggaagagctaaggcttctcttgcatattcataagggatcgcgttctagtattgaaagttcttccgcggcgccgcaatgggacactccaacgtttggaactctcaccccaaaaactatggtcctggttctcgtacttgccgtgtgtgtggaaacccacatggattgatcaggaagtatggccttatgtgctgcaggcagtgcttccgtagcaatgccaaggagattggcttcatcaagtatcgctaaggagcttctgtcacctccctaccgatgttattttctggccctaggatatgctgaggatgttatgttggaagaaacttgagactttttttctaattaattatcagactttattctgtggatctaagaatacttttaaatatattgttttgaagtattgacttaaaaaaaaaaaaaaa

SEQ ID NO: 511 - DNA, 588 bp, Vigna unguiculata
cttggaggctagggttttgggattcttgcgttttcgtctttgcaaatcagcaacatggggcactccaacgtgtggaactcccatccaaaaaactatgggcctggctctcgcacctgccgcgtgtgtgggaaccctcatggattgattaggaagtatgggcttatgtgttgcaggcagtgtttccgtagtaatgccaaggaaattggcttcattaagtatcgctgaatgagtgatcagtgtccatcttcccctacggtttttggattctggcattagtgatgatgtggtggggatgatttcattgtttgaagaatttaagaatttctatggcatttattcaagttatttatcacgctcaagttgttgaactgagaatctttttgttttatataattgttttgagctatatgtttttgtggccatttatcattatgcaattttctatacctacttctttagtagttccatgtgtttggttttatattgaccaggatggtacaaatgtcatcacccttccaacgccaatacttgtacttttatattgggtcttatcctaaccccgtttggaaaaagcggaaaagttctaca

SEQ ID NO: 512 - DNA, 384 bp, Festuca arundinacea
agaagacgatgggtcacgacaacgtgtggaactcccaccccaagaactatggccccggctcccgcgtctgccgggtctgtggcaactctcatggtctgatcaggaagtacgggctcatgtgctgcaggcagtgcttccgcagcaacgccaaggacattggcttcatcaagtaccgttgaagactcttcatgtttgtgactgagatctgtacctgcatcagaggaatggatccttcattcaaggcttaaattatatgctttagttttttgttcagagtactgtgctagtaaacttgttgaagttttggtgagaaccatgtggttgttaaagtgactatgtgatcaaacttggaagtaatttctgtattcgatgacataaccctga

SEQ ID NO: 513 - DNA, 472 bp, Festuca arundinacea
agtggtatcaacgcagagtacggggaactccttccttcttcccacgcgcaccaaggttttcccaccggcggcggaaggcggaaggcgaacgcgtcgacgatggggcacgacaacgtctggaactctcaccccaagaactacgggcccggctcccgcgtctgccgggtctgtggaaactcgcatggactgatcaggaagtacgggctgatgtgctgcaggcagtgcttccgcagcaacgccaaggacattggcttcatcaagtaccgttaagtcacctggacctgctgccctgaagtgaagctaatcaggggggaagaaatggatcacttaatagaaggcttaatttcaattccagtaatttagctgtttgctcagtactatgctagtaaactttgtggctttatgttttgagatgggaactgaatgatgtgattgttgaacatgagttaattgcacatcggaaagcctttta

SEQ ID NO: 514 - DNA, 435 bp, Festuca arundinacea
tttacagagtcaggacctccggtgccgccgccgccatgggacacgacaacgtctggaactcgcaccccaagaactacggccccggatccagggtttgccgtgtctgcggcaactcgcatggcctgatccggaagtacgggctgatgtgctgcaggcagtgcttccgcagcaacgccaaggacattggcttcatcaagtaccgttaagactggaacctcaaacgaagcatggagtaggaagccatcatcaagtgtgttgtttcatcgaggacgatctttattatatatcatgtaatgaactaaatgttcgaatctgagtaacaaaccttgaaaccatgttggtgactgctgcttgagcatgtgaaacagataattgtgttgctattgtgtctcattatgtttgtgtgttcatatttttatctttgtgaaagctggc

SEQ ID NO: 515 - DNA, 515 bp, Festuca arundinacea
agtggtatcaacgcagagtacgggggaccctcaaatcgcttagagctccagcgccgccgttcacacgaaaggaagctctcggagaaggagaagacgatgggtcacgacaacgtgtggaactcccaccccaagaactacggccccggctcccgcgtctgccgggtctgtggcaactcccatggtctgatcaggaagtatgggctcatgtgctgcaggcagtgcttccgcagcaacgccaaggacattggcttcatcaagtaccgttgaaggctctttggtttgatgctgtgacggagatccttacctgcgtcagaggaatggatccttcagtcaaggcttaatttatatgctttagctttttgttcagagtactatgctagtaaacttgttgaaattttggtgagagaaccatgtggtttttaagtgattatgcgatcaaactcgaagtaatttctgtattcgaagacataaccctgatcctatgtggaatgtctcaaatgcttttgtattgtttc

SEQ ID NO: 516 - DNA, 507 bp, Festuca arundinacea
agtggtatcaacgcagagtacggggggccccctcaaatcgcatcgagctccagcgccgccgttcacccgaaaggaagctctcggaggaggagaagacgatgggtcacgacaacgtgtggaactcccaccccaagaactacggccccggctcccgcgtctgccgggtctgcggcaactcccatggtctgatcaggaagtatgggctcatgtgctgcaggcagtgcttccgcagcaacgccaaggacattggcttcatcaagtaccgttgaagactctttggtttgatgctgtgacggagatccttacctgcgtcagaggaatggatccttcattcaaggcttaatttatatgctttagcgttttgttcagagtactatgctagtaaacttgttgaaattttggtgagagaaccatgtggttgttaaagtgattatgtgatcaaactcgaagtaatttctgtattcgacataaccctgatcctatgtggaatgtctctaatgcttttgt

SEQ ID NO: 517 - DNA, 555 bp, Festuca arundinacea
agtggtatcaacgcagagtacgggggatctcagccaggcgagagaagagtagggtttactgagtcaggacctccggtgccgccgccgccatgggacacgaaaacgtctggaactcacaccccaagaactacggccccggatccagggtttgccgtgtctgcggcaactcgcatggcctgatccggaagtacgggctgatgtgctgcaggcagtgcttccgcagcaacgccaaggacattggcttcatcaagtaccgttaagactggaaaccaggaagcatgggataggaagccatctcatcgaggacgatctttattatatatcatgtaatgaactaaatgtttaaaattcggagtaacaaaccttgaaaccatgttggtgactgctgcttgagcatgtgaaaccgataattgtgttgctattgtatctcattatgtttgtgtgttcatatttttatctttgtgaaagctggcgcacttctgtttggtgctcttttacattaccaaaaacaaaaaaaaagaaaaaaaaacaaaagtactctgcgttgataccact

SEQ ID NO: 518 - DNA, 492 bp, Festuca arundinacea
acaccacgactgcagtggtatcaacgcagagtacgggggaggcgagagaagggtagggtttacagagtcaggaccttcggtgccgccgccatgggacacgaaaacgtctggaactcgcaccccaagaactacggccccggatccagggtttgccgtgtctgcggcaactcgcatggcctgatccggaagtacgggctgatgtgctgcaggcagtgcttccgcagcaacgccaaggacattggcttcatcaagtaccgttaagactggaacctcaaacgaagcatggagtaggaagccatcatcaagtgtgttgtttcatcgaggacgatctttattatatatcatgtaatgaactaaatgttcgaatctgagtaacaaaccttgaaaccatgttggtgactgctgcttgagcatgtgaaacagataattgtgttgaagaaaaaaaaaaaaaaaaaaaaaaaaaaaaaaaaaaaaaaaaaaaaaaaaaaaaaa

SEQ ID NO: 519 - DNA, 504 bp, Festuca arundinacea
agtggtatcaacgcagagtacgagggaaatcgcatagagctccagcgccgccgttcacccgaaaggaagctctcggagaaggagaagacgatgggtcacgacaacgtgtggaactcccaccccaagaactacggcccagggtcccgcgtctgccgggtctgtggcaactcccatggtctgatcaggaagtatggccttatgtgctgcaggcagtgcttccgcagcaacgccaaggacattggcttcatcaagtaccgctgaagactctttggtttgatgctgtgacggagatccttacctgcgtcagaggaatggatccttcattcaaggcttcatttatatgctttagctttttgttcagagtactatgctagtaagcctgttgaaattatggtgagagaaccatgtggttgttaaagtgattatgtgatcaaactcgaagtaatttctgtatttgacaaaaaaaaagaaaaaaaaacaaaagtactctgcgttgataccact

SEQ ID NO: 520 - DNA, 494 bp, Festuca arundinacea
agtggtatcaacgcagagtacgggggactccttgcttcttcccacgcgaaccaaggttttcccaccggcggcggaaggcggaaggcgaacgcgtcgacgatggggcacgacaacgtctggaactctcaccccaagaactacgggcccggctcccgcgtctgccgggtctgtggaaactcgcatggactgatcaggaagtacgggctgatgtgctgcaggcagtgcttccgcagcaacgccaaggacattggcttcatcaagtaccgttaagtcagctggacccgctgccctgcagtgaagctaatcaggggtgaagaaatggatcgcttaatagaaggcttaatttcaattccagttatttagctgtttgctcagtactactctgctagtaaacttcgtggctttatgttttgatgggaactgaatgatgtgattggtgaacatgagttaattaccagacgatcaaaactattcgtgctctctttaatctgatg

SEQ ID NO: 521 - DNA, 596 bp, Festuca arundinacea
agtggtatcaacgcagagtacgggggactccttccttcttcccacgcgaaccaaggttttcccaccggcggcggaaggcgaacgcgtcgacgatggggcacgacaacgtctggaactctcaccccaagaactacgggcccggctcccgcgtctgccgggtctgtggaaactcgcatggactgatcaggaagtacgggctgatgtgctgcaggcagtgcttccgcagcaacgccaaggacattggcttcatcaagtaccgttaagtcacctggacccgctgccctgaagtgaagctaatcaggggtgaagaaatggactgcttaatagaaggcttaatttcaattccagtaatttagctgtttgctcagtactactctgctagtaaacattgtggctttatgttttgatgggaactgaatgatgtgattggtgaacatgagttaattaccagacgatcaaaacgattcgtgctctctttaatctgatgctctgggaaaatattattgatcttttgttttgatcgtacataaatgtgaaaatgatcgttggctagaaaaaaaaaaaaaaaaacaaaagtactctgcgttgataccact

SEQ ID NO: 522 - DNA, 491 bp, Festuca arundinacea
agtggtatcaacgcagagtacgggggaaatcgcatagagctccagcgccgccgttcacccgaaaggaagctctcggagcaggagaagacgatgggtcacgacaacgtgtggaactcccaccccaagaactacggccccggctcccgcgtctgccgggtctgtggcaactcccatggtctgatcaggaagtatgggctcatgtgctgcaggcagtgcttccgcagcaatgccaaggacattggcttcatcaagtaccgttgaaaactctttggtttgttgctgtgatggagatccttgcctgcgtcagaggaatggatccttcattgaaggcttaatttatatgctttagctttttgttcagagtactatgctagtagacctgttgaaatttttgtgagagaaccatgtggttgttgaagtgattatgtgatcaaactcgaagtaatttctgtattcgaagacataaccctgatcctatgtggaatgtctct

SEQ ID NO: 523 - DNA, 441 bp, Festuca arundinacea
agtggtatcaacgcagagtacgggggatttcagccaggcgagaggaagctagggtttacagagccaggatctccggtgccgccgccatgggacacgacaacgtctggaactcgcaccccaagaactacggccccggatccagggtttgccgtgtctgcggcaactcccatggcctgatccggaagtacgggctgatgtgctgcaggcagtgcttccgcagcaacgccaaggacattggcttcatcaagtaccgttaagactggaaacggcaaaggaagcatggagtaggaagccattatcaaagtgtgttgtttcatcgaggacgatctttattatatatcatgtaatgaagtaaatgtttgaatcggagtaacaaaccttgaaaccgtgttggttctgctgcttgagcattcgaaatagataattgtgttgctattgtgt

SEQ ID NO: 524 - DNA, 566 bp, Festuca arundinacea
agtggtatcaacgcagagtacggggggctcaaatcgcatagagctccagcgccgccgttcacccgaaaggaagctctcggagaaggagaagacgatgggtcacgacaacgtgtggaactcccaccccaagaactacggcccagggtcccgcgtctgccgggtctgtggcaactcccatggtctgatcaggaagtatggccttatgtgctgcaggcagtgcttccgcagcaacgccaaggacattggcttcatcaagtaccgctgaagactctttggtttgatgctgtgacggagatccttacctgcgtcagaggaatggatccttcattcaaggcttcatttatatgctttagctttttgttcagagtactatgctagtaagcctgttgaaattatggtgagagaaccatgtggttgttaaagtgattatgtgatcaaactcgaagtaatttctgtatttgacataaccctgatcctgtgtggaatgtctctaatccttttgtattgtttcatgacttttaaaaaaaaaagaaaaaaaaacaaaagtactctgcgttgataccact

SEQ ID NO: 525 - DNA, 472 bp, Festuca arundinacea
agtggtatcaacgcagagtacgggggactccttccttcttcccacgcgaaccaaggtttcccaccggcggcggaaggcggaaggcgaacgcgtcgacgatggggcacgacaacgtctggaactcgcaccccaagaactacgggcccggctcccgcgtctgccgggtctgtggaaactcgcatggactgatcaggaagtacgggctgatgtgctgcaggcagtgcttccgcagcaacgccaaggacattggcttcatcaagtaccgctaaatcacctggacctgttgccctgaagtgaagctaatcaggggtgaagaaatggatcacttaatagaaggcttaatttcaattccagtaatttagctgtttgctcagtactactctgctagtaaactttgtggctttatgttttgatgggaactgaatgatgtgattgttgaacatgagttaattgcacatcggaaagcctttta

SEQ ID NO: 526 - DNA, 404 bp, Hevea brasiliensis
gtttctgtagtctctctggtgctgccctgcgtttcaaaggcttcagagtaaatcggtagtcatgggtcactcaaacgtctggaattctcatcccaagaactacgggcctggttctcgtgcctgccgtgtttgtgggaatccccatgggttgatccggaagtatggactcatgtgttgcagacagtgctttcgtagcaatgccaaggaaattggcttcatcaagtatcgctgaaggataaacacctcatccgctaaaggagagaacaagtatgattcaagagtagtggtttctgttttgatgaacttgaagaaatgtttaattttggtgatgtgttgttgaacttgggttgatgttagacaacaattagttttgaatgctatgagaatattttgtgggtttcatt

SEQ ID NO: 527 - DNA, 506 bp, Humulus lupulus
acgactgcttgggctctcgattctagtcctcttcctctcccacctgccatcgaatcatgggacactccaacgtctggaactcgcaccctaagaactatggccccggttcacgcacctgccgtgtgtgtggaaacccccatggtttgatccggaagtatggtctcatgtgttgcagacagtgcttccgcagcaatgccaaggagattggcttcatcaagtaccgttaagagggatttggcttatatttttgttggagcggatgttttggcctaaaggataatcttattagctattttctgtttttttagatctttttcttaagaggaaagatttttgttttcatgttttagtttgttctaatgttgagcatgaattggatttggaatttctgtagtgtggaatcctttggattaaagtaaatttaaagtttatctatccgctcattgtttcacccttatcattgatcttaccatgcgtttatcgtaaaaagaaaaaaaaaactccag

SEQ ID NO: 528 - DNA, 571 bp, Humulus lupulus
tatatgtaaatacatataaataataccaagattgtccacttacgtccgaaaaaaacgctcggctattctctacgactgcttgggctctcgattctagtcctcttcctctcccacctgccatcgaatcatgggacactccaacgtctggaactcgcaccctaagaactatggccccggttcacgcacctgccgtgtgtgtggaaacccccatggtttgatccggaagtatggtctcatgtgttgcagacagtgcttccgcagcaatgccaaggagattggcttcatcaagtaccgttaagagggatttggcttatatttttgttggagcggatgttttggcctaaaggataatcttattagcttttttctgtttttttagatctttttcttaagaggaaagatttttgttttcatgttttagtttgttctaatgttgagcatgaattggatttggaatttctgtagtgtggaatcctttggattaaagtgaatttgaagtatatctatccgctcattgtttcacccttatcattgatcttaccatgcgtttatcataattattctttttttc

SEQ ID NO: 529 - DNA, 564 bp, Humulus lupulus
atcttaaagtggtagcttttgttttctgcctacggagccggagcggaagaagaagcagaagatgggtcactcaaatgtgtggaactctcaccccaagaactacggccctggatcgcgtacctgccgtgtttgtggaaacccacatgggttgatcaggaagtatggtctcatgtgctgcagacagtgcttccgcagcaatgccaaggaaattggtttcatcaagtatcgttaaggggtaagtaggcccaagtgccaagcggcatgaagtggagctaatttggacaactttacacccatctttaaatttttattgctttaatagttattagcattgtgttctcattgaacaaaatgacttatctcagttgcctgccttgttgattttgacatttgctactagtatttcctcatcgggtgtttgcttgcactggttcaatgtgaggatcaccttatttggagatgttacagctgttttgattacatatttgaatggaaggtttcgtagttaacttttgatttgaatgtgagattttgtatttagttttaattaccactagcgttttt

SEQ ID NO: 530 - DNA, 414 bp, Humulus lupulus
ctacgactgcttgggctctcgattctagtcctcttcctctcccacctgccatcgaatcatgggacactccaacgtctggaactcgcaccctaagaactatggccccggttcacgcacctgccgtgtgtgtggaaacccccatggtttgatccggaagtatggtctcatgtgttgcagacagtgcttccgcagcaatgccaaggagattggcttcatcaagtaccgttaagagggatttggcttatatttttgttggagcggatgttttggcctaaaggataatcttattagcttttttctgtttttttagatctttttcttaagaggaaagatttttgttttcatgttttagtttgttctaatgttgagcatgaattggatttggaatttctgtagtgtggaatcctttggatt

SEQ ID NO: 531 - DNA, 474 bp, Humulus lupulus
aacgctcggctattctctacgactgcttgggctctcgattctagtcctcttcctctcccacctgccatcgaatcatgggacactccaacgtctggaactcgcaccctaagaactatggccccggttcacgcacctgccgtgtgtgtggaaacccccattggtttgatccggaagtatggtctcatgtgttgcagacagtgcttccgcagcaatgccaaggagattggcttcatcaagtaccgttaagagggatttggcttattatttttgttggagcggatgttttggcctaaaggataatcttattagctttttctgtttttttagatctttttcttaagaggaaagatttttgttttcatgttttagtttgttctaatgttgagcatgaattggatttggaatttctgtagtgtggaatcctttggattaaagtgaatttgaagtatatctatccgctcattgtttcaccct

SEQ ID NO: 532 - DNA, 696 bp, Lolium multiflorum
cccaggcgcaccaaggttttccaaccggcggcggcggaaggcggaaggcgaacgcggcgaccatggggcacgacaacgtctggaactcgcaccccaagaactacgggccgggctcccgcgtctgccgggtctgtggcaactcgcatggactgatcaggaagtacgggctcatgtgctgcaggcagtgcttccgcagcaacgccaaggacattggcttcatcaagtaccgttgaaggctcttcatgtttgtgactgagatctgtacctgcatcagaggaatggatccttcattcaaggcttaaattatatgctttagttttttgttcagactactgtgctagtaaacttgttgaagttttggtgagaaccatgtggttgttaaagtgactgtgatcaaacttggaagtaatttctgtattcgatgacataaccctgatccaacttggaatgtctcgtgcttatttttgtctactccagtcccctccgtgataacatctaaatgtcaaattgattgctcttttgatctagttgctgtctatctgggtatatacattgaaacgaaatttccagtggatttttggcagccgtgatccccttattgctataatattagtttgccatacaaattttttgaccaactgcccatgtgtcgccaacgttggattaatgactctttaaccacttgcccgcgtgaac

SEQ ID NO: 533 - DNA, 505 bp, Lolium multiflorum
tcgagcggccgcccgggcaggtacgcgggggcccctcaattcgcatcaagctcgcgcgccgccgttcacccgaaaggaagctctcggagaagaagaagaagaagatgggtcacgacaacgtgtggaactcccaccccaagaactacggccccggctcccgcgtctgccgggtctgtggcaactctcatggtctgatcaggaagtatggcctcatgtgctgcaggcagtgcttccgcagcaacgccaaggacattggcttcatcaagtaccgttaagccacctagaccagctggcctgaagtgaagctgatcaggcgtgaagaaatggatcacttaatagaaggcttaatttcaattccagtaatttagctgtttgctcagtacggctctgcaagtaaactttgtggctttatgttttgatgggaactgaatgatgtgattgttgaacatgagttaattgcacatctgaaagccttttatcaatgtgattccttcagtgtttgtcc

SEQ ID NO: 534 - DNA, 412 bp, Eragrostis curvula
atacggttttgcctcctccctcgcgcgcgcgagaaaaagaaggagacgaaggagaagacgcagagttgcagcgatgggccctccaacgtgtggaactcccaccccaagaactacgggcccggctcccgcgtctgccgggtctgtgcgaaccctcacggtctgatcaagaagtacggactcatgtgctgcaggcagtgcttccgcagcaacgccaaggacattggcttcatcaagtaccgctgaaaacctactgtcttgctgctgctgcggagaggttcagctatatcggagaagctatggatccttcaatagacaggttactttatttactactgtttagctcaaccttcagactgatgtgaaattctcccttgtcaaagatctgcagtaaccatgtcgacgatgacataac

SEQ ID NO: 535 - DNA, 975 bp, Lupinus angustifolius
ccctcataatatattcacacgtgtacaagcaaataggctgtgcataacctaattccacctacatataaaagtaggattttggtgcctctccgccttcatcgttgtgtgcatctctgcgtaagggttttgtgactccaacatttgcgtttctcatctaacacttataatcaaagtcaatcatgggacactctaatgtctggaactctcatccgaagaattacggtcccggatctcgcacctgccgtgtgtgcggaaaccctcatggactaatcaggaagtatgggcttatgtgttgcagacagtgcttccgtagcaatgccaaggaaattggcttcattaagtaccgctgaaggcctaatgtgtcctcctacccacctacttgagattccggcattaggaggaagagacagtgtaattgttaagatggaactcagtttttgtggcatttagttaagttaatcagcaatctttcaattgtgtagctatgaatatttttatttcattcctagttgttttgagctaagatcattttgcaattcttatatatattcattatctgaatgcatccaaaatatacccatcactttgattttaatgggatggaatacaatttggacgtgatattgacacaatgtggcaattggtccttcagagtaaaatgtcaatttgatccctcactttgcttgtagtagtcaattctggcaaagaaaaattattaagataatctcatagattaaattgattgaagatgtgcaaaggcggggattgaatgtgacaattttgtatgccaagattgaattagtgtgaaactgtcaatctttaaatttaaggaatgaaaatgtcgttcacgattttaatgattatagggcgtagtatagtatatcattttaaaaccctggtctgtcctgttgagtaataataaaataagttatggattttttgtttgaataacatgtcttctaagcactatttgat

SEQ ID NO: 536 - DNA, 529 bp, Momordica charantia
tgtcccatttacggtccggggtttcctttgtctaaaattttcttgtctttctatttttgggatttcgaagcgtttcaatagctcacaattatggggcactccaacgtgtggaattctcaccccaagaactacggccctggatcccgcacctgtcgtgtgtgcggaaatccccatgggttgatcaggaagtatggactaatgtgttgcagacaatgcttccgtagcaatgccaaggaaattggcttcattaagtaccgctaagaggctaattacccctagaagagaagatgggttgaatttgatgaagattttcccatgttttgcaatgtttttgcgcttgtttacattgaatatgaaatgactgttagaaagacaattgtgactcttttgttcagaactactttatttaacgcttcttaattgagcttcccctttgatattattgactaatattttttctattgtttttctagtttttgagcattagatctattctcgagataataacaatgtctatttactttagtag

SEQ ID NO: 537 - DNA, 410 bp, Momordica charantia
gccgctcccagagattttcgaagcccctgcgagccttttcgatcccagtccaatcatggggcactccaacgtgtggaactcccaccccaagaactacggtcccggctctcgcacctgccgggtttgtggaaatcctcacgggttgatcagaaagtatgggcttatgtgctgcagacaatgcttccgcagcaacgccaaggaaattggattcatcaagtaccgctaaatggccaagttttgtctctcccattagagaagatgtagtgggatggaatatggctgcagcattttcttatatataagaaggaaaaaccttgaacgttgattttctgtctcttgttaatttttttctggaaccttgagttgattgttgaacttaggctactacaacgtttactaattttgaagat

SEQ ID NO: 538 - DNA, 327 bp, Momordica charantia
attacggtccggggatccgctgctgtgtatcaacgcttcagccctctctagggctcattgattctttcagttcagcgaagcggctgtcagagctgctccaaacggtttctagggcatcgatcgatcaaccaagaagacgatgggacattcaaacgtgtggaattcacatccaaagaactacggacccggttctcggacttgccgagtctgcgggaacccccatggattgatccgcaagtatggtctgatgtgctgtaggcagtgcttccgtagtaacgccaaagaaattggcttcattaagtaccgctgaaaatggaggtcttgtct

SEQ ID NO: 539 - DNA, 495 bp, Avena sativa
cttcgcatcgatctcgcgcgccgccgccctctggaaaggaagctctcggaggaggagaagacgatgggtcacgagaacgtgtggaactcccaccccaagaactacggccccggatccagggtctgccgggtctgcggcaactctcatggcctgatcaggaagtacgggctcatgtgctgcaggcagtgcttccgcagcaacgccaaggacattggcttcatcaagtaccgttgaagactgttcggttccgctgctgtgactgagatctttacttgcatcagaggaatggaaccttcattgaaggcttaatttatgcgcttttagcttttttgttcagagtactctatgctagtaaacttgttgaagttttggtgagaaccatgtggttgttgaagtgactatgtgatcaaacttgaagtattgcttgtattcaactacttcactctgttctacttgggatgactatctattagcctttgtttggcaagttattga

SEQ ID NO: 540 - DNA, 453 bp, Avena sativa
tccatttacggtccggggtcccttcgtctttcgtcgttcgatctcgcgcgccgccgtccacctgaaagggaagctctcggaggaggagaagacgatgggtcacgagaacgtgtggaactcccaccccaagaactacggccccggctcccgcgtctgccgggtctgtggcaactctcatggcctgatcaggaagtacgggctcatgtgctgcaggcagtgcttccgcagcaacgccaaggacattgggttcatcaagtaccgttgaagactgcttggttcccctgctgtgactgagatctttacttgcatcagaggaatggaaccttcattgaaggcttaatttatgtgcttttagcttttttgttcagagtactatgctagtaagcttgttgaagtattggtgagaaccatgtggttgttaaagtgactatgtgatcaaactgaagtattgct

SEQ ID NO: 541 - DNA, 530 bp, Avena sativa
ttcgcatcgatctcgcgcgccgccgtccacccgaaaggaagctctcggaggaggagaagacgatgggtcacgagaacgtgtggaactcccaccccaagaactacggccccggatcccgcgtctgccgggtctgtggcaactctcatggcctgatcaggaagtacgggctcatgtgctgcaggcagtgcttccgcagcaacgccaaggacattggcttcatcaagtaccgttgaagactgtttggttccgctgctgtgactgagatctttacttgcatcagaggaatggaaccttcattgaaggcttaatttatgtgcttttagcttttttgttcagaatactatgctagtaaacttgttgaagttttggtgagaaccatgtggttgttgaagtgactatgtgatcaaactgaagtattgctcgtatttgactacttcatcctatttacttgggatgtgttatgcctgtcatatctctatactttatctgttaacctttgtttggcaatcttacatatgaattgttaacaa

SEQ ID NO: 542 - DNA, 445 bp, Avena sativa
cgcgcgccgccgccctctggaaaggaagctctcggaggaggagaagacgatgggtcacgagaacgtgtggaactcccaccccaagaactacggccccggctcccgcgtctgccgggtctgtggcaactctcatggcctgatcaggaagtacgggctcatgtgctgcaggcagtgcttccgcagcaacgccaaggacattgggttcatcaagtaccgttgaagactgtttggttccgctgctgtgactgagatctttacttgcatcagaggaatggaaccttcattgaagacttaatttatgtgcttttagcttttttgttgagagtactatgctagtaaacttgttgaagttttggtgagaaccatgtggttgttaaagtgactaagtgatcaaactgaagtattgcttgtattcgactacttcatcctattttacttgggatgt

SEQ ID NO: 543 - DNA, 447 bp, Avena sativa
ggcccctcaattcgcatcgatctcgcccgccgccgtccacccgaaaggaagctctcggaggaggagaagacgatgggtcacgagaacgtgtggaactcccaccccaagaactacggccccggctcccgcgtctgccgggtctgtggcaactcccatggcctgatcaggaagtatgggctcatgtgctgcaggcagtgcttccgcagcaacgccaaggacattggtttcatcaagtaccgttgaagactttggttttggtgctgtgactgagatcttcacttgcatcagaggaatggatccttcattgaagtcttgatttatgtgctttagtgtttttttgttcggagtactatgctagtagggaacttgttaaagttttggtgagaaccatgtggttgtttaagtgactgatcaaacttgaagtattgcttgtattcaactacttca

SEQ ID NO: 544 - DNA, 535 bp, Elaeis guineensis
caaggtgctataaaaaccctagctttctacataattgacggcacttccttcccaagagtccgaaggacgaggtttcgcgtgcgatctgaaagctagcggcgcgagagagatggggcattctaatgtctggaattcccatcccaaaaactatggccctggatctcgagcttgccgagtttgtgggaaccctcatggactgatccggaaatatggattgatgtgctgcaggcagtgcttccgcagcaatgccaaagaaattggctttatcaagtaccgctgaagatgttatgtccatatgaggattggagtagtgaagctgtcatgttgctgaagaaaatcttttttgctcaaatgtattaatgtgatatgcttcatctgttcacctggtaaactttatggtttagcaaattatgtcgtgaactgagttctgagagattggtgattggacatattcagccttaaaactttttatatgatcttttctttaatttattgcaataattgtctacattatatatgttaaaatcaaacacct

SEQ ID NO: 545 - DNA, 529 bp, Elaeis guineensis
cgtgtccgttggcgagtctcgaggtcgttagggtttagggggttgcgagtcgtcctcagcgcttagcttgtgatcgccgccgccttcggtaccagcgaagatgggacactccaacgtttggaactcccatcctaagaactacggccctggatccagggcttgccgcgtttgtggcaatcctcacggattgattcggaagtatgggctcatgtgttgcaggcagtgcttccgcagcaacgccaaggagattggcttcatcaagtaccgttgagaagaagaaagcgcgtagggcaggcgatggaggaagaatcgcggccatgttttaacattgaattgcttattatttcagaatagttggtgaagacattgtggttccttgaaactggttattgaagtttgtttctctcggattttgtagaatgtgcactgagttatcattcaaatgtgacggttcctcttcttaatttcatttgttattagcgtatggtaatttggtagctctgtgaaatttatttacagttcgaagtcg

SEQ ID NO: 546 - DNA, 495 bp, Arachis hypogaea
tatcaacgcagagtacgggggcattctgcagctacctatttcacctttggatccagcgaaccaccgtagcagaagcagaagaagcaatagccatgggtcactccaacgtttggaactctcaccccaagaactacggtcctggttctcgcacctgccgtgtgtgtggaaacccccatggattgatcaggaagtatgggctcatgtgctgcaggcagtgcttccgcagcaacgctaaggaaatcggattcatcaagtaccgctgaagggttgcatggttggtcagatgcccaccatactattttagctttttgcattagggattatgtgagaatcttaaaggagttgtttatggcaaactagtttattatcagaactggagcagtggaactatgaatattttattttaatatcaattgtttttgactgtctggtataaaaaaaaaaaaaaaacaaaagtactctgcgttgataccactgcttctgagactgccaagg

SEQ ID NO: 547 - DNA, 528 bp, Arachis hypogaea
gtgccttggcagtctcagaagcagtggtatcaacgcagagtacgggggattctgcagctacctattttacctttggatccagcgaaccaccgtagcagaagcagaagaagcaatagccatgggtcactccaacgtttggaactctcaccccaagaactacggtcctggttctcgcacatgccgtgtttgtggaaacccccatggattgatcaggaagtatgggctcatgtgctgcaggcagtgcttccgcagcaacgctaaggaaatcggattcatcaagtaccgctgaagggttgcatggttggtcagatgcccaccatactattttagaattttgcattagggatgtgagaatcttaaaggagttgtttatggcaaactagttttattatcagaactgaagcagtggaactatgaatattttattttaatatcaattgtttttgactgtctggtaaaaaaaaaaaaaaaacaaaatacaccaccttttgtttgatgcattaatcttccttcgtgccaaaaaaaaaa

SEQ ID NO: 548 - DNA, 590 bp, Cajanus cajan
gtgaattttcaaaggcccagttcagtgagttataagcccaccaaaagacaacaagaggagtgttgggctaagatttagcccaaatgatgtttgacttcgagaaaaccctaatgtgaggttttgttataaattgatatctgcagattacgaggggagtcttccacatttttcagcgactgcgtgtttggatcggagcctcttctgcggcatagcaatgggacactccaacgtttggaactctcaccccaaaaactacggtcccggttctcgcgcttgccgcgtgtgcgggaatccacatggattgattaggaagtatggccttatgtgctgcaggcagtgcttccgcagcaatgccaaggaaattggcttcattaagtatcgctaaaagagctgatgtctccactcaaccaattttatgttctggcactaggatgttttaaggaagttatgtttgaagaaacttgagacttgtttttttgcatctaattaattatcagacattatttgttgaatgaaatatacttttatataaatggttttggactactaggtcctccatccctgatcctttaattattctgcagctatat

SEQ ID NO: 549 - DNA, 1347 bp, Ananas comosus
aaaggagtaaaagaaactgaatttctcttcagttgtttggatgcacataaagaaagagatgatctttctataatttgttttctctctcacaaagttaacaggaaacatgcaaaaacatttctttcctacttgtctttctctccttttctctccttcaaagagggagctagcgaaggaggtgaattttgcatcaatgactatttttaactttttctctcgttgatcttgcgccctccctccgccgcactttcctcatccccgagagttcgattctagggttttctctacgatccagagcgagaatttagtgaaagatggggcactctaatgtatggaactcccaccctaagaactatggcccaggatctcgagtttgccgggtttgtgggaacccccacggaatgattcggaagtatgggcttatgtgttgcaggcagtgcttccgtagccatgccaaggatattggctttattaagtaccgctgagcatagttcacagtgattaccatcaactggacatgtggtttaatgggaaatcaagagtggattcgtcatctttcggaagattgtctacaatatttagcaatgtcatgttagttttcattgacgttttatatttaattatgtaatggatcaagtacctgtaagatgtggttgcagaatctaatttcttcgtggtttagtgtcaattgtgtcatggatgaaagtttcacatgtgcacctttctttttcctagtgctaactgctgcccgttccttcatccttgatttgtttcgccaatactttttatttgattgttgtttaggtagtgcggtccaatcgtatttagatatcctgtgttggatttcatcatattaatcttagtaacaccaataagtgatgttgttttatacatcaacatgccattttggtgggccgctatgaaccacacactgcccccctacttagttgttttatacatcaacatgccattttgggctgctatgacaccccctggcgagtcgtattttgcttgctttgatattaatcacttctacttctcatggtggtactatatcattatttcttaaattctgtttctgctgttgattcaagtgttcacgaattttcgatgcagcctcagtcttagttgttattgcaaacagattttcaaaacaaatgcttgacgttagatttcattgctggaggtgttggaattcaaatcagtcagtaatataaggaaagcttcagatatgtgaaacaaagctattattttgctttcttttcttatctgaattatacatgattgttatacgcgagagacagatacggagaaaagaaaagaggagtttgattgaagaaaaaagaa

SEQ ID NO: 550 - DNA, 370 bp, Platanus occidentalis
cttaacctcccgcctttcagggttttgtgtgcggtatcatcgaattagggtttctgttagacgcaaaagatggggcattccaatgtgtggaactcgcatccgaagaactacggccctggatctcgtacctgccgagtgtgtgggaaccctcatgggttgatccggaagtatgggctgatgtgttgcagacagtgcttccgcagcaacgccaaggaaattggctttatcaagtaccgctgaagaatgaagacaatctttgttcactcggggcgttggttggtgagaagctctttcctagttgcctgattatggcttgggtggtagtttatagattttttgcaatttgagatcgacttctttagttttgttg

SEQ ID NO: 551 - DNA, 319 bp, Platanus occidentalis
ccttttcgctcgattagggttttctctgcaacagcggttccggtgaggagtgagagagatggggcattcaaatgtgtggaactcgcatccgaagaactacggtcctggatctcgtacctgccgagtgtgcgggaaccctcatggattgatccggaagtatgggctgatgtgttgcagacagtgcttccgcagcaatgccaaggaaattggctttatcaagtatcgctgaggaatgaagactgctctgtttcatttggggtccttttggagaggggtcttcccagagcatggcgtgggtggtaggttttagatttcttgc

SEQ ID NO: 552 - DNA, 570 bp, Prunus mume
acttcttccgcaccttcagattcctcggcgcctgctagggtttttgcgtccttcaaaccaaatcatggggcactccaacgtgtggaactctcaccctaagaactacggccctggatcgcgcacctgtcgcgtgtgtggaaacccccatgggttgatcaggaagtacggtctcatgtgttgcaggcagtgcttccgtagcaatgccaaggaaattggctttattaagtaccgttaagtagcagaccttcaacgtcccaggacttgaagttttggcccaagaatcgtcagagtagttgtttctgagttgtcatgaactccaagaagatatttttgttttaactgatttgctgttgaacttgaattggtggtcagactatgaatattgtgttaatgaattaaagtttgatttatgttctcttttgttgtggctgttctgttcttgttcatttcctatggaatttagctcatgtttgcttgctcagtattcggtgatagcaaaatacttttgttcaacactatctaatatcgaacaaagaaaagtgaactttgaaagtaaatggcactgatctt

SEQ ID NO: 553 - DNA, 574 bp, Oryza sativa
gccaccctcccacacgcgcgcgcctctctagggtttcccacctctcaccggcggcggcggaaggcgaaggcggcggcggcggcggcgaagatggggcactccaacgtgtggaactcccaccccaagaactacgggccgggctcccgcgtctgccgggtgtgcgggaaccctcatggactgatcaggaagtacgggctcatgtgctgcagacagtgcttccgcagcaacgccaaggacatcggcttcatcaaggttatccatgcagctcaggccatgatttctgcatacgacaagcagggtttcaaaaaccgccgggggcccggttaccgccacccggcggctgagctcacagcacttcgggtggcctacaaatctgcattcttctcagctcggcgaatgtgatctttctcaccgacaatgtcaaatggattcgaagaagggcaaacgaagttgctgataaacttgcaaatgaagccagaaaagagttcaatctacggctagaacctacttctttctatcacaacaacactcatctttgttatatatcatcctacgtacccaaacactagtagtg

SEQ ID NO: 554 - DNA, 473 bp, Sarracenia psittacina
agggtttcaaaagttcgtcggctgcttcggaagttcgtggattctctctcagaggaagggagaagatgggtcactcgaacgtgtggaactcgcatccaaagaactacggtcctggatctcgcacctgtcgtgtgtgtgggaaccctcatggtttgattcggaagtatgggcttatgtgctgcagacagtgcttccgcagcaatgccaaggaattggctttattaagtatcgctgaaggatttctcactggccctgcaagagaagaagagcattttgcccaggcatcatgctgtgtttcttttgtttttgttttcaacttattttgagttaatttcatgactgttcttgtcctttttctttggaggccaacctatctatttgtcgtgacatttcttgttaattcaatgttgatcttgatttagataagtgattatctaaataattgtctttttcagtaaggaaaaaaaacaaaa

SEQ ID NO: 555 - DNA, 481 bp, Glycine max
atgaagcttcggcgtgtcgcaattgctattgagaaaaccctaattcgagtagttgtctataaattgatatctgcagagtacaaagagggttctcctacagattcttcagcaactgcgattttggatcggaacctcttctgcggcgtagcaatgggacactccaacgtttggaattctcacccaaaaaactacggtcctggttctcgcacttgccgagtgtgtgggaatccacatggattgatcaggaagtatggccttatgtgctgcaggcagtgcttccgtagcaatgccaaggaaattggcttcatcaagtatcgctaaaagagctgttgtcacctacggaccaatattatgttctggcactaggatgttttgaagatgttatgtttgaagaaacttgagacttgtttttttcatctattttattatcagacataatgtgtggaacgaagaatacttttatataaattgttttgcacta

SEQ ID NO: 556 - DNA, 477 bp, Citrullus lanatus
ccactataaatacctactttttcttctagttggttcttcagaaagcatttgcctcttccaaggattttcgaagccctaacgagctcatcagatttccttctcgcaagaaatccaaacatggggcactcgaacgtctggaactcgcaccctaagaactacggccctggctctcgcacctgccgggtttgcggaaatcctcatgggttgatcagaaagtacggactcatgtgctgcagacagtgcttccgcagcaacgccaaggaaattggattcatcaagtaccgctaaatggccaaatttttgtctctcccattagagaagaatatgtaatggatggattatggtagcaggaaccttcaacttccattttatgtccctagttcactttttccttgaaccttgagttgattgttgaactttaggctacttcaatgtttactaattttgaagatttaagttaatgttgttcatttggta

SEQ ID NO: 557 - DNA, 506 bp, Citrullus lanatus
ttagggtttatctctcatataaaaatcaatcctttttgccgttttcttcttcctcgcaaaatttctgcttcacattgtgatttcgaagcatctcgatcatggggcactccaacgtctggaactctcatcctaagaactatggccctggttctcggacttgtcgtgtgtgtggaaatccccatgggttgatcaggaagtatggacttatgtgttgcagacaatgctttcgtagcaacgccaaggaaattggtttcattaagtaccgctgagaagctaatcatctctagaagagaggatgggttgaatttacattgaagattttcctatgttttctgctcttgtttactcagtttggaatatgaaatgattgttagaagacgattttgacactttgttctgaactactatatttaatgtttcttaattgagcttcttgagattattttgacatgtacattccttctattgtttttcagttcttaagcatgtttgatattatgatgcct

SEQ ID NO: 558 - DNA, 566 bp, Citrullus lanatus
agggtttatctctcatataaaaatcaatcctttttgccgttttcttcttcctcgcaaaatttctgcttcacattgtgatttcgaagcatctcgatcatggggcactccaacgtctggaactctcatcctaagaactatggccctggttctcggacttgtcgtgtgtgtggaaatccccatgggttgatcaggaagtatggacttatgtgttgcagacaatgctttcgtagcaacgccaaggaaattggtttcattaagtaccgctgagaagctaatcatctctagaagagaggatgggttgaatttacattgaagattttcctatgttttctgctcttgtttactcagtttggaatatgaaatgattgttagaagacgattttgacactttgttctgaactactatatttaatgtttcttaattgagcttcttgagattattttgacatgtacattccttctattgtttttcagttcttaagcatgtttgatattatgatgcctctcatatttaaattttcagttttggatttagaaatctatgaagtaaaagagggttaagctct

SEQ ID NO: 559 - DNA, 534 bp, Citrullus lanatus
gtctagggttacaaagttttgcgaatttagcgaagcggctgtcagagttgaaaagggtttctaaggtaatcgatcaacgaagaagacgatggggcattcaaacgtgtggaattcacatccaaagaactatggacctggttctcgtacttgccgagtctgcggaaacccccatggattgatccgcaagtatggcctgatgtgctgcaggcagtgcttccgtagtaatgccaaagaaattggcttcatcaagtaccgttgaaaatggagcccttggtcctcagagtttgcagacatgagcatgctggtttcttgatttttcttggtttagtctatttataatgaaatgaatttccaatccattacgatcgaaagaattgtcagttgcaattcacaaccaatcagacttgggagttgtatgattttgggtcagtgaaagtttaggagaatgcagctatggttatatttttttgatgcactttaatggctgttatacttacttaatgcgactaaatgaaatttcattagaaaaatgtg

SEQ ID NO: 560 - DNA, 431 bp, Acacia harpophylla
ggcagcgatactgagcggaagggaagctgtgcagagatctgcaaagtaagttatgggacattccaacgtctggaattcgcatccgaagaactatggccctggttctcggacttgccgagtctgtggaaacccccatgggttgatcaggaaatatggcctgatgtgctgcaggcagtgcttccgtagcaatgcaaaagaaattgggttcatcaagtatcgctgaagtttgatcgcagcggatggtcgtaatttaggtacaatctaagctatggtcaggaggaggagctggctttttgatgtgtccattttgagtaattccccttttttcaagtgtttattcgatttagtttattcgacatgtttagactggcccaagtttctcccaaacaattttatgaatagtcaagttccaaaaaaaaaaaaaaaaaggc

SEQ ID NO: 561 - DNA, 365 bp, Acacia harpophylla
ccacgcgtccggtcttgcagctaagatggggcattctaatgtgtggaattctcaccctaagaattatggccctggttcccgcacctgccgggtttgtggaaacccacatgggttgattaggaagtacgggctcatgtgttgcaggcagtgttttcgcagcaatgcgaaagaaattggctttatcaagtatcgctagaaggctatttctataccctttgttagggtattcttggagagggatggaagatttttaagacttttgctttgttttttgcttggaactactagagatcatcagaacttattggtgtctgaaaattcctccataaattgccgtattggtttataaaagaactacttgttta

SEQ ID NO: 562 - DNA, 405 bp, Acacia harpophylla
ccacgcgtccgatcagcagccgccatctttcgtctccgaaggacaaattcttgctgcagctgaagatgggtcactccaacgtgtggaattctcatcctaagaactacggtcctggatctcgtacctgccgggtgtgcggtaaccctcatggtttgattaggaagtatgggcttatgtgttgccgccagtgcttccgaagcaatgccaaagaaattggcttcatcaagtatcgctgaatactatggggataaatctctttacttttggaggaatttatagtcgttttaatttctttacttttttggcattaagtgatgtagttagattcagaattgttggtttccagtgtatcttgaactaagaatcttcttacattaagagttatctaatttccatttgggaaaa

SEQ ID NO: 563 - DNA, 782 bp, Bruguiera gymnorhiza
gaagagctagtttgggggagtttctatttgtcgattaagctctgcatctacgaaagtataaagtgatcggcgagcgatgggtcactctaacgtctggaactctcaccccaagaactacggccctggttcccgcgcctgtcgggtgtgtgggaatccgcacgggttgatcaggaagtacggactcatgtgctgcagacagtgcttccgtagcaatgccaaggaaattggcttcattaagtaccgctgaatgatatcgatatggcccagaatggcctgtggcggtgcgtgttcgatttcagtagtggcttcccctcttttggatgagctttaggacaatgctttctttagtttatgtattgtcgaacttggactgatgttgaactaacgatattctggaatcatttgatatttcgagagtttattattttgatcatcatcgtcttgcttctgcttattgtgtgggcatcgtggtaattatcaactactaggagtgttgggccttttcttaatggcgttgggttgggatggggaaggatagattgttgggttttgtgtctggaagtagtttccgcggcgggttgtttctgtttttgtgggggttagtgtggcggccttgaggtgtggggtgctgttctgggcggttgcgctaaggttgtactgggtagggtgggtgaaaagtattgcttttgttgtgtgaaattgtggtgacgcttatgggtttgtttgggaatttcttttggccgttgtgataaacctgtattagctggagtctggtgtctttt

SEQ ID NO: 564 - DNA, 595 bp, Manihot esculenta
ggtgcgttttgtgtacgtggacaatggtcacgcgcttcaatttcgaccatcaaaattctcgtttctcatcttcgtaaaggcagagttagggttgttgacatttggaagcttagagaggcggccaggagcgagcgatcgacaataatgggtcattcaaatgtctggaactctcatcctaaaaactacggtccaggctctcgcacttgccgggtgtgtggaaaccctcatggattgatcaggaaatatggcctgatgtgctgcaggcagtgcttccgaagcaatgccaaggaaattggattcatcaagtatcgctgaatgttcgatgcatgtgttgcacatggctttgcctaaagtatgatgcgcaacttttcctgttattcccatcagttatgtattgctggattaagaagttatgattacagttttagttgtttaacatttgaacaaaacacaaggtaactttgttctttggatttgagcaagaatttcttcggattattgcttttgatgtagtctttgttttcttaaagcaactagttttctgctccttccaagtaaaatggatgcttataaagaaagccatttggatgtgatt

SEQ ID NO: 565 - DNA, 523 bp, Manihot esculenta
agcagttagggttttagcagtacaagttgcgaagcttagaggggcggcgagcagtgatcaattcattctctcgatcgctcaacaacaatgggtcattcaaatgtctggaactcacatccgaagaattatggccccggctcccggacatgccgggtttgtggaaaccctcatggtttgatcaggaaatatggtctgatgtgctgcagacagtgcttccgcagcaatgccaaagaaattggattcatcaagtatcgctgaatgtctgaaggatctattacatgtgcattgctcgtggctttgcgtgaagtaagatgcaaagagaagttggtcttctttttttcccctcccttctgtcttcatcagttatgtattgctggattatgaagctattattaattgttagttatttaatattttagcagaacacaaaattttgttctacggattttgtgcaagaatattgtaagattttatttcttttgatgtaacttatgttttgcttaaaataattatcttttgttcc

SEQ ID NO: 566 - DNA, 596 bp, Manihot esculenta
gtagttgcaacttgcaaatcttaggaggcagcgagcagcgactcattgtttctctttagcagtaaacaatgggtcattctaatgtctggaactcacatccgaagaactacggtcccggctctcgtacttgccgggtttgtggaaaccctcatggtttgatcaggaaatatggcctgatgtgctgcagacagtgcttccgcagcaatgccaaggaaattggattcattaagtatcgctgaatgctttaaaggatctgttacatatgcattgctcgtggccttgtgtgaagtctgacgcaaagaagagttgcttctctttttttcttttgttctcgttagttatgtattgccagggtaagaagttattactaaattgtttagtttaagatttgagcagaacgcagtaattatgctatgcattttggtgcaagaatatcttaagattatttcttttgatgtggtttttgtttttgctgaaaagaattggtttccctgtgtttcacaactaaattggaaggctgtacctgtacagatggtgattcggaattttggattgcattaattgggggatatctaataactatgtctaattagaat

SEQ ID NO: 567 - DNA, 445 bp, Manihot esculenta
actctacgattctaggattttctgtaagttctctctgcgccgtgtgcatcttcaaacctgcgcgcaaatcgtctagtcatgggtcactccaacgtttggaattcacaccccaagaattatgggcctggttctcgtgcctgccgtgtgtgcggaaatccccatgggttgattaggaagtatgggctgatgtgttgcagacagtgcttccgtagcaatgccaaggaaattggcttcatcaagtatcgctgaaggatagacaccttttccatttccacaggagcagaagagtatgattcaagtagcagctttcagtttggattttaagataatatttaacttttgatattttgttaaacctgaattgatggtagacgagcggtaatttggaatgctgtgagaattttgttgagacatactcatttatggatgattacttttcttgctc

SEQ ID NO: 568 - DNA, 407 bp, Cucumis sativus
cctcacaaaattttgtgcttcacgttgtgatttcggagcatctcaataccctaacaatcatgggacactcgaacgtttggaactctcatcctaagaactatggacctggttctcgcacttgtcgtgtgtgcggaaatccccatgggttgatcaggaagtatggacttatgtgttgcagacaatgcttccgcagcaatgccaaggaaattggtttcatcaagtaccgctaagaagctaattatccctagaagagagaatgggttgaatttacattgaagaaggtttcccatgttttgcttttgtttactcagtatggaatatgaaatgattgtcagaagacgtttttgacacttttgttctgaacatttaaagtttcttaattgagcttcttgagattattttgacat

SEQ ID NO: 569 - DNA, 473 bp, Cucumis sativus
atttagcgaagggtttctaaggtgatcggccgacgaagaagacgatgggacattcaaacgtgtggaattcacatccgaagaactatggacctggttctcgcacttgccgtgtctgtgggaacccccatggattgatccgcaagtatggcctgatgtgctgcaggcagtgtttccgtagtaatgccaaagaaattggcttcattaagtaccgctgaaaatggagatatgatcttgaaaggctgcagatattagcatgttggtcacttgtttcttcttcacttcgtctatttatatttatattatatatcaaaaaaagaggggccgacaatgatggggtagtgcatgccccaattgaaattttgaggggcaccctttccccatgaagttttatttcgttttccttgattctgccagaagtttattttcaagattaggtatggatgtagtagtttccttgaaatatgcttcgatga

SEQ ID NO: 570 - DNA, 456 bp, Cucumis sativus
atttgcctccttataggattttcgtagccctaacgagcttctctgatttccttctcgcaagcaatccaaacatggggcactcgaacgtctggaattcgcaccctaagaactacggccccggctctcgcacctgccgggtttgcggaaatcctcatggtttgatcagaaagtatggacttatgtgctgcagacagtgcttccgtagcaacgccaaggaaattggattcatcaagtatcgctaaatggccaattttttgtctctcactagaggtgtaacggatggattatgttagcatcattttcatatatatatataagacagaaccttgaacttccattttatgtccctagttctttttttttttttttaacttgaaccttgagttgattgttgaactttaggcccctatggtgttttactaattttgaagatctaaattgatgtttcttcattcg

SEQ ID NO: 571 - DNA, 520 bp, Cyamopsis tetragonoloba
tttttgcgccgttcgtcttcgctgaggagcaaatcaaagtcatgggtcactccaatgtgtggaactctcaccccaagaactatggacctggatctcgcacctgccgtgtgtgtggcaaccctcatgggttgataaggaagtatggcctcatgtgttgcaggcaatgcttccgtagcaatgccaaggaaattggcttcattaagtatcgctgaagcattagagtcaacctgccccacctgcttaagattctggcattaggatgacgtggggatgattttattgtttgaagaacctagaatttttgtttcatttaattatggttttaatcgaacttgtggaactaagaatattatcttgtatacttgttttggtctatcaatgtcttactctgatccatttatcattctgcatttctaatataaattgaatagatatagatacatctctgcatggtgtcattttgaatatgatggaaaaagccatcactcacgaatgaaatggggaatgttttgctatatat

SEQ ID NO: 572 - DNA, 575 bp, Jatropha curcas
gagggtaggataggctacctcgaattggggacccggagctcgccctaagccagtggtttcaacgccgggtacgcggggccaaaattacattagggttttcagctattccaagcctcaggaaagccggtgcgcagcaaccggatcagttgcgatcgaggaagatgggtcattcaaacgtgtggaactctcatcctaagaactacggtcccggctctcgtacttgccgggtatgtggaaaccctcatggattgatcaggaagtatggactgatgtgctgcaggcagtgctttcgcagcaatgctaaggaaattggattcatcaagtatcgctaaacgtcaaagaacggaacagttacatacgcattgctcaaggtctttgcctgaagcatgatatggagaaactcttcttttttgttttccattagttatgtaatcctggattaagaaattttttatccatatttagttatttaatatttgaccagtaattgtgctttggatttttactaagaatctctaggttttttcttattactactagtttttatgactaattgccatgcatcttattttctg

SEQ ID NO: 573 - DNA, 505 bp, Glycyrrhiza uralensis
gctttccttcccattcctctgcgactgcgttttgagattgttgcgttttccatcttcgcacttcgcagaggagcaaatcaaaggtcatggggcactctaacgtgtggaattctcaccctaagaactatggccctggttctcgcacctgccgtgtgtgtgggaaccctcatggattgatcaggaagtatgggctcatgtgttgcaggcagtgcttccgtagcaatgccaaggaaattggcttcatcaagtatcgctgaaggattagtttcattcacctgccccacccgttttttactctggcattaggatgatgataatgatgccgagatggttttaatttttgaagaacttgagaattgtggcatttagtcaagtcactcatcaaactttagttgtgaaactaagaatatatttactttttacgcaagttttttgagctattggtatttttctctttgatccatttctgcaattatataaattgaatgaaggcatctttgtgtgt

SEQ ID NO: 574 - DNA, 428 bp, Glycyrrhiza uralensis
gtatcaaagaggatcaccctgccattcttcagcgactgcgcaaattggatcctgttctgcgaggagactccaaccacaagccatgggacactccaacgtttggaattctcaccccaagaactacggtcctggttctcgcacttgccgtgtgtgtgggaatccacatggattgatcaggaagtatggccttatgtgctgcaggcaatgcttccgcagcaatgccaaggaaattggcttcattaagtaccgctgaagagttattgattgtcacctgcccaagcagttttaggttctggtattaaggatgttttgaggatgttatgtttgaagaaacttagacttgtttttggcatctagttaattatcagacttgatttgtttaactaaatccttttatatacattgcattttactattgatctaaaaaa

SEQ ID NO: 575 - DNA, 470 bp, Liriodendron tulipifera
caaaactagggtttttgaagagagaagatgggtcactccaacgtctggaattctcatccgaagaactacggccctggatcacgcacctgccgagtttgcggaaacccgcatgggttgatcaggaagtatgggctcatgtgctgcaggcagtgtttccgcagcaatgccaaggagattggtttcattaagtaccgctgagaagacaagtgctgggtagacgagtgggtttttggtaaatgggcatccaatggtggcagaaaaggcaaatattttttagtatttgtttagttgggacttgttttctacaacatgcttaaatactctctggggtcttttgcttaccccaacatgcaggaactagcatacctcttcagaggatcttataggttgatttctctaaatatgtaatgatgccgctactgatttagaaaccccgtagttatccatattcataagctgaacttgttttg

SEQ ID NO: 576 - DNA, 460 bp, Cucumis melo
ttaaatacttaacttttctctcgtttgcctcttcataggaatttcgaagccttaacgagctcatcagatttccttctctctcgcaagcaatccaaacatggggcactcgaacgtctggaattcgcaccctaagaactacggacccggctctcgaacctgccgggtttgcggaaatccacatggtttgatcagaaagtatggacttatgtgctgcagacagtgcttccgtagcaacgccaaggaaattggtttcatcaagtaccgctaaatggccaattttttgtctcccgttagaggtgtaacagatggattatgttagcagcattttcatatatatataagatatagaaccttgaacttccattttatgtccctagttctttttttttttttacttgaacattgagttgattgttgaactttaggcccttattgtgttttactaattttgaagatctaa

SEQ ID NO: 577 - DNA, 659 bp, Cucumis melo
ctcaccaaattttgtgccgtcttcgcattgtgatttcgaagcatctcaataccctcacaatcatggggcactccaacgtttggaactctcatcctaagaactatggccctggttctcgcacttgtcgtgtgtgcggaaatccccatgggttgatcaggaagtatggacttatgtgttgcagacaatgcttccgcagcaatgccaaggaaattggtttcatcaagtaccgctaagaagctaattatccctagaagagagaatgggttgaatttatattgaagaacgtttcccatgttttgcttttgtttactccgtatggaatatgaagtgattgttagaagacgtttttgacacttttgttctgaacatttaaagtttcttaattgagcttcttgagattattttgacatatattccttctattattatttttaagttcttaagcatgcttgatgttgtgtcaccttgtcagtttaggaagtggagggtttaggctatatggtattgttaatcagtttgtgattgtagttaaactaattacgagactgtgtcttaattcctttagtctctaaattttttttatggagcgtagttgagcacgtgagccttgaaaaaagtatcatttcccactctatgcagtaatacaataccgttgaaaa

SEQ ID NO: 578 - DNA, 716 bp, Cucumis melo
gaagactgtctagggctttgaaattctgcaaattagcgattgaaaacggtttctaaggtgatcggccgacgaagaagacgatgggacattcaaacgtgtggaattcacatccaaagaactatggacctggttctcgcacttgccgtgtctgtggaaacccccatggattgatccgcaagtatggcctgatgtgctgcaggcagtgctttcgtagtaatgccaaagaaattggcttcattaagtaccgctgaaaatggagctatgatcttcaaaggttgcagatatgaggatgttggtcacttacttcttcttcgcttagtctattgacatttaaatgatttccgatcaattaggataaaaagaattatcagttgcactttataaccaaccaagcttgggaattacttggttctgagtggttgaaagagtttaggagaattctaaacacccatatttaagttatttcaactcaattatttggattatctaaatttggttatgaatttttatcctggttaatttggtattgtccaaggaaatgggggtagggcatgccccaattaaaaattgacgggcaacagcctttccccaaaaagttttcaagcttagctatgaatgtagtagtgtccttgaaatatgttagtaagtcgggccagttgagtctaagttttagttgttgtgtaagtttggagttttgtctttgaataatagtttct

SEQ ID NO: 579 - DNA, 415 bp, Prunus persica
tgagattcctctgcgcctgctagggtttttgcttccttcaaaccaaatcatggggcactccaacgtgtggaactctcaccctaagaactacggccctggatcgcgcacctgtcgcgtgtgtggaaaccctcatgggttgatcaggaagtacggtctcatgtgctgcaggcagtgcttccgtagcaatgccaaggaaattggcttcattaagtatcgttaagtagctgaccttcaacgtcccaggacttgaagttttggcccaagaatcgtcagagtagttgtttctgagttgtcatgaactccaagaagatatttttgttttagctgatttgctgttgaacttgaattggtggtcagactatgaatattgtgttaatgaattaaagtttgatttatgttctcttttgttgtggct

SEQ ID NO: 580 - DNA, 566 bp, Juglans hindsii x Juglans regia
gtctttgtggtgttgctgcgttctcaagggttttctcaaagcctcttgcttccgcagctctctccaatttcccctttctctgagacacagaacaagatcatggggcactccaacgtgtggaattctcaccccaagaactacggccctggctcccgcgcctgtcgggtttgcgggaatccccatgggttgatcaggaagtacggcctcatgtgttgtaggcaatgcttccgtagcaacgccaaggaaattggcttcattaagtaccgctgaagggtttcgtccgtctgttccacaagagcaagggctttggcttaagcatgatatgatttgtggtttttaagtttgaagaacctctagattttcagttttagttctatgtaatgtttaaacctgagttcaatgacgggattatgaatatttttgcttcaaatgtttgaagatcatttacaaattatcatttttgtttgctgccattgtttgtcgtactcgtcatttagatttttctcattgagtaatggaatacttctaattgagtataagacctggctacctcctctacttgtttt

SEQ ID NO: 581 - DNA, 559 bp, Juglans hindsii x Juglans regia
gtggtgttgctgcgttctcaggggttttcttaaagcctcttgcttttcgcagctctctccaatttcccctttcgctgagacacagaacaagatcatggggcactccaacgtgtggaattctcaccccaagaactacggccctggctcccgcgcctgtcgggtttgcgggaatccccatgggttgatcaggaagtacggcctcatgtgttgtaggcaatgcttccgtagcaacgccaaggaaattggcttcattaagtaccgctgaagggtttcgtccgtccgttccacaagagcaaaggctttggctgaagcatgatatgatttgtggtttttaagtttgaagaaccccttgattttcagttttagttctatgtaatgtttaaacctgagttcaatgacgggagtatgaatttttttgcttcaaatgtttgaagatcatttacaaattatcattttctgtttgctgccattgtttttcgttctcgtcgtttagatttttctcatgagtaatggaatacttctaattgagtataagacctggctacctcctttacttctt

SEQ ID NO: 582 - DNA, 825 bp, Bruguiera gymnorhiza
gaggttgatttttagggtttcgattaagctcgccagcggctctgcatcgtaggaagttggaaagaagcaatcgccgagagatgggtcactctaacgtctggaactctcaccccaagaactacggccccggttcccgtgcctgtcgtgtgtgtgggaattcccatgggttgatcaggaagtatgggctcatgtgctgcagacagtgcttccgtagcaatgccaaggaaattggcttcattaagtaccgctgaatgatacgaacagtccacaagtacctatggtgcatgtttgatttgagtggtggcttcgacatttaaatgagttttaagacaatgttctgtttagcttatgtgttgttgaactttgattgatgttaaaaaaaggatataatgggatcacttgaaatttttgggagagataatgtggtgattatattgttgttttggtttgggatatttggaatttgcctttgtgttatgtcttatgaacttttttttgggtcgcggggtgcgggtttatttctttgggggtaggtggtagtcggtctcgggctggttgagttggttttgttttggggtgtttaggacatagacatatcggagttggtgataatagtgggtggcttgtgttgtgatatgcggggttttgtctgggattgttaattctgtatcttgtgatggggtgggaaaaagtgctttgtcaatggtgtcgctgggttcttttgtgttttgtttgattcagtttaggtggtggtgcgtggattattttcttttttttgagagaatagttattgcggccaatggtggtgttgttgtgtttcttttt

SEQ ID NO: 583 - DNA, 431 bp, Cyamopsis tetragonoloba
cttcgtttgtggttgtgtatcttcttctgcctcagtatccaattccgaagcaatgggtcactccaacgtctggaactctcaccccaagaactacggtcctggttctcgcgcctgtcgtgtttgtgggaatcctcatggaattatcaggaagtatggccttatgtgctgcaggcaatgctttcgcagcaatgccaaggaaattggattcattaagtaccgctgaagagctattgtcacctgcgcaaccaaatttaggttattgcactaggatgatatgaggatgttttgtttgaagaaactcaagacttgtttttggtatctagttaattatcaaacttaatttgtcgactaagaatacctttatataaattgttttggattattgttctccatctttgatcctcaatcatttgaagtatgtttgtgcgtta

SEQ ID NO: 584 - DNA, 760 bp, Eucalyptus grandis
gccggggatccgtccctcactcctctgcgatccctgctcagcttgcgcgctcttgccgtcggccgtcgctgagttctcgaagaagaagaagaagccatgggtcactcgaacgtctggaactctcaccccaagagctacggccctggttctcgcgcatgtcgcgtgtgtgggaatcctcatggtttgattaggaagtatggactcatgtgctgcagacagtgtttccgcagcaatgccaaggagattggcttcatcaagtaccgctaaagagctgatactctctgcccctggcgatttcccggtgcaagcactcttttagagatctagatttgccataattttaaagatgattttgttttgatgtcattgtcattggagccgactttggacttgaaatttgtaaggattgcctatttgagttcgtaaggatcgcctatttgagttcgtaaaactctaaattttcttgttcattgcttgcctcccccagtatttgcactttgccctttttgatgatgatgtgcagtggaagttgagctctctcatgatagtcatttgtcttaaacttgtgataatgttagttcttgtggtgcttctaagaattgccgaaggaatctttttacatgtcggacgacattcatatcgagcagggattattgaggtacttcaaaaatggacggcattgtagagactctactgtatgatttgttataattcgcatcgctggaatttctactttggtttcgtgtttgtatgaatgggt

SEQ ID NO: 585 - DNA, 684 bp, Eucalyptus grandis
aaaacgcggcgttttagggacgtggaagcctataaaaaagctcttagggtttttcattacggccgttcttcacaagagcggcggcgatcgaactgcgcggcgagctccgaaggattttccgcatcgaggaggaagaagagagaagatgggtcactccaacgtgtggaactctcatcccaagagctacggccccggttctcgcgcttgccgggtatgtggaaaccctcatggtttgatccggaagtatggactgatgtgctgtaggcagtgcttccgcagcaacgccaaggaaattggcttcattaagtaccgctgattgaggggggagtcatgtcataaacaattggaggaggttatgcaaagagttttgtctggacgtgtaatttcgaacttttctttcatcttcttgctccaagttaggcgttactgagatttctcttggatatgtttggttggctgttgccctttggaagctgattaccccctggtctacaggggtacatggacatggtttatttgacctcttgaaagaaaaacaaaatcagcatgagtacctctcaagaaatttaatatttattgacttgcttgtgctagtaatttgtgtacaactgatgatccaaccgttgtgcgggtttcttctaaaccacaccacccacccaccccccctccccgaaaaaaaaaaaa

SEQ ID NO: 586 - DNA, 580 bp, Actinidia deliciosa
tttcgatctgtcttcttctccgttgtagagagagagagagagagagaaaagatgggtcactcgaacgtatggaactcgcatcccaagagctatggtcctggctctcgcacctgtcgcgtgtgtgggaaccctcatggattgatccgaaagtatgggctgatgtgctgcagacagtgcttccgcagcaatgccaaggaaattggctttattaagtatcgctaaatggttttactgattctacaagagaaggtggctttacccaagcttaataccaagtttcttttctttttcgtttttaatgatttgagcaactttatgtattgtccttcatcttcggaggcattgctggtcttagttttatctaagttgaattgattggcggaccaagaattgcttgtattaggatttgtattctcagttttactatttgcttcagctttgcttgtgatatcgcttgaaatcaaattcaggttgaagttgaggacttctgtggaacaaaattgataacttctgcttcctagttatgtttatttggttttgaggaggaaagctcaaggagttagttgtccaaaaaaaaaaa

SEQ ID NO: 587 - DNA, 420 bp, Actinidia deliciosa
cgtgatatcacctgagagagatgggtcactcgaacgtttggaactcgcatccgaagagctacggtccaggctctcgcacctgtcgtgtgtgtgggaatccccatggcttgatccggaagtatgggcttatgtgctgcagacagtgcttccgtagcaatgccaaggaaattggctttattaagtatcgctaaaggattttgctggttgttaaagagggttttgcccaaggataatgcctggtgttttccatggttagagtaattgtgtgaccattctagttatgtatttttgagacaacattataattggatgatattgccggtcttacttttgtattgaacttgagttgatttgtgaaccaagaatttactagtatcacttgttttgaatgtagtttttgcttctacctaaaaaaaaaaa

SEQ ID NO: 588 - DNA, 505 bp, Actinidia deliciosa
cgatctgtcttcttctccgctgtagttagagagagagagagagagagagagagaaacgatgggtcactcgaacgtgtggaactcgcatcccaagagctatggccctggatctcgcacctgtcgcgtgtgtggcaaccctcatgggttgatccgaaagtacgggcttatgtgctgcagacagtgcttccgcagcaatgccaaggaaattggcttcattaagtatcgctaaatgattttactggttctacaagagaaggtggctttgcccgagcataataccaagtttcttttcttcttcgttttaatgatttgagcaactttatgactgttattgtcttacatctttggaggcattggtggtcttagttctattgaagttgaattgtttggcggaccaaaaactgcttgtattaggatttatattcccagttttactatttgcttcagctttgcttgtgatatcacttgaaatcaaattcaggttgaagtttaccaaaaaaaaaaa

SEQ ID NO: 589 - DNA, 559 bp, Liriodendron tulipifera
gctttctgcatctatctctctcgaaagaagggggcttcgaactgcagcgagagaagatgggccacaccaacgtctggaactctcatcccaagaactacggccctggatctcgtacctgccgggtctgcggaaatccacatgggttgatcaggaagtatgggcttatgtgctgcaggcagtgcttccgcagcaatgccaaggagattggcttcatcaagtatcgctaagtgaatcactcgggatgcagcacgcaatggaggaagaggagcatttgttcttatattttccttctatgtttgattacagatgtctctgaaataggtatagatacatgcactgggtgtttgctttcactgatgtgctaccagtcttaaaccaaatttctggatgttttttgaagacatgtgattagcatgatttctccacttctctgaatgcttattgtcatacacaatgttttaaatatcgatgatattacccgatatatcacactatattttgtatccaacctatgcgatacaaaacgcacatgtagtgctgatatatcccatatatttga

SEQ ID NO: 590 - DNA, 755 bp, Quercus alba
tggggctattgctagggttttcgatttgctctttgctcttgcgcagctccgcagacttacaaagcaaagaaccaaaatcaaatcatggggcactcaaacgtgtggaactctcaccctaagagctacggccctggttcccgtacctgccgtgtgtgtggaaacccccatgggttgatcaggaagtatggtctcatgtgctgcagacagtgcttccgcagcaacgccaaggaaattggcttcattaagtaccgttaaatggttgtaattggctacggcgcaagaatagaggttttggcccaagcaagatctgatcagattagttctttcaaagtttgaagcaacttttgagaatttatgttttgctttatctaatgttgaacatgtggtgattgttggataatgaatatttttgcattactcatttgaagagattcatttatcttgtttgcggcctttactttttagtattactattatgaggtatcacaatggtatcatagataattgagtgcactggattcttctggtttactgttatgggcatcaaatataggaatattacttattgagattccagttggttgagtgaaactgaaatcttcgagactgactgctgtcgctctttgatgccaatggtttgatgactatggctgtgtttttttgcattggttggcatggtgcaattaatttcatttgtaatatcctctgtggtttgcaaacaattgtcatgaccaacattccatagagagtgatca

SEQ ID NO: 591 - DNA, 617 bp, Prunus persica
agtcataggattagggtttagaactccatcgttttcttgcagctgcagcggcaacgcagtgagttgaaggcggccttccaagacgagcgagcaagaatcaaaatgggccattccaacgtttggaattctcatccgaagaactacgggcctggttcccgtacgtgtcgggtatgtggaaaccctcatgggttgatccggaagtacgccttgatgtgctgcaggcagtgcttccgcagcaacgccaaggaaatcggcttcatcaagtaccgctgaaagttgaaagcatctgattttgcatcggccatgaagatgtcagaaatatggagctggagagctttttcttttgttgctgttacttttcctcttttcttatttaagatgataatgtagcatatcttaagcttgacaattagttgttgactgggccgttgttgaaactatttgttgggtctaaattttatttccagttgatatgcgctttggttgttaatgcttcaatggttttgattgggttcataataaattttagattattgtcacttgtcgtttgatgcaagaagaataataacaaacgttagttgtcgcatttgagcccatactttgttggcgaacaagaa

SEQ ID NO: 592 - DNA, 262 bp, Rhizophora mangle
ctctgaaagtattagaagtaatcggcaagcaatgggtcactctaacgtctggaactctcaccccaagaattacggtcctggttcccgtgcctgtcgtgtgtgtgggaatccgcatgggttgatcaggaggtatggactcatgtgctgcagacagtgcttccgtagcaatgccaaggaaattggctttattaagtaccgctgaatgacatgaacagtccacaagtgcccatggtgcatatttgatttgagtagtggcttcaac

SEQ ID NO: 593 - DNA, 428 bp, Camellia sinensis
ctctgcgattagggttttgaagagtctgcagccgctgagtttgtagagcttcgcggattgagagagagagagaagatgggtcactcgaatgtctggaactctcatccaaagagctatggtcctggctctcgcacctgtcgcgtgtgtgggaatcctcatgggttgatccgtaagtatgggcttatgtgctgcagacagtgcttccgcagcaatgccaaggaaattggctttattaagtatcgctaaaggatttcactggttctacaggagaagaggattttgccccaagcataatgctgtttttgtttgttttttccctttggtttgaggacctttatgattgttcttgttctgtatctttggatacaaaccattgtcaacattgcttttcttagtttaatattgaacttgagttgattggtggacac

SEQ ID NO: 594 - DNA, 736 bp, Camellia sinensis
gggggagggagagagagagaggcttctgattctgcatccgttgcgattattagggtttgaagtctttctttgattcagagagaagagagagagaaaagtaaagatgggtcactcgaacgtgtggaattcgcatccaaagagctacggtcctggctctcgcacctgccgtgtgtgcgggaaccctcatgggttgatccgaaagtatgggcttatgtgctgcagacagtgctttcgcagcaatgccaaggaaattggctttattaagtaccgttaaaagcattgtgctggttgttctacaagagaagatgattttgcagaagtataatgtggtgttttctttgattagagtaactttatgattgttctatcgtttggatacaaaccattattattgtaacgacgttattgtcttaatttaatgttgaacttaattgattggtgaaccaagaattttccggtatcacttgttttggattggtccttgcttcttcgtcgtgttgtggtgcaactgatttggaggaaacctgaaggcaaactgtcctgaaactgttgctgcttttagtttattttggtgattattagtttgtttttagaaccacatcatcaagtctgctagttttgcagactatttttttttttgcttgcaattccatcacagttttgatgcattacttcttggaatatgattaatgaaagaaaaagtagaagcagaacttttaaaaaaatttgctatagg

SEQ ID NO: 595 - DNA, 447 bp, Juglans hindsii x Juglans regia
ccttcattctattggaagctagcgaagcggcgtattgcgttaagggagcttgtacggagagaaatgggtcattccaacgtctggaattcgcatccgaaaaactacggtcctggttctcgtgcttgccgagtctgtggtaaccctcatggtataatccggaagtatgggctgatgtgttgccggcagtgcttccgcagcaatgccaaggagattggctttatcaagtaccgctgaaggctggctacgctgagaaagtttatgtctgaagaatattgtctacatctgcttcgtcccccccaaaccttctctgccttttttcttttaaaattaaaaaatgtactctatttgcttgaactagtagtggtgtttttcctttagtttgttcgcttcccaatcttgtttaatggtgatatttgttggatcccaaatttcttaactttgaggtgc

SEQ ID NO: 596 - DNA, 982 bp, Amorphophallus konjac
ggacccggcgcaggcgatttaaaggcacaagcggcgccgcctcctgtcctccgcaggaaacctgaaatcggtgtgtttgtctgcgcgaagccgtgcgtgcccacggagacggcgaagaagaatagagatggggcactctgcggtctggaactcgcatcccaagaactacggccctggatctagggcgtgccgagtttgtggcaaccctcatggtctgatccggaaatacgggctcatgtgttgcagacagtgcttccgcagcaatgccaaagagattggctttatcaagtaccgctgaataaatcgtcgctgctgcatgaagcggagttctggagacatttagattttggattttctggctgcaacgatcttttttgccattttccagtcaaaaaatgaacatcgtcgtttatgttgttaggaatcgcaattacttggaattactctgatatcccaagatttaaacttacttaatttcaattccgactctaatgcaagtgtcttaattgcttggaattacacgccaatgtctgtctaccgctgagtcgagattatttactcgttgagatcggggtcagtacaatgacatcgtatgctttttggagtcccatggggcagacagacgaccccgtgtctgggtcccagacggattcgtctgcagtccgaggcctcttaaccgctgtaggggagagggaatcgtttttaccgggggtcatgtttctgaccctgatcagccgaccatcatggggattctgggatcctccggtacctcatctgttctcatttgcccagccttgtctctgggtggaccgacatttccttctctgggtcaactcttaacgagggatgagtttcgctaattctatacatttattttttttaggttagtttgtttaaacggattcgagtttgggttgaaagttctacgttagaaaattgttagtttaaacttgttttacttagtttttttaaaatcttctag

SEQ ID NO: 597 - DNA, 477 bp, Malus domestica
agggtttaatatctccatcgtattcccgcagctgccgaggcgacgcagaaagaaaaccctagcgtgattcaagatgggacactcgaacgtctggaactctcaccccaagaactacggcccgggttcccgcacttgccgagtgtgtggaaaccctcatgggttgatccggaagtacgcgctgatgtgctgcaggcagtgcttccgcagcaacgccaaggagattggcttcatcaagtaccgctaaatggagagactgcctgattcagattggccatcaagttgtctgaagtatggagctcgggatcggtttcattgttgctgtaccttttcattttcttatccaagaccataatgtagtataatcttaaaagttttgacaattagctgttgactgagccgttgttgaaattattcgtagaatcgaaatcttgttttccagtgggtatttctctctctctttggttttatcattccttc

SEQ ID NO: 598 - DNA, 584 bp, Malus domestica
agggttttaggtagccatcgtatcctggcagctggagaggcgacgcagaaaaccctagcgagattcaaagatgggacactcgaacgtatggaactctcaccccaagaactacggccccggttcccgcacttgccgagtgtgtggaaaccctcatgggttgatccggaagtatgcgctgatgtgctgcaggcagtgcttccgcagcaatgccaaggagattggcttcatcaagtaccgctaaatggagagaccacctgattcagattggccatcaagaagtctgaagtatggagctcgggattgttttcgttgttggtgttccttttcattatcttatctaagaccataatgtaggataaagtttgacaattagttgttgactgagccattgttgaaactatttgatgcatctgaattttgttatccagtgggctggagtggttttaggacaaggattgtctgcccacccttttttcatgcccttccatgtcttcctatttgtgtggtcacagttaagtcacgtcaacattttatattactattcatttttgtcttattatctttataaaaaaataatataataa

SEQ ID NO: 599 - DNA, 579 bp, Aristolochia fimbriata
cctagtctcgtgtgcaagagcagcgactacgccgccgactgtcgcgacgccgttcttgaagtagttcttcgccgacttagtgaaggagagatgggtcattccaatgtgtggaactctcatcccaaaaattacggccctggttctcgtgcgtgccgggtctgtgggaatggccatgggctcatcaggaagtatgggttaatgtgctgcagacagtgtttccgcagcaatgccaaagaaatcggctttatcaagtaccgttaagaaaaagtcgatatcatcgaggcgggttgagaatccatacagaaggtgtatgtctttatcgtgccgaggatgctgctatgggtgtttttattgctttgaagacttggattgttcagtatttgctagattgatgcacagtatttgaaagccatgattttgtgctgggaaagaagcatttaaaaaaggttaatttatgtttcagtgcatttttaggaaatatttctgcatttagtgtagtgtagtgtgttggagggtgtgagtcaacctaaatatatcacttaactagttaatttgagctaaacctggtttgactttatt

SEQ ID NO: 600 - DNA, 823 bp, Aristolochia fimbriata
atctcttacacgaacgagtttgaagggtctccccggattattgaagatatgggtcactccaatgtgtggaattctcatcccaaaaattatggtcccggctctcgtgcatgccgggtgtgcggaaatgggcatgggctcatcaggaagtatggattgatgtgctgcaggcaatgtttccgcagcaacgccaaggaaattggcttcatcaagtaccgttaaggaatgaaagaaggcttgatagcgcgtgaggagcaatgcgtcgtctcaattggccttacttatataatctcttcttcaacgccgtgattcattcatatggatgtttttactacttttattatgcaatgctcccaacttgaatgcttgtaacgaagtaatgtttttgattgttttcgtgtaagagaggcattaggaagacatgtcgttacggtattgtcacttcagtagtagactcgactccccatgtagtagagagatgtttttttattgtacttgctgaattacgacgttgctgtgattacagagtcactagttttacggttctacgtaaatagtagtattattcttgctaaaaaaattgacccatatttacgtattggaataataagatcacaatcatttatttgtgattaattaacgcttaaaattgactcttttcagtgcctaactataatttcaagctgtgaaaattttctgtcgtacaatcacttatgaatattctcatcattaatgtaacgagtaatgatacctctgagacgttaattgagattaattagctctaagcgatcattggaaaaaaaaaagtaaaacagtttttgtctaa

SEQ ID NO: 601 - DNA, 598 bp, Hordeum vulgare
cagaaaatagatccaagtgagagcctagcaagtgaagcctgcctgcctatagaaaacccggcgcccacgcgacccgacctcctcattctagccaggcgcgagcaaaggtagggtttacagttcccaacttccaagcctcgccgccgccgccgccgccgccatgggacactcgaacgtctggaactcgcaccccaagaactacggccccggatccagggtttgccgtgtctgcggcaactcgcatggcctgatccgcaagtacgggctgatgtgctgcaggcagtgcttccgcagcaacgccaaggacatcggcttcatcaaggtatgcgccgccacactgtctatggatttcctgaatctgtgcctgaattttatggctgctgagtagtgctagtatatgcacccatgctttgctttgaataatgtatatgctctgtctacaaggcctctcttggtatggtgaaccagttttattttgttagagactaccatctggtagcatgtgtcgttgcatactgtagtgtattgtatggcatgttagattcacttattcaaaatagatgtgtgttgctcctcttgccagagtaaacctggttaa

SEQ ID NO: 602 - DNA, 527 bp, Phaseolus vulgaris
tttgacccggactccagaaaaaaccctaatttgagtgtgtctataaattgatatatgcagaaaccacaaggagttctcctgcatattctttagcgactgcgtttttggatcgaaacctctactgcggcgcaacaatgggacactccaacgtttggaactctcaccccaaaagctatggtcctggttctcgcacttgccgtgtgtgtggaaatccacatggattgatcaggaagtacggacttatgtgctgcaggcagtgcttccgcagcaatgccaaggagattggcttcatcaagtatcgctaaggagcttttgttacctcccatccaaatattatgttctagctctagatgttccgaggatgttatgtttgaagaaacttttgagactttttttttgcatctaattgattatcagacgtaatttgtggatctaagaatacttttatatatattgttttgaaatattgacttccatatctgatccttaatcattctgcatcatatgcatgtgtcatacaggtccaa

SEQ ID NO: 603 - DNA, 1666 bp, Cannabis sativa
gggaaaccaaatgcgggtcaaagcgtagacgatcaaattagggtttggagtctcaacatatataaacaagatttccactctttcttaaaaccctagcctattctctacaactgcttcaactctcgattccagccctctttctctcccgcctcccatccaatcatgggacactccaacgtctggaattctcaccccaagagctatggccccggttcacgcacctgccgtgtgtgtggaaacccccatggtttgatcaggaagtatggtctcatgtgctgcagacagtgcttccgcagcaacgccaaggagattggcttcatcaagtaccgttaagagggatttggcttacaaattttattggagcggatattatggcctaaaggattaatcttattagcattttatttttctgttttagatctatttcttaagaagaaagattttgttttcatgttttagttttgttctaatgatgaccatgaattggattttgaatcctttggattaaagtaaatttaaagtaaacttatccgctcattgtgcctaccatgcttttatcatatttgttctgtttttctcatgcctatttgtttgatgttattactagatgacatatttcatagcttattttgattagttcatgctattcgatatgttcaagtttttctgtgcaattaatgtgaagttggttgtgaaaatttaccctatgagatttagggcaatgtgagtttctgttagccatgccatcattatattgtaattgtattatcaattttactttgtctctagctccttgagtaatcgagtttgttagcatttagtttgttcaagtttaaaatgttaggagaagttttctatatatcaagttagaacaatattttatgctcttaccttgtgttgtgtatctaaatatttcaaggactatgctaatcgataggcctttcctaatttttgacaagttgagactcaaaatcttgccacttcaaaagcccaataagaaattggatcattaaaatgtaatctattaatgttgaatctgctgagttgaacctaaaaccctttgtagttgagacacaaaatcttgccacttcaaagcagttgcaacctttattgattactgtgattagttatagtttagacttgggtcgttgagtttaacttagaataaaagaattagttgatccaatgtgttacatattcagtcttagttgaccccaaatatttgtcgccaaatctactttaatgtgcatttaggaactggtggttgccacatattagcttgcatgctatttaaagggtattactctctaattttgattattcttggcctttctggctgtcaaagttcacttttttaaaagaccacgatagtacatattattttcgtttttaaagatcaatcatctcttatagggactcatgtgagtaaggctttcatatttttttcatttccttttgggaccagttcttgatgagttgagtagttagtagggtcatttgaacttgtctaatagtcttgagatatcttaaatatcccccatttttttagtagacacctttaaaatcaaggaaggtaaaattggttaaaaatcacaaacagttaatattatttaatagatataatgaaaagaaccaaaaactaaatctcatacctgtctcactttat

SEQ ID NO: 604 - DNA, 645 bp, Castanea mollissima
cgcagctccgcagactctcacagctcttacaaagcgaagaaccaaaatcatggggcactcaaacgtgtggaactctcaccctaagagctacggccctggttctcgtacctgccgtgtgtgtggaaacccccatgggttgatcaggaagtatggtctcatgtgctgcagacagtgcttccgcagcaacgccaaggaaattggcttcattaagtaccgttaaatggttgtaattggctacagcgcaggaatagaggttttggtccaagcaagcagatcagattagttatttcaaagtttgaagcagcttttgagaatttatgttttgctttatctaatgttgaacgtgtggtgattgttggataatgaatatttttgcattactcatttgaagagattcatttatcttgtttgcggcctttactttttattacttactattatcaggtatttcaatggtatcatagataattgagtgcgctggattcttctggtttactgttatgggcatcaaatataggaatattacttattgagattccagttggttgatgccaatggaataatgattatggctgtgtttttcacattggttggcattttgcaattaatttcgtttgtaatcctctggagtacatcatgtgttcc

SEQ ID NO: 605 - DNA, 1202 bp, Cicer arietinum
ccaacccaaaagaaagaaaaaccctaatttgattatttataaataaggttttccagaacacaaatcttcccctgcctcgcaattcgtcagccgcggcgcatttcgttccttccggcgaagaaaaccaaagcaccaagctatgggacactctaacgtttggaactctcaccccaagacctacggtcctggttctcgtacttgccgtgtttgtgggaatccacatggattgatcaggaagtatggtcttatgtgttgcagacaatgcttccgtagcaatgccaaggaaattggcttcatcaagtaccgctaaggagttgtctgagcccaaccaaatttaggctctgcattagaatgtgtgaggtggttatgtttgaaactacttgacaattgttttttgcatctagtttatggtatcagactatttttgttgaattaagaacccttttatatatattgcttttaaccatctatatctctatctttggttcttgattttttctggaatatatgcaaattttaactaacccttgttgaattaatttacatattggtatttgtataatactataaaatatttatagatttgcctgacgttagataagttgatgtttcaccgactctgcaattttaagttgtggctatatggaatgtgcgtatccttcctgaaagggtggttttgaaatttgaaaatatgcaagttataattgatttcatagtttttcaaaaatattgaagagataaaaaaaataccgtgcctttctaggtcgtattttaatttcatttaggcaacaccactattgcactgtctttttaaatattgcgagttacaaaatgttgaaatggttggcaatagctatgtttgaatgatatattagtccctgtagtatcacacccaccaaatggaatttgtagttatagatgtgcttgttgctatttatcaaaggttcacaatttttgataccgaagtctcactgttatgattttttaatgacccaattcgtacagaaacttggttttggatttgctaattgaagcgttacattaaaaataagtcattttaattctcaaaaaggtgtcttccaattagttcacttaggcgatcttggttagtaataagtaggaacaaaagttttgcggaggaaacttaagaagcatcgacaatttctatttttggagcttgtgtattatctgtcaaaagtact

SEQ ID NO: 606 - DNA, 842 bp, Cicer arietinum
ttgagaatcgaaaccaaattgtcctgtatgtgtgaggttatatatatagatggccgtctatcatattgttgtgcgactgagtttctagggttttgaggctgctgcgttccccatcttccccaatctccgaggagcaaatcgacgatcatgggtcactctaatgtctggaattctcaccccaaaacctacggtcctggctctcgcacctgccgtgtgtgtgggaaccctcatggattgatcaggaagtacggacttatgtgttgcaggcagtgcttccgtagcaatgccaaggaaattggcttcattaagtatcgctaaaacaattgaagtcctttttggtgttgcagtactgctgaaggatcagcatctatctgtccactgttttagattattgcattgggaattataatgatgccaggatgttttaatttttgaagaacttgttaattttgtgggatttagttaagtcaattataaaacttgagttttgaaattgaagtatatttgtgttgttaatgtcattttctctttatccagctatagaattataaattgaatgtggcgtccatcttttgtatgcggtgtctgttttacaaagtgaataacccaccaactcatgcagcctgcctaccttaaaatttaactagacttgagaagttattaagatacggtttgcaaattttaaactgataccaatatggatgttccaatccaaattagtgcttgtcatatttaaagattgggagtgcttccatgggtagatctcgcagagataatatggaaactttgatacctttgggcgaggcttattaaaggcaaaaacatgcttcttttggaatggg

SEQ ID NO: 607 - DNA, 891 bp, Cicer arietinum
atataactcatcatagttaatacaccctctaaagaatcacaagcaataatcaagtaaaaattgcatttatttcatgtacatgattttaaactataaatcaataggtataataaatgttcgctaaccgaaaaaaaagaaaaaaaagaaaaggaattatttaaacacaacagaggttgggccaggcccaattaatatttaacccaccaacacgaaagaaaagaaaaaccccaattttgaatctatataaaaccctaatttgtcaacgatgtagcaatttgaactcacagcaataagcgatgggacactcaaatgtttggaactctcaccctaaaacctacggtcctggttctcgcacttgccgtgtgtgcggaaatccacatggattgatcaggaagtatggccttatgtgttgcaggcaatgcttccgtagcaatgccaaggagattggtttcatcaagtaccgctaaagagttatgtctgtgaccaaccaattttaggcccttgaattagaatgttgtgaggaggatatgtttgaagcttcttgagtttatttttttgcatttaatttatttgtcagattttattggttgaattaagtatcttttatatatattgttttataccacaaacaagtcaagttttaatggtatttagttaatttgtatggttttatagtttgctactacaatcaaagaaaattttaatgctgccacaattttctcaataatctcatatttatacctgcaaaaagtccttcaaattagattcatccatacctgtctcattttcttcctgatgaatactcaacgatttcatcaaaataataataaaactaatcatgactaatttcgagtgccatttcaaacaaagcattgatctccatgttttcac

SEQ ID NO: 608 - DNA, 441 bp, Cucurbita pepo
taaaagcaatcctttttgccgacttcttcttccccgcaaaatctctgcttcacgttgtgatttccgaagcgcttcaatacctcacaatcatggggcactccaatgtgtggaactctcatccgaagagctatggccctggttctcgcacctgtcgtgtgtgcggaaatccccatggattgatcagaaagtatggacttatgtgctgcagacaatgcttccgtagcaatgccaaggaaattgggttcattaagtaccgctaagaagctaacatctctggaagagaggttgggttgaatttattgaagaagatttttcaatgtttagcaatgttttctctcttgtttactcggtatcgaatatgaaatgattgttagacgacgattttgacacttggttctggactaaatttaacgcttcttaattgagcttcctcttgatatt

SEQ ID NO: 609 - DNA, 567 bp, Cucurbita pepo
atataaaatcaatcctttaatccgtcgtcttcttcctcgcaagaattctgcttcacattgtgatttcgaagcgtctcaatacctcacgatcatggggcactccaacgtgtggaactctcatcctaagagctatgggcctggttctcgcacctgtcgtgtgtgcggaaatcctcatggtttgatcaggaagtatggacttatgtgttgcagacaatgcttccgtagcaatgccaaggaaattggcttcattaagtaccgctaagaagcttatatcagagacgatgggttgaattctttttgaagatttccccatgttttgcgatgttttttctcttatttacttggtctgaaaatggttgttattagaagacgattgtgacactttgctatgaactaccatatttaacgtttcttaattgagcttgccctttgatatattttgacaaatattccttctgttgttttccagtctttaagcgtattcattacgtgatgtctcttttcggtgtcataaactaaaagaaaagaaacaaaagaacgaattaaaattacgttaataccatcacg

SEQ ID NO: 610 - DNA, 474 bp, Cucurbita pepo
gttcgttctattaaggatttttgtccgtctttctttggaatttttgaagccctaacgagctcaacagatttccatctcgtaggcgatccaatcatggggcactcgaacgtctggaactcgcaccctaagagctatggtcccggctctcgcacctgccgggtatgcggtaatcctcatgggttgatcagaaagtacggccttatgtgctgcagacagtgcttccgcagcaacgccaaggaaattggattcatcaagtaccgctaaatggtgaaattttgcctctcctgcctctcccattagagaatgtttgatggatagaatatggttgctggatttgcttatataaaagaaagaaccttgaacttcttttctgtccctagttcattatttccttgaacctcgtgttgattgttgaacttaggctactacaatgtttactgattttgaagtattaagttgtgtcgtttctatttg

SEQ ID NO: 611 - DNA, 436 bp, Cucurbita pepo
ccgcttgcgaggattttcgaaggcttaacgagctcttaagatttcaatctcttaggcaatccaagcatggggcattctaacgtctggaactcgcaccctaagagctatggtcccggctcccgcacctgccgggtttgcggaaaccctcatgggttgatcagaaagtacgggcttatgtgctgcagacaatgcttccgcagcaacgccaaggaaattgggttcatcaagtaccgctaaatggcctagttttctcagttccattaagggtcgatggagggaatatggttgcagctttttcatatatatatatataagaaggaaccttgaattttgattctgtctctagttagttctattttttttctggtaatcttcagttgtattgttagaacttagtactacaactaatgtttatgtattttgaagtattagttag

SEQ ID NO: 612 - DNA, 367 bp, Cucurbita pepo
aaggattttgccgcttcttggaatttttgaagccctaacgagctcaacagatttccatctcgtaggcgatccaatcatggggcactcgaacgtctggaactcgcaccctaagagctatggtcccggctctcgcacctgccgggtatgcggtaatcctcatgggttgatcagaaagtacggccttatgtgctgcagacagtgcttccgcagcaacgccaaggaattggattcatcaagtaccgctaaatggtgaatttgcctctcctgcctctcccattagagaatgtttgatggatagaatatggtgctggatttgcttatataaagaagaccttgaacttctttctgtccctagttcattattcct

SEQ ID NO: 613 - DNA, 466 bp, Cucurbita pepo
aaggattttgccgcttcttggaatttttgaagccctaacgagctcaacagatttccatctcgtaggcgatccaatcatggggcactcgaacgtctggaactcgcaccctaagagctatggtcccggctctcgcacctgccgggtatgcggtaatcctcatgggttgatcagaaagtacggccttatgtgctgcagacagtgcttccgcagcaacgccaaggaaattggattcatcaagtaccgctaaatggcgaaattttgcctctcctgcctctcccattagagaatgtttaatggatagaatatggttgctggatttgcttatataaaagaaagaaccttgaacttcctttctgtccctagttcattatttccttgaacctcgtgttgattgttgaacttaggctactacatgttactgattttgaagattaagatagtgcgtttctatttgtccgagttattc

SEQ ID NO: 614 - DNA, 603 bp, Epimedium sagittatum
gaggacggaaacatgtacaccttcgccggtaatcaagtgagtttgttaatcggtgaaacgtggaagccgttggcagagattccggtggatatacgggtagggacgaatgcggtgatgtggaatggaaaggttatggtcatcgggtctaccgcttacggtgggcccaatgcttgttatttattggatggaggaggcgcgtcgggctgctgctgctgctgttgctctgagatagagaagatgggtcactcaaacgtgtggaattctcatcccaagacctatggtcctggatctcgtacctgtcgtgtgtgtggaaatccacatgggttgatcaggaagtacggtctcatgtgctgtaggcagtgcttccgcagcaacgccaaggagattggattcatcaagtatcgttaaggaacggtggtacgaagcatggtggagcggtgctgttttttgattaatatggatgtactacttggatcagtttgaacactatttaaatgttgggcaaatgtcagacttgaatttgttgtgtacgttttctttcactaaaacatgactgttttcttttctcgtggaatcattacacgacattaaaagccatttaac

SEQ ID NO: 615 - DNA, 513 bp, Euphorbia peplus
ttgcatcttcaagccttcatagaaaatcgtcgaatcatgggtcactccaacgtttggaactctcatcccaagaattacgggcctggttctcgtgcctgccgtgtgtgcggaaatcctcatgggattatcaggaagtatggcctcatgtgctgcagacaatgcttccgtagcaatgccaaggaaatcggtttcatcaagtaccgctaaatgacgaatttcttctgcaacagcagaagatgagccccaagtcaagtagtggttttttgtttgaatgaattttaagataatggttatttaagttgatgtactgttgaacatgcattgatgttggatagaggattttttggaataccatgacaatatttgggcgttactcttataattttactttaatactgtttgctgttctgtattcttactccagatgactctgagattagctgctgtatgttggctgataatagagatgaatggattttggtgtacatgaaagtaggaaaacatttggtttgc

SEQ ID NO: 616 - DNA, 389 bp, Festuca arundinacea
gaaaggtagggtttacagagtcaggacctccggtgccgccgccgccatgggacacgaaaacgtctggaactcgcaccccaagaactacggccccggatccagggtttgccgtgtctgcggcaactcgcatggcctgatccggaagtacgggctgatgtgctgcaggcagtgcttccgcagcaacgccaaggaaattggcttcatcaagtaccgttaagactggaaacctcaaaggaagcatggggtaggaagccatcatcaaagtgtgttgtttcatcgaggatggtctttattatatatcatgtaatggactaaatgtttgaatcggagtaacaaacctttacaccgtgttggtgactgctacctgagcatgtgaaacagataattgt

SEQ ID NO: 617 - DNA, 404 bp, Festuca arundinacea
gagaaaggtagggtttacagagtccggacctccaccgccgccgccgccatgggacacgagaacgtctggaactcgcaccccaagaactacggccccggatccagggtttgccgtgtctgcggcaactcgcatggcctgatccggaagtacgggctcatgtgctgcaggcagtgcttccgcagcaacgccaaggaaattggcttcatcaagtaccgttaagactggaaacctcaaaggaagcatggagtaggaagccatcatcaaagtgtgttgtttcatcgaggacgatctttattatatatcatgtaatggactaaatgtttgaatcggagtaacaaacctttacaccgtgttggtgactgctgcttgagcatgcaaaacagataattgtgttgctattgtgt

SEQ ID NO: 618 - DNA, 450 bp, Zingiber officinale
gcacgaggcctcgtgccgaattcggcacgaggcttttcgattcgaggaagatctaccggagaggagatggggcactcaaacgtctggaactcgcatcccaagaactatggacctggatctcggctatgccgtgtttgtgggaacccacatgcaataatcaggaagtatggtctcatgtgttgcagacagtgcttccgcagcaacgccaaagatattggctttattaagtatcgctgaaggtggaagggtctcaacgatgaagagttttcatgatgaaactactatgtgctagaagattttagtttatttctttttacatgtttcttcccaagactataaactatctgaatgaacgaactgtggctgagcaatgttttaagcagtattttggtttaatgaattgattttcaacttgcaagcgtcaaaacctcgtgccgaattcggcacgag

SEQ ID NO: 619 - DNA, 960 bp, Vitis vinifera
ggatttcactgcacgatccgggttgggctcaacccgcccaacgtacaaataaacgtgggttgtgcgcaatacgcccaccgtgcatcttacaagattagggttttggttgctctataaataagcagcttcttctcggagttgagatcctgaatcttctgcatcggctgcggtcttctgtgcctagtgcttccacgaaacgttgcgtttcactgagagcagaagatgggtcattctaacgtctggaactcgcatcccaagagctacggtcccggctctcgcacctgtcgtgtgtgcgggaaccctcatgggctgatccggaagtatgggctcatgtgttgcagacaatgcttccgcagcaatgccaaggaaattggttttattaagtaccgctgaatgctttttggtatctcttccacaacagaggaggattttgtcaaagtagaatgctgatcgtattgtctttagttgaaggaacaatgtgacgtttctttcatgtttttagttaaaccatcattgaaaacttttgaattaattgtttggatcagtgattacttgtcatcacttgttttgttaggtaaaacttcacttcattattatgaagcgttttttctcctttttctctcttccctctcgcaagttgccaaacacaaatttgtttgctggggatggatttacatgatcttaattatggtaatgggaatgagatatcacataaaggaaattgctttcctgtaattttgggagcttccccaactttgtttataacttagcggctcaatttgggacctagaggagtgtgaaactatttccttagaggaggaggatgttgtgttaaattttcaaatgtttatttgagttggatttgtgtttttaagttatttttattgtcctttttgaacagccaaacatggcattagtctatatttatgaacctttgatccaaacatgacagtttagaaa

SEQ ID NO: 620 - DNA, 427 bp, Carpinus betulus
ctgtgatttcttgtgtttcggattaacctcttgcgcagctcagctctctgcgatctagcgaaagcagcgaagaaatcatggggcattcgaacgtgtggaattctcaccctaagacctacgggcctggctcccgcacctgtcgtgtgtgcgggaatccccatgggctgattcggaagtatggcctcatgtgttgcagacaatgcttccgtagcaacgccaaggaaattggcttcatcaagtaccgctaaaggttgtaatcatctgtgccacaaagcacttttttcggctccagttgccgccactatgttctttgtgatgccaacgaaagtagttgttttaagtttcaaggaactttttgattttccgttgtagtttatctaatgttaaacttgagttgattgtgggtttatgaactatttttgctatt

SEQ ID NO: 621 - DNA, 461 bp, Carpinus betulus
atatagagctgtgatttcttgggttttggattgacctcttgcgcagctcagctctctgcgatctcgcgaaagcagcgaagaaatcatggggcattcgaacgtgtggaattctcaccctaagacctacgggcctggctcccgcacctgtcgtgtgtgcgggaatccccacgggctgattcggaagtatggcctcatgtgttgcagacaatgcttccgtagcaacgccaaggaaattggcttcatcaagtaccgctaaaggttgtaatcatctgtgccacaaagctactttttcggctccagttgccgccactatgttctttgtgatgccaacgaaagtagttgttttaagtttcaaggtacttttgattttccgttgtagtttatctaatgttaaacttgagttgattgtggtttatgaactatttttgctattgctattattgaagtctatattaaaactc

SEQ ID NO: 622 - DNA, 433 bp, Carpinus betulus
ctgtgatttcttgtgtttcggattaacctcttgcgcagctcagctctctgcgatctagcgaaagcagcgaagaaatcatggggcattcgaacgtgtggaattctcaccctaagacctacgggcctggctcccgcacctgtcgtgtgtgcgggaatccccatgggctgattcggaagtatggcctcatgtgttgcagacaatgcttccgtagcaacgccaaggaaattggcttcatcaagtaccgctaaaggttgtaatcatctgtgccacaaagctactttttcggctccagttgccgccactatgttctttgtgatgaccaacgaagtagttgttttaagttcaaggtaacttttgattttccgttgtagtttatcttaacgttaaacttgtagttgtattgtggtttatgtaactattttgctattgctat

SEQ ID NO: 623 - DNA, 434 bp, Carpinus betulus
tgggttttggatcgacctcttgcgcagctcagctcagctctctgcgatcaagcgaaagcagcgaagaaatcatggggcattcgaacgtgtggaattctcaccctaagacctacgggcctggctcccgcacctgtcgtgtgtgcgggaatccccacgggctgattcggaagtatggcctcatgtgttgcaggcaatgcttccgtagcaacgccaaggaaattggcttcatcaagtaccgctaaaggttgtaatcatctgtgccacaaagctacttttttcggctccagttgccgccactatgttctttgtgatgccaacgaaagtagttgttttaagtttcaaggaactgttgattttccgttgtagtttatctaatgttaaacttgagttgattgtgggtttatgaacattttgcattgcattattgaagctaa

SEQ ID NO: 624 - DNA, 432 bp, Carpinus betulus
ctgtgatttcttgtgtttcggattaacctcttgcgcagctcagctctctgcgatctagcgaaagcagcgaagaaatcatggggcattcgaacgtgtggaattctcaccctaagacttacgggcctggctcccgcacctgtcgtgtgtgcgggaatccccatgggttgattcggaagtatggcctcatgtgttgcagacaatgcttccgtagcaacgccaaggaaattggcttcatcaagtaccgctaaaggttgtaatcatctgtgccacaaagcacttttttcggctccagttgccgccactatgttctttgtgataccaacgaaagtagttgttttaagttcaaggtacttttgattttccgttgtagtttatctaatgttaaacttgagttgattgtgggtttatgtaactattttttgctattgctat

SEQ ID NO: 625 - DNA, 502 bp, Lolium multiflorum
agcccaggaagtgaggcctgtctgcctatagaagaagccggcggcctcgcgacccgcctcctcatttcagccaggcgagagaaaggtagggtttacagagtcaggacctccgccgccgccgccgccgccgccgccgccgccgccatgggacacgaaaacgtctggaactcgcaccccaagaactacggccccggatccagggtttgccgtgtctgcggcaactcgcatggcctgatccggaagtacgggctgatgtgctgcaggcagtgcttccgcagcaacgccaaggaaatcggcttcatcaagtaccgttaagactggaaacctcaaaggaagcatggagtaggaagccatcatcaaagtgtgttgtttcatcgaggacaatctttattaattatcatgtaatggactaaatgtttgaatcggagtaacaaacctttacaccgtgttggtgactgctgcttgagcatgcaaaacagataattgtgttgctattgtgtct

SEQ ID NO: 626 - DNA, 581 bp, Lupinus angustifolius
tgggggaagaaaccctaattaaggtagtatataaatctgtgttgcactcaagtgcatagtctcctccatattattcttcaaccactgcgctttaagagctagactttgtgtgtttcatttcgatctcattctaaagcaatgggtcactccaatgtttggaactctcaccccaagaattatggtcctggatctcgcacttgccgtgtgtgcgggaatccacatggcttgattaggaagtatggcctcaattgttgcaggcagtgcttccgtagcaatgccaaggaaattggcttcatcaagtatcgttaaagagttagcagccgcctgtcctggaattggtcttggaattaggatgggtataggatcttatgtttgaagaaatattgattatgtgatcttacccaacaatgagaaatctgcaattctgcatggcatgaaagtggaacttacatattttatgaagtccaaggtagtagtacatttcttcatgcaagggaaactactaattttgcattgtcctgcaaaattcatttgattttaggagcgtgtttagattggctgtatggttctgttggaacatc

SEQ ID NO: 627 - DNA, 285 bp, Lupinus angustifolius
cgcagagtacatgatattattgtgttttttgtgtgtgttttcatccaaagcaatgggtcactccaacgtttggaactctcaccccaagaattatggtcctggttctcgcacatgccgtgtatgcgggaatccgcatggtttgatcaggaagtatggcctcaattgttgcaggcagtgcttccgtagcaatgccaaggaaattggcttcattaagtatcgttaaagagtgatgggcatatgaccagcccttctggaattaggattatactaggatcttgtttgaag

SEQ ID NO: 628 - DNA, 402 bp, Lippia dulcis
tcctcatcctcatccgcgacttttagggcttttctgcgtagattcatttgccgttgttggtttgattcgtaaagaggacaatggggcactccaacgtttggaactctcatcctaagaactacggtccgggatcccgcacctgccgtgtgtgtggcaacccccacgggataatcagaaagtatggtctgatgtgctgcagacagtgctttcgcagcaatgctaaggaaattggatttatcaagtaccgctgataaatatgtgccaccatgatataccttcttctgccatggtgggaggcttttggatattcgatattcctagtcgttttaactcactgttttaatcatcatttaccattttccataaaatgtttgtagtgacaattattaatatacgaaggat

SEQ ID NO: 629 - DNA, 571 bp, Cajanus cajan
acagaaaccaaacactccctagggttttgactctactatatatgttcggatttgagtgcttgtctttcatgtttcttctgtaactgcgaggctagggtttcgagtttcttgtgtaaaaatctttgcaaatcagaagcatggggcactccaatgtgtggaacgctcatcccaagaactatggacctggttcccgcgcctgtcgcgtgtgtgggaaccctcatggattgatcaggaagtacgggcttatgtgctgcaggcagtgcttccgtagcaatgccaaagaaattggcttcattaagtatcgctaaatgaatactgtcctccttgcccacccagtttggattcaggctttaggctgatgatgtggggatatgcttttattgtttcaagaattttagaatttttgtggcatttagctaaattaatcatcaaactcaagttgtggaactaaaaatgtttttacattttatataattattttgagctatctacatgcttctttgtgagccatttattcttattgaatgattacatccttgtgtctgatctcattttgaccttgatggtaaaa

SEQ ID NO: 630 - DNA, 571 bp, Populus trichocarpa
cgagctcaaaagcgctctgcgaattccatgctttcaagttttctctagtggctcgtaagctttagcgatcagtagcagaaaggatgggtcactctaatgtctggaactctcaccccaagaactacggccctggttctcgcacctgccgcgtgtgtgggaatccccatggtattatcaggaagtatgggctaatgtgctgcagacagtgcttccgtagcaatgctaaggagattggattcatcaagtaccgctgaggaagagctggtagctcgtgacccactagacgagcagaagatagctcgcttttgttttatgcagtacaagatacctcgtgtcccactagactagtaggagatagctcccgtaccactagaccagcaaatgtgttttgcgcaagtatgattgattataatttttatgtttgaattaactattaagacaatgttttggttagttgatttgctgtggaacttggattgatgttggaaatggaatattttcaaataatctcctatagcattatcggtctccttttcataattgatttgttcttatccaagcgttccttttg

SEQ ID NO: 631 - DNA, 510 bp, Populus trichocarpa
ctttccttcacaaattcaaaaatcctctgcaaactccagctctccctagcggcttcaagatttcgttcaccataacgatcggtagtagaaaggatgggtcactctaatgtctggaactctcaccccaagaactacggccctggttctcgcacttgccgtgtgtgtggaaatccccatggtattatcaggaagtacgggcttatgtgctgcagacagtgcttccgtagcaatgccaaggaaattggattcatcaagtaccgctgaagaagatggtgtcttccacagaagcagatgggtctggaacaagtatgatcttgttagaatttttatgtttgaagtgaactcttaagacaatgttttgcttagttgatgtattactgaaattggattgatgttgcgaatggaatgttttcgaattacttgataacattttggaattgtctcctgggttatacttgtctctcttaaacttgtcttgcatcatattccaaacctactactttttttcaa

SEQ ID NO: 632 - DNA, 633 bp, Prunus mume
cagtcataggattagggtttagaactccatcgtcttcttgcagctgcagaggcaacgcagtaagttgaaggcggccttccaagacgaccgagcaagaatcaaaatgggccattccaacgtttggaactctcatccgaagaactacgggcctggttcccgtacgtgccgggtatgtggaaaccctcatgggttgatccggaagtacgccttgatgtgctgcaggcagtgcttccgcagcaacgccaaggaaatcggcttcatcaagtaccgctgaaagttgaaagcatctgattttgcatcggccatgaagatgtcagaaatatggagctggagagctttttctttgttgctgttacttttcctcttttcttatttaagatgataatgtagcatatcttaagctcgacaattagttgttgactgggccgttttgttgggtctaaattttatttccagttggtatctgtctctttggtttcaactttcaattgatgtgcgcattggttgttgatgcttcaatgattttgattgggttcataataaattttagactattcacttatcgtttgatgcaagaacagtaacaaatgttagttgttgtcgcatttgagcccgtactttgttggcgaagaa

SEQ ID NO: 633 - DNA, 464 bp, Rosa hybrid cultivar
cagtgtctccttgcggctgctgtgagttgaaggcggctttctcagagattcaaggatgggacactcgaacgtctggaactcgcatcccaagtcttacggccctggttctcgcacttgccgagtgtgtgggaaccctcatgggttgatcaggaagtacggactgatgtgctgcaggcagtgcttccgtagcaatgcaaaggaaattggcttcatcaagtaccgttaaatggtgagggcatctgatctactgctacattggccatgaagttgttcgagatatggagtttggagcgattacatttacttagtttctttttcaagaccataatgtagtatatctgaatttttgcaattagttcttgactgggccaatgttaacattttgatatcaagctttttggtttatttgccaaatccatctttgattaaatggtattctcatatttgaaccgtgcggcaaaaaa

SEQ ID NO: 634 - DNA, 370 bp, Secale cereale
atgggacactcgaacgtctggaactcgcacccaacgaactacggccccggatccagggtttgccgtgtctgcggcaactcgcatggcctgatccgcaagtaacgggctgatgtgctgcaggcagtgcttccgcagcaacgccaaggacattggcttcatcaagtaccgttaagaatggaaacctcaaaggaagcaaggactaggaaattaatcatcgtcgaactgtggtgcttcatcgaggccgatctttatcctataaactatgtaatgaactactattaatgtttgaatcgtagtgaaaaaaccgtagaaaccaatgttggtgacttctgtttgagcatgtgaaacccataattctgttactgttgtg

SEQ ID NO: 635 - DNA, 510 bp, Sarracenia psittacina
tgagccgtctgcggctgaatttttcgattgagagaggaaacgatgggtcactcgaacgtgtggaactctcatcccaagagctatggtcctggttctcgcacttgtcgtgtgtgtggaaatcctcatggcttgatccgtaagtatgggcttatgtgctgcagacagtgcttccgcagcaatgccaaagaaattggctttattaagtatcgctgaaggattttgccagccagttctatgggaggagaggatttcgctggagtataatgccgaattgttttctaagatttgtgtaatattatggccatcctagtatgttatctcttatgctaaaatctttattgattggtggataaagaatttactggcaccacttgttttagatgcagttttagctttcacttcactgtttgaagactgatttggtgggtgggtttcttgaacaattccagaaagttttccattaagtagtcatggtttattgttggttttgaatggagaagaatttccaga

SEQ ID NO: 636 - DNA, 649 bp, Sarracenia psittacina
cgtctgcggctgattttttcgattgagagaggaaacgatgggtcactcgaacgtgtggaactctcatcccaagagctatggtcctggttctcgcacttgtcgtgtgtgtgggaatcctcatggcttgatccgtaagtatgggcttatgtgctgcagacagtgcttccgcagcaatgccaaagaaattggctttattaagtatcgctgaaggattttgccagccagttctatgggaggagaggatttcactggagtataatgccgaattgttttctaagatttgagtaatattatggccatcctagtatgttatctcttatgctaaaatctttattgattggtggataagaatttactggcaccacttgttttagatgcagttttagctttcacttcactgtttgaagactgatttggtgggtgggtttcttgaacaattccagaaagttttccattaagtagtcatggtttattgttggttttgaatggagaagaatttccagcactgctggtcttatttaaaaaaaaaacacataataagaataacaataagtggagtgaaatcgagaccctactgttaaagaaccaaataaaaataaaaaaaaaaaaactaagattgtagaactaccttgcggttcgtataaccaac

SEQ ID NO: 637 - DNA, 729 bp, Sesamum indicum
gttgaccacaagacatatctgaaaagacatgaatacccttaatcgcctcttgtaatctcaaaatcagcattagggttttgcagctgctacatatatattcacttcgcgctgctactatccaaaaccttcagaagtatctgggattagggctttcacttatattcatcggcgaacttggttgagttgaaagaggaagatggggcactccaacatctggaattctcaccctaaaaactacggccctggatctcgcacctgccgtgtctgtgggaacccccatggattgattagaaaatatggtctgatgtgctgcagacagtgcttccgcagcaacgcaaaagagattggctttattaagtatcgctaagctgtggatgacagtactattacaaccttgaagaggattgttttggtttttccgatgtcggatacctagaagatgatagttcacatttccattcatcttgcacatcttttcttagaaacagatgtaatgagaatgattcttccaatctatgattgaactcttatttggtttctgaaccaacaagttagttacataatcttgtttcggtagaaactcatctcttattattgcattgtagtctttctctatggactttagttgtggtttgcagtttcactattgctgaatatatgctccttgttagtgttttaattttgatattttgttggaggtttgtgtttgtaagagatacagatggggca

SEQ ID NO: 638 - DNA, 538 bp, Sesamum indicum
ctcagcccaattcaccgactcttcaaagtcaagattagggttttggccctggggcccgcttacatatatataaatacacactcaacaacctttttgcagaccctcccacttcatctgctgatacagctctcacacgaattcgtcggcggcttttggttgacgcggaaagaggaagaatgggccactccaacatctggaactctcaccctaagaactacggccccggatcccgcacctgccgtgtgtgcgggaacccccatgggttgatcagaaagtatgggcttatgtgctgcagacaatgcttccgcagcaatgccaaggaaattggcttcatcaagtatcgctgaactgacactgctggtattgccagagctcactggaggaactttttccttttgtgggatgcttttgatgccttttctcagaaatttgtgtaatgagaatgtttacttaatctatgactcaacttgaattgattttgtgaaccaacagattatatttttcttacagtctcaatttttgtcgttccatttagcac

SEQ ID NO: 639 - DNA, 814 bp, Sesamum indicum
atgggtcactccaacatctggaactcgcatcccaagaattatggccctggttcacgcacctgccgcgtgtgtggaaacccgcatgggttgatccggaaatatggtctgatgtgttgccggcagtgcttccgtagtaacgctaaggaaattgggttcattaagtaccgctgatgatacatggacggcaaagggctcaaagtgaagttcttgtgacgtcgcaagacaaattagagaatttgttggttttaagatgaacgccttctcttcaaattttgtttttgagtttcgtttctctttagacaaatagattatgttgctataaatgttactgcattgaaagtacttgaatatcaatttcgttcctttttgcatggatgtgggatacaaactcctttctctgcgtgctttcttctccttatcaggcagtttaagtcatggaatatgaaatatctcatactatccttgccattctaaatgcaaacttggaggagaatcagctcgaaagttgtgtgtggttaatatcagcagagtagctgaattattagaagctaatttacttttgtaagaagaatccatcctggcaatatggatttggaagctgaaacatgatgtgatgagctcttgaatgctattacactctaaaaacatttatgtatgtgcacatatgttattaaattcatatactttgtgtatttacatgaatatttagataatacaatgtatctcctagcactatggccatgattacttataaatacccctgggccctaaacttgatgataacatttacccacttgaaaccaacgatcggagg

SEQ ID NO: 640 - DNA, 720 bp, Fragaria vesca
ccgacccgtccgtcttatgagacctctagggttttgaccctcccctcattataaatagcatcttctaaccagtccgctccacctctacagattttggcgactgctagctagggcttcttcttctctctcgcaatcatggggcactccaacgtctggaactctcaccctaagagctacggccctggatcccgcacctgccgcgtgtgtggaaacccccacggtctgatccgcaagtacgggctcatgtgctgcaggcagtgcttccgcagcaacgccaaggagattggattcatcaagtaccgttaagagcttgagcttgttgatcttggatggactagtatgccgtagcaatgcttctgtcgtttcagtgtagtggcttttgcgctttgatgaactcttgagaagatgtttttgtttaatctacttttgaactgtcaagtcaattgttgaactgtgattgttatggaattaatgacttaaacttactcttctctttgcgtctattctattattcttttgttttctatatcatttcgcacataaccttgtttcaccaattcagtaatccttttgaaactgaaaggcacttgagcatttgtgttgtgcgttatattttccatgcttattctgtatgcgttagtttcttctgtagcatttgtgatgctttttggggaaatccagacataatattataggtgacttttacaccatgtttattgt

SEQ ID NO: 641 - DNA, 761 bp, Fragaria vesca
tagggttttggattttcagtatctccttgcggctgctgtgaagttgaaggcgcctttctcagagatcgaaacatgggtcactccaacgtctggaactcgcatcccaagtcttacggccctggctctcgcacttgccgagtgtgtgggaatcctcatgggttgatcaggaagtatggactgatgtgctgcaggcagtgcttccgcagcaacgcaaaggaaattggcttcatcaagtaccgttaaatggtgagggcatctgatctactgctacattggccatgaagttctttgggatatggagtttggagcgaatacttttacttagtttcttttcaagaccataatgtagtatatctaaatttttgcaattagttcttgactgggccaatgttaacattttgatgtggaacttttttgtttatttgccaaaactatctttgattaaattgcatcttccatatcttttgaaaattgagtggtgtactcgtatttgaaccaccatgctgcaatacttttatagcctagccgggtacaagaagactctgtgttttagtacttgagaggattggtagataacttggactaatccttggctggaagatttcattagtaagcatagtaatcctatgcttgatgtgtgttctgctcttgaatgcctcgttgcttttaaatattgttggtccatagtttggcagtgccacaacgatgaaattcttgttttcgcatttcacagccttcatatcctcgattctgaaggcaca

SEQ ID NO: 642 - DNA, 413 bp, Triticum aestivum
atgggacactcgaacgtctggaactcgcaccccaagaactacggccccggatcgagggtttgccgtgtctgcggcaactcgcatggcctgatccgcaagtacgggctgatgtgctgcaggcagtgcttccgcagcaacgccaaggacattggcttcatcaaggtatgcgacgccacactgtccatggatttcctaaatttgatggccgccgagtaatactataccgttaagaatggaaacctcaaaggaagcaaggactaggaaattatcaacgaactgtggtgtttcatcgaggctgatctttatcctataagctatgtaatgaactgctattatgtttgaatcctggtgacaaaccgtgaaacaaagttagtgactgctgtttgagcatgtgaaaccgataattctgttac

SEQ ID NO: 643 - DNA, 464 bp, Persea americana
gggggggtggctgcgcgagagtgagatttctgcaaaagagttttgagaggcaacggaagagtgcagaagatggggcattcgaatgtgtggaattctcacccaaagaactacggccctggatctcgtgcttgccgagtctgcggcaactcacatgggctgatcaggaagtatgggcttatgtgctgcaggcagtgcttccatagcaatgccaaggcaattggcttcattaagtaccgttgacgagtcaagtgctcgaccaagttcattcaatggagggtgatgagcgggtcaattttccgttttaactgcgacgttttgtttattaggatgaaatacttgtattactgttctggatgttttatctttttttcaatggtagcatgacttgaacctgctgctttgtggttgcaatgctgaacaccttccaactgtgctagccctagggcttttatcaactatctgga

SEQ ID NO: 644 - DNA, 650 bp, Quercus alba
atgggggcctagccacccattaaagcaacgaccacgaccagcttgacatctaaaaagcctagggtttcggttcctaattcatctctttgcaaagcgagttaaaaaggtcccaaagcggcgcactgagagtttagagcttctcggagaaaaaaaaaaaatggggcattcaaatgtgtggagctcgcatcctaaaagctacggtcctggttctcgtacttgccgagtttgtggtaaccctcatgggttgatccggaagtatggactgatgtgctgcaggcagtgcttccgtagcaatgccaaggagattggttttatcaagtaccgttaaagggcgggaggatctaatctacattgacaatgttttcgtccaaagaatatggtggctgcttggcttgctgagttcccccatttttaattttgttttcatgcttgaactagaagttgtgattttccttttaatttttgttcatgacgaaggctatgtaatggtgacgttgttggacctcttatttttctactttgcattatagtttttatatacatatgaatgagccatagcaatgacaactcatatctgcgacaaggccaataccattgtccggcaaaatgtaccgtagtctgatgcaaatagatgttctttacctgtttgt

SEQ ID NO: 645 - DNA, 510 bp, Carica papaya
tttcatcgtccagtttgaagctgctcttgacggcgtagtttgctaattgctagggttctctcgagaggacagaagcttcgacaatgggtcactcaaatgtgtggaactcgcatcctaagacctatggccctggctctcgtgcctgccgtgtatgtggaaattctcatgggttgattaggaagtatgggctaatgtgttgccgccagtgcttccgctcgaatgccaaggaaatcggcttcatcaagtaccgctgaaggattcaggatattgagtacagtttggtggagtcttctacaatgatctcgataaattttcatggtccaagaccatttgttcttaggttgtaaggattttaatttttggtgcgatactggagcagacctaaacttatattgtagtactttcgcagtatgcattctagtttatattgcttaatgctgtagcctgctaatcttaaaggcaagatatgtggagtgtgattgtttatggttgatggatagagttttgagc

SEQ ID NO: 646 - DNA, 314 bp, Salvia sclarea
tatcatcggcgcctcttctccacaactctagattttcagagagaagagagaagagatgggtcactctaacatatggaactcgcatcccaagaactacggccctggctcacgcacttgccgggtttgcggaaacccgcatggaattattcgcaagtatggtctcatgtgttgcaggcagtgcttccgcagcaacgccaaggagattggcttcatcaagtaccgttgatggtgcatggatgttgagggcttgaagcaaaattggaggttttaggaacttgtttgtttaagataagcatggattcttcaatttttgg

SEQ ID NO: 647 - DNA, 387 bp, Salvia sclarea
ctactagaccttggctgtcactcaggaaaagcgaagagaagaagatggggcactccaacatttggaactctcaccctaagaactacggccctggatcccgcacttgccgtgtgtgtgggaatcctcatggaatcataagaaagtatgggcttatgtgctgcagacagtgcttccgcagcaatgccaaggaaattggcttcatcaagtatcgttaaaattgatggaggcatcgccacaacttaggaatgaacctagtctttgctgggttttttgaaatgttaaacatagccaatcatctgtttctatcatttctcagaaatgtgtaatgacagtgattatccaatctgtgactgaatttggattatttgtgaaccattggattatatt

SEQ ID NO: 648 - DNA, 354 bp, Salvia sclarea
ctactagaccttggctgtcactcagagggttttattatcatcggcgcctcatctccaaaactccagatttccacacagagagaagacagcgagatgggtcactctaacatctggaactcgcaccccaagaactacggccctggctcacgcacttgccgggtttgtggaaacccgcatggaattattcgcaagtatggtctcatgtgctgcaggcaatgcttccgcagcaacgccaaggagattggcttcatcaagtaccgttaatgatgcatatggatgttgagagcttgaagctaagcttgaggatttaggaacttatttgtttaagataaacatggattgttcaaattttgg

SEQ ID NO: 649 - DNA, 411 bp, Camellia sinensis
atcgtctccgaatctagctagtgttttgaagaacaacactacacagctctgagagaagatgggtcactcgaacatctggaactcgcatcccaagacctatggccctggatcgcgtacttgccgcgtctgcgggaaccctcatgggttgatcaggaagtatggtctcatgtgttgcaggcagtgcttccgcagcaacgccaaggaaatcggtttcatcaagtatcgctaagtggttgaagtgaagcacaaatggagctgcactggagaacttttttcatatcataagattttgttatttccactgcctagtatctggaccttatcttttgttgaatgttatggattctacgacgttgtttgggtattttagtactatttgatggctgtggttacttatcccgacactagtta

SEQ ID NO: 650 - DNA, 182 bp, Aquilegia formosa
atgggacattcgaatgtgtggaactctcaccctaagacttacggacctggatctcgcacttgccgtgtttgtggcaacccacatgggcttatcagaaagtatggcctgatgtgctgcagacagtgcttccgcagcaatgccaaggaaattggcttcatcaaggttagatttacattccactt

SEQ ID NO: 651 - DNA, 397 bp, Ocimum basilicum
ttttctaactcattgatcggcggcttttgttggcggacaaaaatatgggtcattccaacatctggaactctcaccctaagaattacggtcctggatcccgcacctgtcgtgtgtgtgggaatccccatggtataatcagaaaatacggactaatgtgctgccggcagtgcttccgcagcaatgcaaaggaaattggcttcatcaagtatcgttaaacttgctgagggcatcaccacaacttatggatgcttttgaacttttagacatgtccaattacctgttttttattcctgagaaatgtgtaatgacattgatccaatttgtgactcaacccggatttatttgtgaaccatctctcttttcataatgttgaacatcgcctcttcttactctctcc

SEQ ID NO: 652 - DNA, 399 bp, Ocimum basilicum
gagagagagagactgctgttgaagatgggacattctaacatatggaactcgcatccgaagaactacggccccggctcacgtacttgccgggtttgcgggaacccgcatgggattattcggaagtatggtctgatgtgctgcaggcaatgcttccgcagcaacgccaaggagattggcttcatcaagtaccgttgatgatgcatggattttgaaggctcgaagttcacttcttgtcaaagctggaggaattggatcatttttattttaatattagccatggattattaaaattttggttttctagttgataattctgtgtacctgcaatataactttttaagttttgagattaattttatggatgatctttacttttaaattctccgcttgtttgtggaa

SEQ ID NO: 653 - DNA, 544 bp, Vaccinium corymbosum
agattcgcgaattagggttttactacagcgcctcacaaggactactagtactatttcagattccctctgtgtcatttcggttgatcgtctcctccaaaactagggattttgagcagagagagaaagagaagatgggtcactccaacatctggaacgcgcatcccaagaactacggccctggatcgcgtacctgccgggtctgtggaaaccctcatgggttgatcagaaagtatggtctcatgtgttgccggcaatgcttccgcagcaacgcaaaggagattggcttcatcaagtaccgctaaatgggtgatgacaagcacaaaatggagctgcattggacaacattttttccttctgcaaggatgtattctaagaatcagtctttagaactgctctttcttcttttttgttggtgcaagaactgatctttcttcccccaggacttttgtcgaaatgttatggattgtatgttgtgttggcatggcctcagttaactcctcttggcattagttgaatatcagattggtgttacggtgtttgattt

SEQ ID NO: 654 - DNA, 628 bp, Vaccinium corymbosum
ctccgactctctctgtggccgtctctgtcgaacattacagcagggaagtaagagagagaggatgggtcactcgaacatctggaacgcacatcccaagaactacggccctggatctcgtacttgccgggtctgtgggaatcctcacgggttgatcaggaagtatggcctcatgtgttgcaggcaatgcttcaggagcaatgccaaggaaattggtttcatcaagtaccgctaatgggtgaagccaaacacaatggagctgcataggagatctcctttaatgctgcataggagatctcctttaatgagaggacttgtgataaccagtctctagaaatattctagttttcagacaattttgttgaatgtaatagattctacttgttatttggataacgtacttcagtgctttctatttgcatgatgttgaacttatattgaagttcgatttcaaatgtttggtctatggtagtactgcaatttgcaatgatactgtcaattccccaggaggctggaacacattatcgtttatgttctgcctgttggttagtgaggtggtttgccctggatctcgtgggggagcaacggtagggatggacttaaaattatacttacagacaactttattcgg

SEQ ID NO: 655 - DNA, 469 bp, Vaccinium corymbosum
gcctcacgatctccgactctctctgtggccgtctctgtcgaacattacagcagggaagtaagagagagaggatgggtcactcgaacatctggaacgcacatcccaagaactacggccctggatctcgtacttgccgggtctgtgggaatcctcacgggttgatcaggaagtatggcctcatgtgttgcaggcaatgcttcaggagcaatgccaaggaaattggtttcatcaagtaccgctaatgggtgaagccaaacacaatggagctgcataggagatctcctttaatgctgcataggagatctcctttaatgagaggacttgtgataaccagtctctagaaatattctagttttcagacaattttgttgaatgtaatagattctacttgttatttggataacgtacttcagtgcttctatttgcatggtgttgaacttatattgaagttcgatttcaaatgtttggt

SEQ ID NO: 656 - DNA, 417 bp, Vaccinium corymbosum
tgcctcacgatctccgactctctctgtggccgtctctgtcgaacattacagcagggaagtaagagagagaggatgggtcactcgaacatctggaacgcacatcccaagaactacggccctggatctcgtacttgccgggtctgtgggaatcctcacgggttgatcaggaagtatggcctcatgtgttgcaggcaatgcttcaggagcaatgccaaggaaattggtttcatcaagtaccgctaatgggtgaagccaaaacacaatggagctgcataggagatctcctttaatgctgcataggagatctcctttaatgagaggacttgtgataaccagtctctagaaatattctagttttcagacaattttgttgaatgtaatagattctacttgttatttggataacgtacttcagtg

SEQ ID NO: 657 - DNA, 486 bp, Vaccinium corymbosum
acgctcgacaccaattaacggccggggtcttctttcaatcagagtcttcttcagctgctgcggttgaaagcttcttttcgtttaccgattgattcagaaaaaagaggacaaagatgggtcactcgaacatctggaacgcgcatccaaagaactacggccctggttctcgcacatgtcgcgtgtgtgggaaccctcatggtttgatccgaaagtacgggctgatgtgctgcagacagtgcttccgcagcaatgctaaagaaattggctttattaagtatcgctaaaggatttttgcggattctacaagaaagagggttttgcccaagaatatgcgggggttttgttttgaacggatctaagaacttttctcattgtttttcgtcatgtatctttggctacaaacctttacattacaattaatgtttctcgtctcagtttaatgttgaatttgaattgattgctggaccaagaattcttgtataagga

SEQ ID NO: 658 - DNA, 527 bp, Vaccinium corymbosum
actagtactatttcagattccctctgtgtcatttcggttgatcgtctcctccaaaactagggattttgagcagagagagaaagagaagatgggtcactccaacatctggaacgcgcatcccaagaactacggccctggatcgcgtacctgccgggtctgcggaaaccctcatgggttgatcagaaagtatggtctcatgtgttgcaggcaatgcttccgcagcaacgcaaaggagattggcttcatcaagtaccgctaaatgggtgatgacaagcacagaatggagctgcattggacaacattttttccttctacaaggatgtattctaagaatcagtctttagaactgctctttcttcttttttgttggtgcaagaactgctctttcttcccccaggacttttgtcgaaatgttacggatagtatgttgtgttggcatggcctcagttaactccttcttagggctaatttagttagaattatcagtattggtgttatgggcaaaagaacagaacaaaagaacaaaa

SEQ ID NO: 659 - DNA, 642 bp, Vaccinium corymbosum
acgatctccgactctctctgtggccgtctctgtcgaacattacagcagggaagtaagagagggaggatgggtcactcgaacatctggaacgcacatcccaagaactacggccctggatctcgtacttgccgggtctgtgggaatcctcacgggttgatcaggaagtatggcctcatgtgttgcaggcaatgcttcaggagcaatgccaaggaaattggtttcatcaagtaccgctaatcggtgaagccaaacacaatggagctgcataggagatctcctttagtgctgcataggagatctcctttaatgagaggacttgtgataaccagtctctagaaatattctagttttcagacaattttgttgaatgtaatagattcttcttgttatttggataacgtacttcagtgcttctatttgcatggtgttgaacttatattgaagttcgatttcaaatgtttggtctatggtagtaccttctctatgttgcaatttgcaaagacactgtcaattccccaggaggctggaacacattatcgtttatgttctgcctgttgggtagtgaggtggtttgccctggatctcgtgggggagcaacggtagggacgagacttaaaaatatacttacagacaactttattc

SEQ ID NO: 660 - DNA, 457 bp, Vaccinium corymbosum
aatcagagtcttcttcagctgctgcggttgaaagcttcttttcgtttaccgattgattcagaaaaaagaggacaaagatgggtcactcgaacatctggaacgcgcatccaaagaactacggccctggttctcgcacatgtcgcgtgtgtgggaaccctcatggtttgatccgaaagtacgggctgatgtgctgcagacagtgcttccgcagcaatgctaaagaaattggctttattaagtatcgctaaaggatttttgcggattctacaagaaagagggttttgcccaagaatatgcggggggttttgttttgaacggatctaagaacttttctcattgtttttcgtcatgtatctttggctacaaaccttacattacaattaatgtttctcgtctcagtttaatgttgaatttgaattgattgctggaccaagaattcttgtataaggaatttgct

SEQ ID NO: 661 - DNA, 588 bp, Vaccinium corymbosum
gaagcgtgcctcacgatctccgactctctctgtggccgtctctgtcgaacattacagcagggaagtaagagagagaggatgggtcactcgaacatctggaacgcacatcccaagaactacggccctggatctcgtacttgccgggtctgtgggaatcctcacgggttgatcaggaagtatggcctcatgtgttgcaggcaatgcttcaggagcaatgccaaggaaattggtttcatcaagtaccgctaatgggtgaagccaaacacaatggagctgcataggagatctcctttaatgctgcataggagatctcctttaatgagaggacttgtgataaccagtctctagaaatattctagttttcagacaattttgttgaatgtaatagattctacttgttatttggataacgtacttcagtgctttctatttgcatgatgttgaacttatattgaagttcgatttcaaatgtttggtctatggtagtagtactttctctatgttgcaatttgcaaagatactgttctaatttccccctaggtaggtcttggtaactactatttattcgttttaaaaaactcgcgatat

SEQ ID NO: 662 - DNA, 447 bp, Vaccinium corymbosum
cctcacgatctccgactctctctgtggccgtctctgtcgaacattacagcagggaagtaagagagagaggatgggtcactcgaacatctggaacgcacatcccaagaactacggccctggatctcgtacttgccgggtctgtgggaatcctcacgggttgatcaggaagtatggcctcatgtgttgcaggcaatgcttcaggagcaacgccaaggaaattggtttcatcaagtaccgctaatgggtgaagccaaaacacaatggagctgcataggagatctcctttaatgagaggacttgcgataaccagtctctagaaatattctagttttcagacaattttgttgaatgtaatagattctacttgttatttggataacgtacttcagtgcttctatttgcatggtgttgaacttatattgaagttcggattcaaatgtttggtct

SEQ ID NO: 663 - DNA, 598 bp, Vaccinium corymbosum
ccttactccctgtgtgtcctttggcagttcctcaaggaagcaggttggttattaccaaccgcaaggaggtcggcctattaccggaaccgggaagcaggttggttatacaacgcagagtgctattacggcggggtctctttcaatcagagtcttcttcagctgctgcggttgaaagcttcttttcgtttaccgattgattcagaaaaagaggacaaagatgggtcactcgaacatctggaacgcgcatccaaagaactacggccctggttctcgcacatgtcgcgtgtgtgggaaccctcatggtttgatccgaaagtacgggctgatgtgctgcagacagtgcttccgcagcaatgctaaagaaattggctttattaagtatcgctaaaggatttttgcggattctacaagaaagagggttttgcccaagaatatgcggggggttttgttttgaacggatctaagaacttttctcattgtttttcgtcatgtatctttggctacaaacctttacattacaattaatgtttctcgtctcagtttaatgttgaatttgaattgattgctggaccaagaattcttgtataaggaatttgct

SEQ ID NO: 664 - DNA, 455 bp, Vaccinium corymbosum
cacgatctccgactctctctgtggccgtctctgtcgaacattacagcagggaagtaagagagagaggatgggtcactcgaacatctggaacgcacatcccaagaactacggccctggatctcgtacttgccgggtctgtgggaatcctcacgggttgatcaggaagtatggcctcatgtgttgcaggcaatgcttcaggagcaacgccaaggaaattggtttcatcaagtaccgctaatgggtgaagccaaacacaatggagctgcataggagatctcctttaatgagaggacttgcgataaccagtctctagaaatattctagttttcagacaattttgttgaatgtaatagattctacttgttatttggataacgtacttcagtgcttctatttgcatggtgttgaacttatattgaagttcggattcaaatgtttggtctatggtagtactt

SEQ ID NO: 665 - DNA, 449 bp, Vaccinium corymbosum
tcacgatctccgactctctctgtggccgtctctgtcgaacattacagcaggaagtaagagagagaggatgggtcactcgaacatctggaacgcacatcccaagaactacggccctggatctcgtacttgccgggtctgtgggaatcctcacgggttgatcaggaagtatggcctcatgtgttgcaggcaatgcttcaggagcaacgccaaggaaattggtttcatcaagtaccgctaatgggtgaagccaaacacaatggagctgcataggagatctcctttaatgagaggacttgcgataaccagtctctagaaatattctagttttcagacaattttgttgaatgtaatagattctacttgttatttggataacgtacttcagtgcttctatttgcatggtgttgaacttatattgaagttcggattcaaatgtttggtctatggta

SEQ ID NO: 666 - DNA, 498 bp, Vaccinium corymbosum
aatcagagtcttttctagctgctgtggttgaaaacttacttctcgtttatcaattcattcagaaaaaagaggacaaagatgggtcactcgaacatctggaacgcgcatccaaagaactacggccctggttctcgcacatgtcgcgtgtgtgggaaccctcatggtttgatccgaaagtacgggctgatgtgctgcagacagtgcttccgcagcaatgctaaagaaattggctttattaagtatcgctaaaggattttgctgattctgcaagaaaagagggttttgcccaagaatatgcgggggtttgttttgaacggatctaagaacttttctcattgtttttcgtcatgtatctttggctacaaacctttacattacaattaatgtttatcgtctcagtttaatgttgaatttgaattgattgctggaccaagaattcttgtatgaggaatttgctgggttgccatttggttctaatcctctctgttgtgctataat

SEQ ID NO: 667 - DNA, 553 bp, Vaccinium corymbosum
gttgggttccggttgggtcccgttggcagtctagagagcgtagtgtagcacggggggggcagtacggcggaggagtgtagcaggagggggcacgtcggacggggaaagaagcgtgcctcacgatctccgactctctctgtggccgtctctgtcgaacattacagcagggaagtaagagagggaggatgggtcactcgaacatctggaacgcacatcccaagaactacggccctggatctcgtacttgccgggtctgtgggaatcctcacgggttgatcaggaagtatggcctcatgtgttgcaggcaatgcttcaggagcaatgccaaggaaattggtttcatcaagtaccgctaatcggtgaagccaaacacaatggagctgcataggagatctcctttagtgctgcataggagatctcctttaatgagaggacttgtgataaccagtctctagaaatattctagttttcagacaattttgttgaatgtaatagattcttcttgttatttggataacgtacttcagtgcttctatttgcatggtgttgtaac

SEQ ID NO: 668 - DNA, 586 bp, Vaccinium corymbosum
cgtgtctctaaagacaagtaggtaatacaaacgacaagaagtggccaattaacggccgggggaaagaagcgtgcctcacgatctccgactctctctgtggccgtctctgtcgaacattacagcagggaagtaagagagagaggatgggtcactcgaacatctggaacgcacatcccaagaactacggccctggatctcgtacttgccgggtctgtgggaatcctcacgggttgatcaggaagtatggcctcatgtgttgcaggcaatgcttcaggagcaatgccaaggaaattggtttcatcaagtaccgctaatgggtgaagccaaaacacaatggagctgcataggagatctcctttaatgctgcataggagatctcctttaatgagaggacttgtgataaccagtctctagaaatattctagttttcagacaattttgttgaatgtaatagattctacttgttatttggataacgtacttcagtgcttctatttgcatggtgttgaacttatattgaagttcgatttcaaatgtttggtctatggtagtactgcaatttgcaatgatactgtcaacttccccg

SEQ ID NO: 669 - DNA, 571 bp, Vaccinium corymbosum
agggttccacacaccattacttctataaattgcaactttgactgaggcggcacttcttggcgattagggttttcaatcagagtctttttcagctgctgtggttgaaaacttcttctcgtttatcaattcattcagaaaaaagaggacaaagatgggtcactcgaacatctggaacgcgcatccaaagaactacggccctggttctcgcacatgtcgcgtgtgtgggaaccctcatggtttgatccgaaagtacgggctgatgtgctgcagacagtgcttccgcagcaatgctaaagaaattggctttattaagtatcgctaaaggattttgctgattctgcaagaaaagagggtttttgcccaagaatatgcgggggttttgttttgaacggatctaagaacttttctcattgtttttcgtcatgtatctttggctacaaacctttacattacaattaatgtttatcgtctcagtttaatgttgaatttgaattgattgctggaccaagaattcttgtatgaggtattgctgggttgtcctatttggttctaatcctctctgttagtaaag

SEQ ID NO: 670 - DNA, 438 bp, Vaccinium corymbosum
cctcacgatctccgactctctctgtggccgtctctgtcgaacattacagcagggaagtaagagagggaggatgggtcactcgaacatctggaacgcacatcccaagaactacggccctggatctcgtacttgccgggtctgtgggaatcctcacgggttgatcaggaagtatggcctcatgtgttgcaggcaatgcttcaggagcaatgccaaggaaattggtttcatcaagtaccgctaatcggtgaagccaaacacaatggagctgcataggagatctcctttagtgctgcataggagatctcctttaatgagaggacttgtgataaccagtctctagaaatattctagttttcagacaattttgttgaatgtaatagattcttcttgttattttggattaacgtacttcagtgcttctatttgcatggtgttgaa

SEQ ID NO: 671 - DNA, 423 bp, Chelidonium majus
gggatttcttgtattctctctctgtgcagtcggcgaagaaggatttttctctgaggaatcaaacatggggcactcgaatgtgtggaactctcaccccaagaactacggccctggctctcgtgcctgccgtgtgtgtgggaacccccatgcaatcatcaggaagtatggtctcatgtgctgcagacagtgcttccgcagtaacgcaaaggaaatcggattcattaagtaccgttaaatgatgaaaggctgggtttgttttgcgtggagagagatgtagttggcagaccattaaaatggtttagaaaagtttttagacttgatttgaattcagacccaagacattgttattgtttgttttgctttgagatgattttatgatataatgttaccgacttattaagtagacaagaatcatttgtgatg

SEQ ID NO: 672 - DNA, 249 bp, Castanea mollissima
tggggcattcgaacgtttggaactcgcatcctaaaagctacggtcctggttctcgtacttgccgagtctgtggtaaccctcatgggttgatccggaagtatggactgatgtgctgcaggcagtgcttccgtagcaatgccaaggaaattggttttatcaagtaccgttaaaatatgggaggatctaatctacattgacaatgttttcgtccaaagaatatggtggctgcttggcctgctgggttcccct

SEQ ID NO: 673 - DNA, 429 bp, Echinacea purpurea
agtaaaggccgactattttgtgattttacccaaattaatgtagaaacttcgtccgaaattcccccaaaatgcaaagtgtcaattataccctttgagaacaaaacttagggtttcgattatcctcccatataaataccatccaccttcgttcatttgcaaacccttacctgcactcgatctacggcggctttcaggttcactccgatctgctaccaatgggtcactcaaacgtctggaactctcatcctaagacctacgggcctggctcacgcgcttgccgtgtgtgtgggaatcctcatggattgatcaggaagtatggcctgatgtgttgcaggcagtgtttccacagcaatgccaaggaaattggtttcatcaagtatcgttaagtagctgtgatgaaaagaagatgatgatgaattatgatgatga

SEQ ID NO: 674 - DNA, 496 bp, Echinacea purpurea
gggcattccacattctcaccgttgcaaaatctagggtttcagagcttatcgcctccatactccaagaatgggtcactcgaacgtctggaactcgcatcccaaaacttatggccctggttctcgagcttgccgtgtatgcggtaacccgcatgggctgatcaggaagtacgggcttatgtgctgcaggcagtgctttcacagtaatgcgaaggagatcggtttcatcaagtatcgttgacttctctattaacgaaggagatcgagctcttgttggaaaaatcaatatcttgctagcattgttgatgttaaaccggttttcatgttttgagttttgagatattttgttatggtttatgtattacagacttaaagtctttactactatctttgttacttgattatgaactttgaatcgtagcatgttttgacattcggtgatcccaaattttatactgtgttttaattgggttatctaagtcttactcgcacttgtgcc

SEQ ID NO: 675 - DNA, 452 bp, Euonymus alatus
gttcctgcggtccgcagctcccagagtcgaaagaagatcgagcgagcgagctatggggcactccaacgtgtggaactctcatcccaagaactatggccctggatctcgtgcctgtcgtgtgtgtgggaacccccatgctatcattcggaagtacggcctcatgtgttgcagacagtgctttcgtagtaatgccaaggaaattggcttcattaagtaccgctaaggtgatttgcctttctcccaatagcatggaagaattggctggagaacaatcatagcaatcgtttatgtttctgaatgaattttaaatatgcgtttgtagttgatgataaattgttgaacttgaattggtgaatggattgaaaactttttggagtgtcaaagttgggtactaagggacccttgttgctgggctattttttcttttctatcgcagcacccatctgccctcg

SEQ ID NO: 676 - DNA, 467 bp, Euphorbia peplus
gggtttactggaggctcttgcgttgcgcggctttgaatcttccagcctttgttgttcatcgtcgaatcatgggtcactccaacgtttggaactctcatcccaagaacttcgggcctggttcccgtgcctgccgtgtgtgtggaaatccccatgggattatccggaagtatgggctcatgtgttgcagacaatgcttccgtagcaatgccaaggaaattggattcatcaagtaccgctaattgatgaacctcttctgcaagaggagaagaagatgagaagaagatggaaagaagaaggagatgaggccaagctatctcagccaagtagtgtttttttttttgttttttttgaatgaatttcaagataatggttagttaagttgtattgttgaacctggtttgatgttggttggatagacaagtaccgtaacaatattttggaaatactctattgatattactttccgt

SEQ ID NO: 677 - DNA, 528 bp, Euphorbia peplus
cttggaatcgaatcatgggtcactccaacgtttggaactctcatcccaagaacttcgggcctggttcccgtgcctgccgtgtgtgtggaaatccccatgggattatcaggaagtatgggctcatgtgctgcagacagtgcttccgtagcaatgccaaggaaatcggcttcatcaagtaccgctaattgatgaactgttcctcgggaggagatggggccaagccaactcagccaagtagtgttttttgttgaatgaattttcaagattatggttagttaagttgtattgctgaacctggtttgatgttggttagataattactttaacgatattttggaaatactcatttgatattaccttttgctattctgttgtttatttatacacttgcttgcttggctgataattgagttaaatggtttttgttagacatgaaaatatgacaatatttggtttttatgtgccatatgtttgctttgatgctataatttcactattgagttgccacttagcaatgctttgtggatg

SEQ ID NO: 678 - DNA, 597 bp, Gnetum gnemon
cgaattcatgccactgcccaggacaaaaccctaacaacgtcggcgcaatagggtttaaacttgtgcgaagagccataccagagatttgaggttattctctcacaagcttgggcagattgaaggggctgtgccttgattctcgggactcgcaccggtttttcagggcacgctatagttattagtggcaacagcaatgggtcattcaactgtctggaattctcacccaaagacctatggacctggatctcggtcctgccgcgtgtgcggaaaccctcatgggctcattagaaaatatggtcttatgtgctgtcgccagtgctttcgcagctacgccaaagatattggcttcatcaagtatcgttgagtgcagtggtggctttcgatgcacattttcggttctctggaagtattctctgttcatctatcagtcattgaatttgacaatttagattagtgcaagatcctttggaattggataaacatttcggacattgtcaactgataattcctgttacaatgtaaactttttttccctgtaatttccaccagttcctcataattatcgaatattcaatcaaatgccgtcctcgtgctgtt

SEQ ID NO: 679 - DNA, 866 bp, Vitis vinifera
gtgccaaatttcatattaaatagatggactaaaagccgggcttgggcttacagatatattgccagtccgggccgaaggcctacctggggcaagctatgggcggcccgtgtctgtacattgggggcaattcagacatttcagtggttgggatgctttaaatcgccgaaatgtgtaattagggctacagctgagcgcctctcttccgttgaagtctcattagggtttttgaggtttcagcaagaaggcagaaaaatgggtcactccaacgtctggaactctcatccgaagaactatggccccggatctcgaacctgtcgggtttgcggaaacccacatgggttgatcagaaagtatgggctcatgtgctgcaggcagtgcttccgcagcaacgccaaggaaattggcttcatcaaggatgatttaatgtgtggaaattctgcagccacattccttttaacttcttatggctattaaggttttggtataaatattcatactagtgaattcacccttgtagcatacttttggtgtggtattgaattaatttcttttctatatttgagctaatggtctttttggtttgttttgctcttttcagtaccgttaagagggtggatgataaagacgagcagaggatggctatgacgtgaagactttttctcttatggttacttttatgattattattatcctttttgctgcctgatttgaacagtgatttggagtatgttttttcctgttataagtgagaagagttttgaaacatgttctcagttacagcaagaactttacctgagctttatatcagttacagctaagaaccatacttgagctttatgtatctttgaaattttccttttgcttta

SEQ ID NO: 680 - DNA, 481 bp, Hevea brasiliensis
aggcatagtgaggcggcaagcagcgagtcgttctttctctcaagcgttccaaaacaatgggccattcaaatatctggaactcacatccgaagacctatggtcccggttctcgtgcctgccgggtttgtggaaaccctcatggattgatcaggaaatatgggctgatgtgctgcaggcagtgcttccgcagcaatgccaaggaaattggattcatcaagtatcgctgaatgtttgaaggatctgttacacacatgcattgcctgtggctttccctgaagtatgattcaaagagtttctgttctttttccttttgttctcttcagtaatgtattgctggattaagaagttattattaaactgttagctgtttaacatttaagtagaacacaaagtaattttgtttaagaatatctgaagattatttcttttggtgtggtttttgctttgcttatagtaattaattttcttcgttttcacaatt

SEQ ID NO: 681 - DNA, 474 bp, Carpinus betulus
aaggaagtatctagtattccaaacctagacttcgtatataacagtatccaaaagggttagggttttcagagacttcattccattccagctactgaagcggcgcaaagggttgaggtttctctgagaaaaaatgggtcacaccaacgtctggaattcgcatcccaaaacctacggtcctggttctcgtgcttgccgagtatgcggtaaccctcatggattgatccggaagtacgggctgatgtgctgcaggcagtgcttccgaagcaatgccaaggaaattggctttattaagtaccgctgaaaactggctacattgatcaagtttccgttccaagaatatggttgctccttcgcttcagccagatcttatttttgcccataaatgttgcagtcgatttgcatgaccttaaagttgtatttttattaaccaatcctatctaatagtgaattttggtttctttatagtttttatag

SEQ ID NO: 682 - DNA, 504 bp, Tropaeolum majus
cggccggggggacgtcgaaatcatactagttttttaactcgtatgaactgtatataaactaacctttttcaatttcgttccaatatctcaggatttttgttgaccaatctccgtgaattcgattcgtaagtcatccctgagcaacaaccgtaatgggacattctaacgtctggaactctcaccccaagacctatggtcctggttcccgcacttgccgtgtgtgtggcaaccctcatggactgatcaggaagtatgggatcatgtgctgcagacagtgctttcgcagcaacgccaaggaaattggtttcattaagtaccgttaaacaatccaatccaatgaacgaaagaagtatgtgaggcgttaaagtatttttggtctaggaacattttctttttcattttaagtttcatacattatattgactgtattggtttctggactaaaccaattgacttctaattaaaagtagttacacttgaatatctatatcaaaatttaatttt

SEQ ID NO: 683 - DNA, 389 bp, Allium cepa
tacggggggcgtcagcacagaaacaatggggcacgccaatgtctggaactcgcatcctaaaaactatggtcctggatctcgtgcgtgccgtgtttgtggaaatccccatggattgatcagaaaatacgggcttatgtgctgcaggcagtgctttagggaaaacgctaagcagattggcttcattaagtaccgctgagtattgggttgtgaagtgatgcttcaatttttcacttgcttttgggaattttcgattagttgctattgaacttgaactctatgttatgtatttcttattttctgaaccctatgttctcaaattaattatgtacaagtgattgcttttgtttgtcacagatttaactgttcattttttctgaaatcgtggttat

SEQ ID NO: 684 - DNA, 409 bp, Allium cepa
aaatcaaagctttgtgccgccgttaaaatttgctcagcacagaaacaatggggcacgccaatgtctggaactcgcatcctaaaaactatggtcctggatctcgtgcgtgccgtgtttgtggaaatccccatggattgatcagaaaatacgggcttatgtgctgcaggcagtgctttagggaaaacgctaagcagattggcttcattaagtaccgctgagtattgggttgtgaagtgatgcttcaatttttcacttgcttttgggaattttcgattagttgctattgaacttgaactctatgttatgtatttcttattttctgaaccctatgttctcaaattaattatgtacaagtgattgcttttgtttgtcacagatttaactaagttaacaaattttttaactaaag

SEQ ID NO: 685 - DNA, 421 bp, Allium cepa
ataaaatcaaagctttgtgccgccgttaaaatttgctcagcacagaaacaatggggcacgccaatgtctggaactcgcatcctaaaaactatggtcctggatctcgtgcgtgccgtgtttgtggaaatccccatggattgatcagaaaatacgggcttatgtgctgcaggcagtgctttagggaaaacgctaagcagattggcttcattaagtaccgctgagtattgggttgtgaagtgatgcttcaatttttcacttgcttttgggaattttcgattagttgctattgaacttgaactctatgttatgtatttcttattttctgaaccctatgttctcaaattaattatgtacaagtgattgcttttgtttgtcacagatttaactgttcattttttctgaaatcgtggttatcttcagc

SEQ ID NO: 686 - DNA, 397 bp, Allium cepa
tcagcacagaaacaatggggcacgccaatgtctggaactcgcatcctaaaaactatggtcctggatctcgtgcgtgccgtgtttgtaggaaactccccatggattgatcaagaaaatacgggcttatgtgctgcaggcagtgctttaagggaaaacgctaagcagattggcttcattaagtaccgctgagtattgggttgtgaagtgatgcttctaatttttcacttgtcgttttgggtaatttcgattagttgctattgaacttgaactctatgttatgttatttctttattttctcgaaccctatgttctacaaattaattatgtacaagtgattgtcttttgtttgtcacagatttaactgttcattttttctggaatcgtggttatcttcagc

SEQ ID NO: 687 - DNA, 378 bp, Allium cepa
tacgggggtcttcagcacagaaacaatggggcacgccaatgtctggaactcgcatcctaaaaactatggtcctggatctcgtgcgtgccgtgtttgtggaaatccccatggattgatcagaaaatacgggcttatgtgctgcaggcagtgctttagggaaaacgctaagcagattggcttcattaagtaccgctgagtattgggttgtgaagtgatgcttcaatttttcgcttgcttttgggaattttcgattagttgctattgaacttgaactctatgttatgtatttcttattttctgaccctatgttctcaaattaattatgtacaagtgattgcttttgtttgtcacagatttaactgttcattttttcaaagg

SEQ ID NO: 688 - DNA, 382 bp, Allium cepa
tcagcacagaaacaatggggcacgccaatgtctggaactcgcatcctaaaaactatggtcctggatctcgtgcgtgccgtgtttgtggaaatccccatggattgatcagaaaatacgggcttatgtgctgcaggcagtgctttagggaaaacgctaagcagattggcttcattaagtaccgctgagtattgggttgtgaagtgatgcttcaatttttcacttgcttttgggaattttcgattagttgctattgaacttgaactctatgttatgtatttcttattttctgaaccctatgttctcaaattaattatgtacaagtgattgcttttgtttgtcacagatttaactgttcattttttctgaaatcgtggttatcttc

SEQ ID NO: 689 - DNA, 434 bp, Allium cepa
ggggtaggccgttatacaaggattgtttacataaatagggtttagcgaagtaagtaacttcgtcctataaaatcaaagctttgtgccgccgttaaaatttgctcagcacagaaacaatggggcacgccaatgtctggaactcgcatcctaaaaactatggtcctggatctcgtgcgtgccgtgtttgtggaaatccccatggattgatcagaaaatacgggcttatgtgctgcaggcagtgctttagggaaaacgctaagcagattggcttcattaagtaccgctgagtattgggttgtgaagtgatgcttcaatttttcacttgcttttgggaattttcgattagttgctattgaacttgaactctatgttatgtatttcttattttctgaaccctatgttctcaaattaattatgtacaagtgattgctttt

SEQ ID NO: 690 - DNA, 414 bp, Allium cepa
tacggggggctcagcacagaaacaatggggcacgccaatgtctggaactcgcatcctaaaaactatggtcctggatctcgtgcgtgccgtgtttgtggaatccccatggattgatcagaaaatacgggcttatgtgctgcaggcagtgctttagggaaaacgctaagcagattggcttcattaagtaccgctgagtattgggttgtgaagtgatgcttcaatttttcacttgcttttgggaattttcgattagttgctattgaacttgaactctatgttatgtatttcttattttctgaaccctatgttctcaaattaattatgtacaagtgattgcttttgtttgtcacagatttaactgttcattttttctgaaatcgtggttatcttcagcaatatcagtttattcttgtt

SEQ ID NO: 691 - DNA, 529 bp, Carica papaya
aaatcctctgcaaaagatttagggttttgaattgctcaatcgcagaccttccatcttgcagatcttccttctcgcagacagaaatcatgggtcactctaacgtctggaactctcaccccaagacctacggcccgggttctcgccaatgccgtgtgtgtggcaactcacatgggctcatccgcaaatatggtctcatgtgctgtcgccaatgctttcgcagcaatgcgaaggagattggtttcattaagtaccgttaaactgttgcagcattcaagattaaagaatttcaaccgagtagtgttttcttaatatggatttcgaatggatattttactttttagagttggtttatttgtaaaacgggatgttggactgaagaatacttttgctactacctttgattttagcacctcattctcaatgatctttgttctatacttgttgattgttaagcttaattgcattgctcggataattgtgtagaatgatcatatgatgaaactacgtccttcatcgagtttgaaaacta

SEQ ID NO: 692 - DNA, 533 bp, Arachis hypogaea
tgatagagcgagcagtggtatcaacgcagagtacgggggagggttttcactcacactctaaggcaggcgcttccatcgtcttcttctgagcttgagattttgtgcatttgaatttggtctagcggaaacatcatgggacacaccaacatttggaactctcacccaaagaactacgggcctggttctcgcacttgtcgcgtgtgtggaaacccacatggattaatcaggaagtatggcctcatgtgctgcaggcagtgcttccgtagcaatgccaaggaaatcggattcattaagtaccgctgaagagctttgacgcttagctgcaaaaccagctgttttagattattgatttacgatgttatgtttgaagaaacttgatttttgtttatggcaactagttaatcatcagaccaaagttttggattactcagaatattttctatacattgttgattgttttcaacgtccaatctgatcctttaatcatatatttcaattttgtgtatttcaaaaaaaagaaaaaaaacaaaagt

SEQ ID NO: 693 - DNA, 468 bp, Arachis hypogaea
agggttttcactcacactctaaggcaggcgcttccatcgtcttcttctgagcttgagattttgtgcatttgaatttggtctagcggaaacatcatgggacacaccaacatttggaactctcacccaaagaactacgggcctggttctcgcacttgtcgcgtgtgtggaaacccacatggattaatcaggaagtatggcctcatgtgctgcaggcagtgcttccgtagcaatgccaaggaaatcggattcattaagtaccgctgaagagctttgacgcttagctgcaaaaccagctgttttagattattgatttacgatgttatgtttgaagaaacttgatttttgtttatggcaactagttaatcatcagaccaaagttttggattactcagaatattttctatacattgttgattgttttcaaaaaaaagaaaaaaacaaaagtactctgcgttgataccactgctt

SEQ ID NO: 694 - DNA, 414 bp, Lippia dulcis
agggtttgcatcatcggcgcatcatctccaaaactctagattttccgcagagagagaagagaagagagagagaagatgggtcactctaacatctggaattcgcatcccaagaactacggccccggctcacgcacttgccgggtttgcggaaacccgcatggaatcattcgcaagtatggtctcatgtgttgcaggcagtgcttccgcagcaacgccaaggagattggattcatcaagtaccgttgatgcttgaactttgagttcttgaagcgaagtcatggaatcttgatggatgcttcaaattttgttttagatgttgaatttcttccagacattatgttgctatgttaactttgttacttgtcacttttgataattgatactactactttcagtttttattatcttatcttc

SEQ ID NO: 695 - DNA, 479 bp, Lippia dulcis
tcggcactcggcagctttttccaaagcctcaagcttcatctgaatctagggttgttttgtttatttcgatcgccggcgacaatggggcactccaacatctggaactctcaccctaagaactacggccctggatcccgcacttgccgcgtgtgtggaaatcctcatggtataatcagaaagtatgggctaatgtgctgcagacagtgcttccgcagcaacgcaaaggaaatcggcttcatcaagtaccgttaaatctcgacaagggtatgccacaatttcgtaatcaacctagtctctgctaggttgttttttgaaatgttagtcatagccaatctgtgactgaatctgtgaccgatttggatttatttctgaactatcagtttgtattttggtttcatagtattgacatttctttatttgctcattttcttcgttacgtttccatctaaatttggatgctcacatctctctttgctgtc

SEQ ID NO: 696 - DNA, 534 bp, Platanus occidentalis
ggctaacctctctctttggcagtcccttctcttttatcgctttggcgtccgaagttagggttttgtcaagaatgggtcacacgaacgtctggaattctcatccgaagagctacgggcctggatcccgtacttgccgtgtttgtggaaatcctcatgggttgatcaggaagtatgggctgatgtgttgcagacagtgcttccgtagcaatgccaaggaaattggctttatcaagtatcgttaaaagcgtggttgcaatgccaggcatgcaatggaggagatggattgagtagtttgtcagcttttatcaattaagatctcttttgaaaccagtttagaaactgattagagttttgtcattacaagcactcccaaacgtttacttgaattttataagtttccttcttatttttatgggtaagagataatttttaatatacttaaaagttttgattgtgtattgggtcacttttgtttactgccacatttgtgcggttggaataccctagttatatatgtgtgtgggattttgacac

SEQ ID NO: 697 - DNA, 480 bp, Platanus occidentalis
gcctgcaatccctttccgccgattacggttttcttagcgagtgtagcaacagtgaattagcgtttcggtgaggagcgaaaaatggggcatacaaatgtgtggaactcgcatccgaagagctatggccctggatctcgtacctgccgagtgtgcgggaacccccatgggttgatcaggaagtatgggctgatgtgctgcagacagtgcttccgcagcaacgccaaggaaattggatttatcaagtaccgctgagagaagacatcttgggagtcgcctgcttcagcacggatggtagtttttatatttcctgcaatggatatgaatacatttagattggttataacctaaattaatgcatactgttgaagcatgaatttctccgcccgcccccccccccccccgacgccacccgagactagacaacgttaaactacaaccaacaaatagacttagagtcagtacaagtacggtcgtttaccg

SEQ ID NO: 698 - DNA, 784 bp, Populus trichocarpa
aagtcagttgtgacaactatgaaatgacctataaaagcagcaacatatcacctcccaagtatacgaaatcgcggtcagggtttttggcacttgagagcggcgcagcgagtcaggcattactccgtcgatcacaactactagatgggccactcaaatatttggaactcgcatcccaagaactacggtcctggatcccgaacctgccgagtgtgtggaaaccctcatgggataatcaggaagtatggactgatgtgttgtaggcagtgcttccgcagcaatgcgaaggaaataggcttcatcaagtaccgctgaatggagaactcgttgatatctgtttttgaaggctctgtctgaaatatggtgtgcgggagttttatcttccttttcttttatcatctccagtgatgtaatctactgaattctgaagtcttaactatattgtcttgtgttatttttagaaaggaatttgtttagagtattttgatttgtgttttcatttcattcgtagcacgctgtttatgttttgtgatggtttctcctttgtttagagttctgttttaacattagccaatcctggggatttaccgatgtggtttttggtctaagcatgcacttgttcaacagagttgtataaagaggaaccctacccagatacctcattgaactgatgcacatggtaattcttgcaaccttagctcagacagtagaaatttttttggtttgcctggatggccttgtggtgttaggttcctgtgtcacccgacccatgattttaaagtacctg

SEQ ID NO: 699 - DNA, 888 bp, Populus trichocarpa
agatataatttttcctattaaatattaaaatttgggaccttggagtttacgttctggggttgtacatgaatctctgcctcgcagcaattagaacctggaaaaaaacagcgaaattgtagacaaaaaaagaaaaaaaaaatcacgtgggtccgctttcgacctataaaactgcaagcctatctctttccatctcgaagaaatcgcggttagggttagtggcacttgagagcggcgcagcgagttagggttttctccgtcgattaaaggaacgaaatggggcactcaaatatctggaactcgcatcccaagaactacggtcctggatctcgcacctgccgggtgtgtggaaacccacatgggataatcaggaagtatggactgatgtgttgtaggcagtgcttccgcagcaatgccaaggaaataggcttcatcaagtaccgctgattggggacctttttgatatctatttttgaaggctctgtttgaaatatgatgcgagggagtttttgtttccttttcttttgtccccctcactgatgtaatatgcgcgattcagacattcaaattatatattctgttcagcattcgagccaatagaagtgtcactttttggaatgttaattcttagaatttcttttagagtattttacttgttctttttgtgcgctcatatcaccttgtttatgttattgtttttataatttctgttttgtttagagctttgttttaacattagatagtatagggatctacagatttggtttttggtgcaagcttccacttgtgtgttcaacaaatgtgtatgaagatgaaccctacccggagacctttttgatgaatttaagtaccagattgtgattggtgcaagtgcgatatatttcggtctcc

SEQ ID NO: 700 - DNA, 771 bp, Primula obconica
gcctctctcatttttgactgtgtctctttctctctctacattcgtgagccagaagaagaagaagatgggtcacgctaacgtttggaactctcatcccaagagctacggccctggttctcgtacctgccgggtgtgcgggaatcctcatgggctaatcaggaagtatggcctcatgtgttgcagacagtgcttccgtagcaatgccaaggaaattggcttcatcaagtaccgttaaatggataaagctgacgcaaaatggaacaacacatttcagcagcatgtttctccgctaataggaacggttctgaagtatgttgagaagatctttgcagaaaaactgttggcaaacatcttttttacttttttctgttttcattgcatttggtactttcaaaattttcgggataatgtaatgttttatggataatgagtgtcaaacttgtggtgtacttgaatatattctaaattgcaaattgcagttgccttgcttgttctgatgttaaaaggatttcattgcgttagcttatttggtatgtttactggttgtctaattctgtgatatgccaagggaagtagtaaatgctccttatttggtttgtttacctatcgtcgaattctttgatatgccttgggaagtttcaaccatatatctacttatggttgtcatcaagactttgatctggaccgcttttaaaattctgtatctataaattcaaaagcaagtattttttgatttgattggcttaaatttgaatcagtgtttttggccct

SEQ ID NO: 701 - DNA, 348 bp, Primula obconica
ctctctctctctctgtctgtgaagtgaaagatgggtcacgcaaacgtatggaactctcatcctaagagctatggccccggttctcgtacctgccgggtttgtggaaaccctcatgggttgatcaggaagtatggtctcatgtgttgcaggcagtgcttccgcagcaacgccaaggaaattggcttcatcaagtaccgttaagaaccaatctagacgtagactggaacaagaacaactggcctttctttatatgttgacgtctggtcttgaccaaaaagctgtttgattacttttttctattttagttttacttgttttcggtaacctatagggaactaatttcttaag

SEQ ID NO: 702 - DNA, 553 bp, Primula obconica
agcagcgcctctctcatttttgactgtgtctctttctctctctacattcgtgagccagaagaagaagaagatgggtcacgctaacgtttggaactctcatcccaagagctacggccctggttctcgtacctgccgggtgtgcgggaatcctcatgggctaatcaggaagtatggcctcatgtgttgcagacagtgcttccgtagcaatgccaaggaaattggcttcatcaagtaccgttaaatggataaagctgacgcaaaatggaacaacacatttcagcagcatgtttctccgctaataggaacggttctgaagtatgttgagaagatctttgcagaaaaactgttggcaaacatcttttttactttttctgttttcattgcatttggtactttcaaaattttcgggataatgtaatgttttatggataatgagtgtcaaacttgtggtgtacttgaatatattctaaattgcaaattgcagttgccttgcttgttctgatgttaaaaggatttcattgcgttagcttatttggtatgtttactggttgtc

SEQ ID NO: 703 - DNA, 450 bp, Primula obconica
ctctctctctctgtctgtgaagtgaaaggatgggtcacgcaaacgtatggaactctccatcctaagagctatggccccggttctcgtacctgccgggtttgtggaaaccctcatgggttgatcaggaagtatggtctcatgtgttgcaggcagtgcttccgcagcaacgccaaggaaattggcttcatcaagtaccgttaagaaccaatctagacgtagactggaacaagaacaactggcctttctttatatgttgacgtctggtcttgccaaaaaagctgtttgatacttttttctatttagttttactgttttcggtaaccatgggaacaatttcttaagactttgcagagtttgtaatgttgatttgtgttacatttgaaatattgccaatttcaaataggcctttgacaattacttattctccggagtattgagtgtcgatttatc

SEQ ID NO: 704 - DNA, 293 bp, Primula obconica
gtctgtgaagtgaaagatgggtcacgcaaacgtatggaactctcatcctaagagctatggccccggttctcgtacctgccgggtttgtggaaaccctcatgggttgatcaggaagtatggtctcatgtgttgcaggcagtgcttccgcagcaacgccaaggaattggcttcatcaagtaccgttaagaccaatctagacgtagactggaacaagaacaactggcctttcttatatgttgacgtctggtcttgccaaaaaagctgtttgatacttttttctatttagttttact

SEQ ID NO: 705 - DNA, 380 bp, Rosa hybrid cultivar
ctctctctctctctctctctcaagcttttgcaatcatggggcactccaacgtctggaactctcaccctaagagctacggccctggatcccgcacctgccgtgtgtgtggaaaccctcacgggttgatccgcaagtacgggatcatgtgctgcaggcagtgcttccgcagcaacgccaaggagattggcttcattaagtaccgttaagagcttgatcttggatggatgagctagtatgccgtagaaatgcttcagtcatttcagtgtagtggtttttgagctttgatgaactgttaagatgtttttatttgatctacttttgaaatcaagtcaattgttgaactattgagtgttgtggaattaatgacttgaagttacttt

SEQ ID NO: 706 - DNA, 436 bp, Rosa hybrid cultivar
ctctacaaactctgcgactcctctgcgacttgctagctagggcttctctctctctctccttgcaatcatggggcactccaacgtctggaactctcaccctaagagctacggccctggatcccgcacctgccgtgtgtgtggaaaccctcacgggttgatccgcaagtacgggatcatgtgctgcaggcagtgcttccgcagcaacgccaaggagattggcttcattaagtaccgttaagagcttgatcttggatggatgagctagtatgccgtagaaatgcttcacaatgcttcagttgtttcagtgtagtggtttttgagctttgatgaactgttaaggtgttttcatttgatctacttttgaaatcaagtcaattgttgaactatgagtgttgtggaattaatgacttgaagttactttaagttattctcattt

SEQ ID NO: 707 - DNA, 592 bp, Rosa hybrid cultivar
ctctacaaactttgcgattcctctgcgactgctagctagagctcctctctctctctctctctctcaagcttttgcaatcatggggcactccaacgtctggaactctcaccctaagagctacggccctggatcccgcacctgccgtgtgtgtggaaaccctcacgggttgatccgcaagtacgggatcatgtgctgcaggcagtgcttccgcagcaacgccaaggagattggcttcattaagtaccgttaagagcttgatcttggatggatgagctagtatgccgtagaaatgcttcagtcatttcagtgtagtggtttttgagctttgatgaactgttaaggtgtttttatttgatctacttttgaaatcaagtcaattgttgaactattgagtgttgtggaattaccggcaatggatgacctgaaagcggaagccaaatcgcaactggaagagatcattaaaaaatttaaactgccaaccgacagagtgcatgtccatgttgaggaaggctcgcccaaagaccgcattctggaattggcgaagaagatccccgctcatatgatcatcattgcttcccatcgaccggatatc

SEQ ID NO: 708 - DNA, 301 bp, Secale cereale
atgggacactcgaacgtctggaactcgcaccccaagaactacggccccggataccagggtttagccgtgtctgcggcaactcgcatggcctgatccgcaaggtacgggctgatgtgctgcaggcaaggtgcttccgcagcaacgccaagggtctattggcttcatcaagtaccgttaagatggaaaccaaggagcaaggactaggaaattatcatcctcgaactggtggtgcttcagtggagggccgtattctttagcctaataaactgtgtaatgaactactattaatgttagaatcgta

SEQ ID NO: 709 - DNA, 858 bp, Glycine max
atttttttaatacaagggcaattttgcccattcacctaattgctgggtgcaccagcaatgttgctgggtgcacctagcatgtcccagcggcaagatgggagttgggctaaggtttagcccaattgagatttgacttcaagaaaaccctaatttgagtatttgtctataaattggtatcggcagagagggcgacgagggttattggacacattcttcagcgactgcgtttttggatcggaacctcttctgcggcgtagcaatgggacactccaacgtttggaactctcacccaaaaaactacggtcctggttctcgcacttgccgtgtgtgtgggaatccacatggactgatcaggaagtatggccttatgtgctgcaggcagtgcttccgtagcaatgccaaggaaattggcttcatcaagagcagttgtcaactacggaccaatattgtgttctggcactaggatgttttgaggatgttatgtttgaagaaacttgagactttcttttttcatctaattaattatcagacgtaatttgtggtactaagaatacttttatataaattgttttgaaccatattgacttcccgtctgatcctttaacaattctgcagtgcatgcgtatcatacaggtacatgcttgtgcaatcttgcattcgcaaccctttgtcatttttttctgggcattttagttgaatttacggctcaaaacaaaattttggcctacggcaaaagcttttttgatcttgttattgcaatggtcaacatttgaatttggaagccatgaaagttatatagtaggtttctagttccgtaataaaattcgtaagctactgtatttagtgtataaagtcgtt

SEQ ID NO: 710 - DNA, 477 bp, Tripterygium wilfordii
ttcttgtgttcgtctctgcggcgctgcgagttacggttttcttttctgtctttcgaacagcgagaaatcaacgatgggtcactcgaacgtttggaattcgcatcctaagagctacggtcctggttctcgtgcctgccgcgtgtgtggaaaccctcatgggataattcggaagtatgggctgatgtgttgcagacagtgcttccgcagcaatgccaaggaaattggcttcatcaagtaccgctgaatgatgaggaaatctttcgttggttggagattgtctagaaagtgcttggattagctgttcttcttttttccaatgttcccttttcattccaccacaaatgtaatcgactagatctaaatgttgctattattatttttggttgacatttgagcccgatataaagtagtagttgtttggagtatgaattatttcttaattttatcgtagttctgatttcttctctctattaactc

SEQ ID NO: 711 - DNA, 391 bp, Tripterygium wilfordii
aactagagaaaaaggctccactgcaacggctgaatggaggagatggtccgaaaagcaagcaagatatgggccactccaacgtgtggaactctcatcccaagagctatggccctggatctcgtgcctgtcgtgtgtgtgggaacccccatgggatcattcggaaatacggcctcatgtgctgcagacagtgtttccgtagtaatgccaaggaaattggcttcattaagtaccgctaaaggagatttggctttcccactagtgtggaagaatttgctggagaacaatcatggcaatcacttctctttctgagtgaattttaagatgttgtcttttgttaatgataaattgttgaacttgaatttatcaaatggattgaaaactctttgtagtg

SEQ ID NO: 712 - DNA, 411 bp, Tripterygium wilfordii
gaactccacagtccgcagctaccaaagttgaaagaagagccagcgagcgagagatggggcactccaacgtgtggaactctcatcccaagaactatggccctggatctcgtgcctgtcgtgtgtgtgggacccccatggtatcattcggaagtacggcctcatgtgttgcagacagtgctttcgtagtaatgccaaggaaattggcttcattaagtaccgctaaaggagatttgcctttcccactagcatggaagaagtgcctggagaacgatcatggcaatcgttatgtttctgaatgaattttaaagatgcgtatttagttgatgataaattattgaacttgaattgatgcaaggattgaaaactttttggagtgtctaacttgggtactactggtcccctgttcttaac

SEQ ID NO: 713 - DNA, 591 bp, Cenchrus ciliaris
ttggcgtatcgcattatatgcatgcagtgaataattagctagggtttacggttcaccagtcgagacctcctcctccaccgccgccgccgccatgggacactccaacgtctggaactcgcaaccccaagaactaccggcccccggatccaggggtttgtccgcgtgtgcgccaacccccacggcctgatccggaagtacgggctcatgtgctgcaggcagtgcttccgcagcaacgctaaggacatcggcttcatcaagtaccgctgaaaacttaaggcggtccacagcatcaccagaatgggagctccgatgaggagcatcatcttggaaccgtcctttgattagtactatcataatcataccatgtaatgaattgtttgggtttaaaatggaccaagtcattgtattctggctggcagtctactgcatgctagtagttgagaatgtagaacatcaatgatcagactaatctcagtgttattgtgccattactgttgctatcgtccctgcacaggagttgctcatcgaaaggttcataccattttatttgctgtgtcctttgcactgatttattactgtgctttgatttac

SEQ ID NO: 714 - DNA, 477 bp, Humulus lupulus
tctctacgactgcgttgggctctcgattctagtcctcttcctcctcccacctgccatcgaatcatgggacactccaacgtctggaactcgcaccctaagaactatcggccccggttcacgcacctgccgtgtgtgtacggaaacccccattggtttgatccggaagtatggtctcatgtgttgcagacagtgcttccgcagcaatgccaaggagattggcttcatacaagtaccgttaaggagggtatttggcttattatttttgttggagcggattgtttggacctaaaggataatcttattagtctttttcttgtttttttagatctttttcttaagaggaaagatttttgttttcatgttttagtttgttctaatgttgagcatgaattggatttggaatttctgtagtgtggaatcctttggattaaagtgaatttgaagtatatctatccgctcattgtttcacccttatca

SEQ ID NO: 715 - DNA, 413 bp, Antirrhinum majus
aggttttaattttttcgcatacagaacaaaatgggtcactcgaacatctggaacatgcatcctaagaattacggccctggatcacgcacttgccgtgtgtgtggaaatccacacggaattattcgcaagtatggcctgatgtgttgcagacagtgttttcgcagtaacgccaaggaaattggcttcattaagtaccgttgatgcgttgctgttgaagtctccatgggattgtttgtggagtttgctggaaggaataaagaacttgcagcattttttttttaaaatgagactgttttgattagttcaagcttttattagatatgaaattagatcgttttgctgttaaatctgaaactgtttcttgaatattagttgtgcaaacttctttcatttcattaacaaatttgttgatc

SEQ ID NO: 716 - DNA, 454 bp, Persea americana
ggactagggttttattattttttttccagccctttctctccccctaatcttcttcaaatctagggtttgtcagcagaagaaaccgagatgggtcactccaacgtctggaactctcatcctaagaactatggacccggatctcgtgcctgccgagtctgtggaaattctcagggtttgatcaggaagtatgggcttatgtgttgccggcagtgcttccacagcaatgccaaagcgattggctttatcaagtatcgctaagtgctcgcaccaaggtttgctgatggaggaagatgcaccaagtttccttttggttttatttttcggacttgttttatagtatgtgctgatgcaggaagatgcaccaatgttccttttggtttcatttttgggacttgttttctagaatgggcttgaacatttacacactgtggatgttttcttgcctctggtggag

SEQ ID NO: 717 - DNA, 416 bp, Cleome gynandra
ttttccgccgctctcatcgattgatcagagaagcagcgaagcatcacaatgggtcacagtaatgtttggaattctcaccccaagaaatacggtcctggatctcgtgcctgccgtgtgtgcggtaactcccacggcctcatcaggaagtatggcttgaactgctgcaggcagtgcttccgcagcaatgccaaagagattggcttcattaagtaccgctgaagaaccttaccaacatctatcgacattacttgattgaacgtgacaggctctgcttagtgatgtgaagaagtattgtctcttctcttcattgaacctttccaatatatattctggtttttgttttgttttttcgctctttttggatgaagaagacatgtaaaactcagattttgaagtaacatgaacttccttttaat

SEQ ID NO: 718 - DNA, 345 bp, Cleome gynandra
tatcgaaatctagggttttcagaggttcgccgttagtgttcgtcgtctagctgttcctgttctagcagccgacgaacatgggtcattccaatgtctggaacagccatcccaagaaatacgggcctggatctcgcgcctgccgagtgtgcgggaactcacacgggttgatcaggaagtatggtttgaactgctgcagacaatgcttccgcagcaatgccaaggaaattggattcattaagtatcgttgaagattaccggtgttgtttgatgacattacacaaatgaacatcagctgattggctcctttagttatgttgctataacgtattagatttcccgatacca

SEQ ID NO: 719 - DNA, 444 bp, Cleome gynandra
gggtttccgaggttcttcactgttcgtcttcgtcatctagcttttcgtgttcaagcagctgacagtcatgggtcattccaatgtctggaacagccatcctaagaagtacgggcctggatctcgcgcctgtcgtgtgtgcgggaactctcacgggttgatcaggaagtatggtctgaactgctgcagacaatgcttccgcagcaatgccaaggaaatcggattcattaagtaccgttgaagaataccaatgttgattgatgtcattacacagatgaacatcaaagcattggctcctttacttattatgtcattgtattggatttcatttcgtataacattttttgtggagctttttgagttgttgaacctttcataacgccgttgactttggctgaaccaaaccttaactctttcttttgtctggatcagaagaactttgatgca

SEQ ID NO: 720 - DNA, 257 bp, Cleome gynandra
cttctctgcaaaatctagggttcttcacagagaaacagcgaagctacagaatgggtcacagtaacgtttggaattctcaccccaagaaatacggccctggatctcgcgcctgccgtgtttgcgggaactctcatggcctcatcaggaagtatggcttgaactgctgcaggcaatgcttccgtagcaatgccaaggagattggcttcatcaagtatcgttgaagaatcatgccaacaaagtccattggccttacttga

SEQ ID NO: 721 - DNA, 411 bp, Cleome spinosa
ctcttctgcaacatctagggttctttcaccgcgctagtagatccatcagcgaagcaacgaagcagcagaatgggtcacagtaacgtttggaattctcacccgaagaaatacggtcctggatctcgcacttgccgtgtgtgcggaaactcccacggcctcatcaggaagtatggactgaactgctgcagacaatgcttccgtagcaatgccaaggagattggcttcatcaagtaccgctgaagaatcatagcaacagcatccattggcatggcttggtggaactggtgaccctcttgtgtgatttcaacaagtaatgtcttgtttttctttccaatgatcaaacctttaagtttatattttagttttctggttcatttcgccgtctgtgtttgaattaggaagactgaaaaa

SEQ ID NO: 722 - DNA, 499 bp, Cleome spinosa
ctctacagactaagctctgcaaaatctagggttttttccttgctattgcagattcatcagagaagcaacgaagtcgcacaggatgggtcacagcaacgtttggaattctcaccccaagaagtacggtcctggatctcgcacctgccgtgtgtgcggaaactcccatggactcatcaggaagtatggattgaactgttgcaggcagtgcttccgtagcaatgccaaggagattggcttcatcaagtaccgctgaagaaccataccagtacttgatatcgaacggggctcttttgtgtgatatggagaagtaacgtctttctttttttcgtaaacttttggatcatatatttcggtttctgttttggtttgatttgagtttttggattagggcagctatgaaatcctcggttcgggaaatgggttcagagaatcaatgtacttactttaaagttatgattcaaagaagaggataaattgcatatgaacacctttcagagtc

SEQ ID NO: 723 - DNA, 482 bp, Cleome spinosa
tcggggtaccggtaatttcttagggttttcagagcttcttcgccgctcgtcttcgtcatcttattttacctgttggagcagctaacgatcatgggtcactccaatgtctggaattctcaccccaagaagtacggtcctggatctcgcacctgccgtgtgtgcgggaactcacacgggttgataaggaagtacggtctgaactgctgcagacaatgcttccgcagcaacgccaaggaaatcggattcatcaagtaccgttgaagaacacaataccactcttgttgattgacgaacatcaatggacttgccccccttcagttattatgtttttattgcaatggattggatttcttgatctgagttattgagcctttgggattgtggttgatgttaccatttcgatacagtttttaggtaaattggttttatgatggcatcatctgagttattgaaccgtttgtatttttaaggtatttgcgaaa

SEQ ID NO: 724 - DNA, 437 bp, Cleome spinosa
ttctagggtttccagttggtcatctagcttaccttgttcgagtagccgacgatcatgggtcactctaatgtctggaattctcaccccaagaagtacgggcctggatctcgtacctgccgtgtgtgcggaaactctcacgggttgatcaggaagtatggtctgaactgctgcagacaatgcttccgcagcaatgccaaggaaattggattcatcaagtaccgttgaagaattcaagtgccgattgatgtcattaagcagatgatgatcaatggatcggctcatttagttatgttattgaatcggattgaacccttttttttttaatggtgcttttaaggttattgaacctttcagattttggtctaagttttagttatctcctccaatctatgtctcaactttcatattcctatactattagttatcatgcggcgtac

SEQ ID NO: 725 - DNA, 491 bp, Coffea canephora
cggccgggggcctccgccttcagtaattagggttggccttggcagaaattagcagccgctcaaagcttgacagagaggaagacgatatcgagatgggacactccaacatctggaattctcaccctaagaactacggccctggctctcgcgcctgccgtgtgtgtggaaactcccatggtattatcagaaagtatggcctgatgtgctgcagacaatgcttccgcagcaatgctaaggagattggattcattaagtatcgttgaaggaaaaggtcgttgcctccttgctagtggattttgttaagcaagctgccattagagataaatggatcccaagttgttatttgctttgtattttgaacaattttggctgttctaatttgtcattgaacttgaattggtatgtgaatcagcaaattctactatatgctgttttttaataaacggtatcgcataagaaattgatgaattgcgggcaatgttattaattaa

SEQ ID NO: 726 - DNA, 547 bp, Cynara scolymus
cgggctctcccggcgctaactaatcgattgcagcattcacatcgatctggtaatggggcactcaaacgtatggaattctcatcctaagacctatgggcctggctcacgcacctgccgtgtttgtgggaattcccatggtttgatcaggaaatacggccttatgtgctgcaggcagtgtttccacagcaatgccaaggaaattggtttcattaagtaccgttaagcagttctgaagatctgattggaaaaaagatgattatatacgcaattgaaagagcttctggtgtgtctttttacatttcagtatgttaatgacttcttgattgttctcttctcttaggcaattttgtttcgtcattgaatggtgtttggtggggatttagagtattaaagaccaattgttcttacaagtattgtgaaacataccatgtttggtttatgtcgggtatgagaccgtgtgacaatatgttttgttctttttaatcgtaacgagaatgaccaagttactttaccgtttctaaagtttctttgatcattcatcaaaatc

SEQ ID NO: 727 - DNA, 646 bp, Cynara scolymus
tgttaatctatacttcgttgcatctgatctgacgagacattggctgcggctttcacgaccatctcatctgcatctaaaagttttaaagcatcagatcagatgggtcattcaaatgtctggaactctcatcctaagacctacggtcctggttcccgcacctgtcgtgtgtgtggaaattcccatggcttgatcaggaaatatggccttatgtgctgcagacagtgtttccacagcaacgccaaggaaattggcttcattaagtatcgctaaggagttttggagggttatacccaaattgaaagcttgtggtgtttctacaattacagtatctcatcgtcttctcagttcatcccttcgggatcacaatggatgtagtcggattgtttatgcatctttaggttttttaatcgaaaattttcatgtgaacatcatagaaccacaagtccatatcactgcttaaaagttacataaatccttgatctctccaaaatctgaaaattcttaaatgaagttaggttttgcagatgagtcctgttaggtatgtgcttgctattttaggagaagtcaaatgatacaatgtcaacttctactcaatgcttacagctcaaatgtcatattctgacaaaaaaaacacgaataaaactaa

SEQ ID NO: 728 - DNA, 386 bp, Gerbera hybrid cultivar
gatcgactgcggctgcatccaaagctttgaagcagcagaagatggggcattcaaacgtctggaactctcatcccaagacctacggtcctggttcccgcacctgtcgtgtgtgtgggaattctcatggtttgatcaggaaatacggcctcatgtgctgcagacagtgtttccacagcaatgctaaggaaattggctttattaagtatcgctaagcggttgaagctttccaattgaaagcttgcggcgtgtttttacaattatagtatttcaatgtcttgtacttgattccttttggatgacaatttatctttagttttttaattggaagttttcatcttgtgagatattgacaattttagttaaatttatgagttcttttggtcatt

SEQ ID NO: 729 - DNA, 443 bp, Gerbera hybrid cultivar
ggttttgaatttctttagcttgtgagatcgtcgcctccgcagcaagaagaatgggtcactcgaacgtctggaactcgcatcccaaaacctacggccctggatctcgtacatgccgagtatgtggaaactcacatgggttgatcagaaagtacgggctcatgtgctgtaggcaatgttttcacagcaatgccaaggagattggtttcattaagtatcgatgatttgaattgatgatggagcatttgaagttggcaatcttctatcaatggttattaggatattgttagttttttgacttttttcatcttcggttttaatcaaatgtgtaggattcatgtatgaccctgaaagtggcccccttttttcttcgtgattttgcactgtagtacaatttttttttctctcataatggattgtcaaatactaaaaaaaaaaaaaaaaaa

SEQ ID NO: 730 - DNA, 442 bp, Heritiera littoralis
tagttggtcctattacggccggggctctgcgaaatctaggctttcaatttgctgtcgagcagcctcttgccttggaaagctttgatcggggagtagctaatcaatcatgggtcactcaaacgtctggaattctcaccccaagacatacggtcctggctctcgcgcctgccgtgtgtgtggaaaccctcacgccatcatcaggaagtacgggctcatgtgctgcagacagtgcttccgtagcaatgccaaagagattggattcatcaagtatcgctgaagaagcatgaaggactttgtccaagtatgagccattggtattgtggtgtttgaatttgaggaactttaagatgatttgttgttttgcttaatttagtatggaccaaccaagaatactttgtttttctcaattaagtaatcacactttttattgttagcttgctat

SEQ ID NO: 731 - DNA, 983 bp, Mesembryanthemum crystallinum
ccttctagtctaggacatggcccgagccggagctccttcttctctctcctcaacttcagggctttagcgatcagcaaagaaaaatgggtcactcgaatgtctggaattctcaccctaagagctacggtcccggatcccgcgcttgccgggtgtgcggtaacccacacgccatcatccgcaagtacggtttgatgtgctgcaggcaatgcttccgtagcaacgccaaggaaatcggtttcatcaagtaccgctaaatggcattgctcaacggcagaagctgtttggaatttgttgcagattcatctatgatttagttttatattgacttttgaagatgtagatcactgaacgtgtatggtcactaaattttggactcccttgaacggagtaaagtcttttggttgttttcctgcgaaatatagccccgccattattacttcgttgaagtctggcccaaaaaaaaaacccagaaaaaaaaccatgaaacacaaaaaaaggaaaaaaggcccaaaaacctccgggggggggccgggtcccaattcgccctatagggagtacattaccccgcgctgagggcccgggggtaacaacatcttgactgggaaaaccatggggttcccagaataaagcgttttgaagcaaattcacgtgtacacgctggagttaaaacaaataaggccgtaccgattggccttttcacaattgggcagcaataaaggaaaatgggacccccccctgtttggagcattaaccccgggggttggggagttacccccagggttacggttccttttcaagggcccttgggcccggtacattgggttttttactttccttttttgcaggtccccgggttttcccggaaagattttaaaatcggggtctcctttaagggtcccggtaggtcttaaaggccccttccccgggaaacattgttgggggggaaggtaacctttggggcacttccccgtgaaacggttttt

SEQ ID NO: 732 - DNA, 476 bp, Mesembryanthemum crystallinum
tggggcccctttaaaaactacaaactggagctccaccgcggcggcgtacgctatatagctaccgcgggctgcaggaattcggcacgaggaaccgccggctgagagagcttcattgctagggttctaatccgacaacaacgaaaaatgggtcactctaacgtctggaattctcaccctaaaagctacggtcccggatctcgtgcttgccgagtttgcggtaaccctcatgcaatcatccgcaagtacggattgatgtgttgcaggcaatgcttccgtagcaacgccaaggaaattggtttcatcaagtaccgctgaagtacactacagaagctgtttggaatttgtctgagacgcgtctagggtttagttataaatgaacttttggttatgtagatcagtgaacctgtatggtcgctaaattttgaactccctcgaagggagtaagattttggttgctatatcttcttatttcttgc

SEQ ID NO: 733 - DNA, 454 bp, Jatropha curcas
acgcggggaacctttgcattcttgagctgctctacatcgtctgattcttgcagtgtagtcatggggcactcaaacgtctggaattctcacccaaagaactacggccctggttctcgtgcctgtcgtgtgtgtggaaatcctcatgggctgatccggaagtatgggctcatgtgttgcagagagggcttccgcaacaatgccaaggaaattggcttcatcaagtatcgttaaaggatgagcacctgttccacaagagcgatggacaagtatgattggacttgtggtttctttttgcatgaacactaatataatgttatatttagttaatgtcgcgttgaacttctattgattatggaagtatattttgccgttacaatgtttggaattagtcattgaggataattaaattactaggtctatacttgttgcttattctatgttctaaaaaaaaaaa

SEQ ID NO: 734 - DNA, 470 bp, Actinidia deliciosa
tctccggaagagagagagagagagaaagaagatgggtcactcgaacatctggaacgcgcatcccaagacctacggccctggatcgcgcacttgccgggtctgcggaaaccctcatgggttgatcaggaaatatggtctgatgtgctgcaggcaatgcttccgcagcaatgccaaggaaattggttttatcaagtaccgctaaatgggtgaagccgagcacaaatggaactgcactggagaatgttttcctttaattaggaatcgttgtaacagtcccagatttactgttttgttagccggacccttttgtcaaatgtaatggattctatgttattctggtcttactgctatttgcattaaaatgacgttcgttgaatatcatatatatgacgattaagcctcgtgccgaattcggcacgagggagagagagagagagagagagagagagagatggggttggtatggctgg

SEQ ID NO: 735 - DNA, 492 bp, Lotus japonicus
cctcgtccacatccttgagctgctgcgcaatcagatcttcttcttctccgaggaaaccagagcgaagcaatgggacactctaacgtctggaactctcaccccaagacctacggtcctggttctcgcgcttgccgcgtgtgtgggaatccccatgcaatcatcaggaagtatggcctcatgtgctgcaggcagtgcttccgcagcaatgccaaggaaattggcttcatcaagtatcgctaaagagtgagcttgtcacctgctcaacctattttagttactggcattaggatgttttggggatctatgtttttgaagaaacttgagtcttgttttatttttgcatctggtttattatgagacttaatttgtagtaagaatccttttacatattttctttttactattgacctccccaattgtgatcctttaatatttcagaagtctttttgctttacagtggtccgtgcctatgctttagtcttatatttttgc

SEQ ID NO: 736 - DNA, 480 bp, Lotus japonicus
ttcaacagtcagttcaacatccaaattcgcaaccttcttcatcgaatccaccgcaatcagatcttcttcttctcctaggaaaccagagcgaagcaatgggacactctaacgtctggaactctcaccccaagacctacggtcctggttctcgcgcttgccgcgtgtgtgggaatccccatgcaatcatcaggaagtatggcctcatgtgctgcaggcagtgcttccgcagcaatgccaaggaaattggcttcatcaagtatcgctaaagagtgagcttgtcacctgctcaacctattttagttactggcattaggatgttttggggatctatgtttttgaagaaacttgagtcttgttttatttttgcatctggtttattatgagacttaatttgtagtaagaatccttttacatattttctttttactattgacctccccaattgtgatcctttaatatttcagaagtctttttgcttta

SEQ ID NO: 737 - DNA, 725 bp, Carthamus tinctorius
gtttccgaaccttctcaccggcgcgtaactcgatcgattgcagctttcacatccatctctgctaatggggcactccaacgtgtggaattctcatcctaagacctatggccctggttcacgtacctgccgtgtgtgtgggaattcccacggcttgatcaggaaatacggccttatgtgttgcaggcagtgtttccacagcaatgctaaggaaattggtttcattaagtaccgttaaggagttcggaacatctgattggaaaaggatgactatactcgattgaaacgagcttgtagtgtctcttacatttcaatgtctatgacttattgatcgatagtttttgcaattttgttttgctattgaatggcttctttgtggagatttacagtatttatgatcaatagttcttaaacagtattgagacccattccatttttaaatcgcgcaattatagttgtatgacagtcgcctaccggtggtgggtatgcccagcctgctccgtatcctggtggatatgctcagcctgatgctggtggtggtcaacgcccgccacctactagttacggttatgggcaaccaccgccagcatatggtggaggtgctactcagccagggtatggggcggcgccgcaaccagcggcatatggagggtcttatggcggtggttatccacagcaaccagctgcttattcttctgatgcatccccggcggcggcgggggctcaac

SEQ ID NO: 738 - DNA, 300 bp, Salvia sclarea
ctactagaccttggctgtcactcagaactagcaattagggatttaacacagattcataatcccaatcctttgagagagagatggggcactccaatatctggaattctcaccccaaaacctatggccctggatcccgcacctgccgtgtttgtgggaaccctcatggaatcattaggaagtatggtttgatgtgctgcagacaatgcttccgcagtaatgctaaggaaatcggctttattaagtatcgctgaactgtttcgccgccgactttgcatagggatgttcgcagtgagtgacagg

SEQ ID NO: 739 - DNA, 469 bp, Tamarix hispida
ggggctggcattttcaactaggttttggcgtccataaatatttgccttgcttcttccatcgccgccgagtatgggacactcaaatgtatggaattctcatcccaagaactatggccctggatcccgtacctgccgtgtgtgtggaaactctcacgcaatcatccgcaagtacggactgatgtgctgcagacagtgcttccgtagcaatgccaaagaaattggattcattaagtaccgctaaggagccaagggagatggtcaacaagctgatctgaactcctttttagttattatgtagtttccttaacttggtgactgttgagtactggaactatattatttttcccattttgaaatcctgttgagttatcagagtagttgaaaatgaaatattattatcaaatttcttccaccctgtagtgtacaatctgcttcacgttttcagcaatttaattattgcccatgcttg

SEQ ID NO: 740 - DNA, 387 bp, Tragopogon dubius
agcaatcgcttaagcacatcggctgcggctttcacgacgatctcctctgcctctaaactttgaagattcagtttcaaatggggcattcaaacgtctggaattctcaccctaagacctacggtcctggttcccgcacatgtcgtgtgtgtggaaactcccatggtttgatcaggaaatacggtcttatgtgctgcagacagtgtttccacagcaacgccaaggaaattggcttcattaagtaccgttaaggagttttgaaaggggtttatcagtggatgatatatgatgcccaattgaaagcttgtggtgttttttatatttacagtatctaatttttttaattgatccatttgggataacaatgattgtattcggatgtttaaattt

SEQ ID NO: 741 - DNA, 470 bp, Ambrosia trifida
actcgatatacggcggctgtcagttacattacatagcgatcatctgctgacgatgggtcactcaaacgtttggaactctcaccctaagacctatggtcctggctctcgagcctgccgtgtgtgtgggaattctcatggattgatcaggaagtatggcctgatgtgctgcagacaatgcttccacagcaatgccaaggaaattggtttcatcaagtaccgttaagtagttatgacgaagatgatgatgagtatgatgatgatgtggtaagatatgattatgtagtgaaatgaaatgtctttttctgtctttagtttacgtcttattaatgttcttatgttttggaccttttggtactgaattgatttcgaacatttgttttactgggatttgaattgctcttgcgttaattggctgatatataccgcaaacatttgtttaaaaagaaaaaagtaccgactgcgactctgcg

SEQ ID NO: 742 - DNA, 314 bp, Ambrosia trifida
aaaccctcatcacctacactcgatatacggcggctttcagttacattacatagcgatcatctgttgacgatgggccactcaaacgtctggaactctcaccctaagacctatggtcctggctcacgcgcctgccgtgtgtgtgggaattcccatgggttgatcaggaagtatggcctgatgtgctgcaggcagtgcttccacagcaatgccaaggaaattggtttcatcaagtaccgttaagtagttgtgacgaagatgatgatgatgtggtaagatatgattatgtagtgaaatgaaatggctttttctgtctt

SEQ ID NO: 743 - DNA, 307 bp, Malus domestica
aaagatgggacactcgaacgtatggaactctcaccccaagaactacggccccggttcccgcacttgccgagtgtgtggaaaccctcatgggttgatccggaagtatgcgctgatgtgctgcaggcagtgcttccgcagcaatgccaaggagattggcttcatcaaggaggttagccactactcccttttcgagtcactcatctcgctttcctcagagcgtatggtgcctcgaagagagaccaaactggcggaaagctcttcatattttaccagtaatttgaggagtatcttgatgaatgtgcactag

SEQ ID NO: 744 - DNA, 182 bp, Aquilegia formosa
atgggtcattcgaatgtgtggaactctcatcccaagacttatggtcctggttctcgcacttgccgggtttgtggtaatccccatggtttgattaggaagtacggtctcatgtgctgcaggcagtgctttcggagcaatgccaaggaaattggcttcatcaaggtaccttttttgctttcttt

SEQ ID NO: 745 - DNA, 544 bp, Arabidopsis lyrata
aaataactagggtttacaaatttggttatccctctctcgcgccgcacttgtctcgtcttcttgatctaatcgctttgagctgtgagcagagagcagtcgacgagaatgggtcactccaacgtctggaattctcatcctaagaaatacggtcctggttctcgcttatgccgtgtgtgtggaaactcccatgggctaatcaggaagtatggtctcaattgctgcagacagtgtttccgtagcaacgccaaggaaatcggtttcattaagtaccgttgatgatcgatgtttacacaggagcatcgtgtcttttgggtttttaaactttatgcgttgaactttgtaatcgatttatcgacattgaactaatttgataatgtttttgagctgttgaatctatgcgttactttggtctactattgcttataaatttttcaaatatatttgcttaattgattagaagctatctctatagaatgtaactgaaaattgtttgaacacacccggaagttgtagctgagactcagtggccaagtttcttacaata

SEQ ID NO: 746 - DNA, 452 bp, Arabidopsis lyrata
aacgaaacaaatttctagggtttggaagggcctctctcgtcgccgtttgttattcctctgtgagcaaatcgacgaaatgggtcactccaatgtctggaattctcatccaaagaagtatggccctggatctcgtttatgccgtgtgtgcgggaactcccacgggctgatcaggaagtatggtttgaactgttgcagacagtgtttccgcagcaacgccaaggagatcggattcatcaagtaccgttaatgaagcagcagttcttgattgatgcttatattatgtcgattaattgccgtttgaactttactagtttgttgattttaatgaagaagaaagttttaagttgttgcatttttatttaaagcttatgtcttatttggaacaatgatatttggttttgattaagaatttgcttgttagtatcgatcattttggaataataatcttccga

SEQ ID NO: 747 - DNA, 518 bp, Arabidopsis lyrata
gtcgcttaggaaaattagggttttcaattttgttttagagtgtttgttgaatcgacgccgctggtcctcgtcttctagctttgagctctgaggaatcgaaaattatgggccactctaacgtttggaattctcatcctaaaaaatacggacctggatctcgcttatgccgtgtgtgcggaaactcccatggattaatcaggaagtatggtcttaactgctgtagacagtgtttccgtagcaacgccaaggaaatcggtttcattaagtaccgttaaaagaccaatggtgtttatgaggagcaatcatttggttgggttttttaaactttcaagctttaaaattgtaatggatttgataaatgttgaactatttcgataacgcttttgagctgttgaatcttttagcttcttccttgttttgaacccagtctttgttttgaacccagtctctctttactatttgagatgtgtgttgctattattactctgttgattgtgcttgcttaagaaccatttaac

SEQ ID NO: 748 - DNA, 1533 bp, Arabidopsis thaliana
ggcctacaacctagcccgttagtattattttgttttctttaataaatccgctgttgataaaattaatcttctcctccaacgagactaatatttctagggttttgaagagtctctcgtcgccgtttgtaattcctctgtgagcaaatcgacaaaatgggtcactctaatgtctggaactctcatccgaagaagtacggtcctggatctcgtttatgccgtgtgtgcgggaactcacacgggcttatcaggaagtatggtttgaattgctgcagacagtgtttccgcagtaacgccaaggagatcggattcattaagtaccgttaaagaggcctttgactgatgcttataatacacaaacatgttggtgttgatgaattggccttgaatcttttaagttgttgttgcattcttctttaaagtttatctcttatttggaacaatgatcttttggttttgattaatattttgcttgttaatatagaccattttggcatagaatctctaggttttcttgaagacgtttagacatcagaatccttgaaaatccaaatgtttttattatatggttttgatttcgcaatgtgagctctgccttatgcttcagctgaactacacaatctgataaagaaacctagtactaacatcattatctcacttcgttaattctctaatctaactgtacgttccaaaattttagtttctgtattaccgtaattaaaaattagtttcaaaattttacagtctaaacttgtcaaccatcccttgaagccatcttaagtggtaagttcctcttcgcttctttctaatggcttttcatcttaagtgaaacgaacctttcctagttccattctttgcgctgatccttgtggagcggatatcagagacgtctcgaacttgaaaaagaagctgcctccggagttgatgaaagaaatgggaacgatcaggtcatctcatgactgggtagctacttcaaaggacgatggagttctgcgtctccaagatgacttaaactcggttgcgtcggacagagatccaagacgcagcttgcgacctcatgcctcattgccaaaccaaaattgttaccaacgtattaatgccattatccttaggatggattctgttgtggcgattcaaaacgcagcttggtcatcatttctttgggtggagctggttgtggttgtcaagttcttgggatctcaatttagcattatagatccgctcaaagcaaaaatttcaagtggatcatcatcgcaaacccctgctccttcccctcccgtgtcattagtccaagaaagatgacatgttttgcattcctggatcaagaggtcacttcactagatcatgggatctccacaatctcagcaagaaatcatgttgcagagtttacagttttaaaactttcatgtgccgacaaagactagacgagagcttttgaagtcgtgttgcacaagccaacactcgatggagtcattatcaacttgtgagactttgttggttaagtcagtgatacaaaaagaccaccgtcaagatcat

SEQ ID NO: 749 - DNA, 773 bp, Arabidopsis thaliana
ataaaaactcagcttcttcatcatcgtgactaaatttctagggttttgaagagtctctctcgtcgccgtttgttattcctctgtgagcaaatcgacgaaatgggtcactctaatgtatggaactctcatccgaagaagtacggtcctggatctcgtttatgccgtgtgtgcgggaactcgcacggtctgatccggaagtatggtttgaactgctgcagacagtgtttccgtagcaacgctaaggagattggattcattaagtaccgttaatcaagcaccaacttcatgattgatgcttaatgatataaacatgaaggcgtcgatgggtatggcttttaagcttttgtagtttttgaaatttttacttttgagaaccattgttattttgggagttaattaagttgttgaacctcattaagcatgtcttattttggattaatgatgttttggctattctcgtatttttgttttatcagtcaaatttgactaagaagaatttgcttgttattagctatcacaagagtctaccaaaatcccatttgattaatgcgtctccaatccaagtaaacgagtgtccaatcttcacgggctaattgtagggaaatacacaaactagcccttacaatccatccagctcctatgttttttgatggatgattgcttaaggtatacaagattagttatttacagtcaaaatccatagaatctgtcacaaaatgagatcataattgtagagaggagatattcctcgccgaggtccatgtatgcttctg

SEQ ID NO: 750 - DNA, 771 bp, Arabidopsis thaliana
ttaggtagaaaaatgacaagcttggtatataacgttcaataatataaggaagatgtggcagagttagtgttgagaatgggctagtctacttgtgtttaggcccatatatataaggcccatatatatttgaagaccacaaataactagggtttacaaatttggttatatagctctctctctcgagccgcacatatttcgtcttcttgatctaatcgctttgagctgttagcagagagcagtcgacaatcatgggtcactccaacgtctggaattctcatcctaagaaatacggtcctggttctcgcttatgccgtgtgtgtggaaactcccatgggctaatcaggaagtatggtctcaactgctgcagacagtgtttccgtagcaacgccaaggaaatcggattcattaagtaccgttgatgatcgatgttgttcacacaggagcatcatgtcttttgagttttaaactttgcgttgaacttgtaatcgatttatcgacattgaactaatttgattatgtttttgtgctgttgaatctacaagttactttgttctactattgcttataagtttatcagatatatttgcttaattgattagaagaaatccctattgaatgtaactgaaaattgttaaaactcacctggaagtggtagatgaatgatatgtttcttacagtatttggccactacagattctatcgaattggtggtctctttatatcttcttatgcatgcttgaaattatgttaactttcatcagtagcgtgtac

SEQ ID NO: 751 - DNA, 338 bp, Arnica chamissonis
ttcgtaacgatctttcgcgtctaaagttttgaagcaaaatggggcattcaaatgtatggaactctcatcctaagacctacggccctggttcccgcacctgtcgcgtgtgtgggaattcccatggcttgatcaggaaatatggtcttatgtgctgcaggcagtgcttccacagcaatgccaaggaaattggcttcattaagtatcgctaaggagttgtgaagggacaagggttatcaatgctggactaaatgacccattgaaagctagttttggtgttcttaattgtatttttaattgatttttatgggataacaatgaatgaatgtagttggatctag

SEQ ID NO: 752 - DNA, 361 bp, Brassica juncea
ctaggtttgcattttgctctcgggccgcctctcttctcctttcagagctttgatcgaggagcggctaatctatcatgggtcactctaacgtctggaactctcaccccaaaacctacggccctggctctcgtgcctgccgtgtgtgcggaaacccccatgccatcatcaggaagtacggacttatgtgttgcagacagtgcttccgtagcaatgccaaggaaattggatttatcaagtaccgctgaagaatttaaatggtgtgaagtaggaaggaattcgtccatcatgagccattttagtttggtttttgaattttaatgaacttaatatgatgttctgtttttggttaatttagtgtggc

SEQ ID NO: 753 - DNA, 574 bp, Phaseolus vulgaris
gtaaataaaagaaacagtaattaatagtgaagagtgaccaaaaacgccctagggttttgactctactatatatgtcagaatttgggtccccgtttttcatatttctgtggaacttggaggctagggttttgggatttttgtgatttcatctttgcaaatcagaagcatggggcactccaatgtgtggaactctcatcccaagagctatggacctggttctcgcacctgccgagtctgtgggaaccctcatgggctgattaggaagtatgggcttatgtgctgcaggcagtgtttccgcagcaatgcgaaggaaattggcttcattaagtgtttatcgtccccaaccgttttggagtctgccattagtgatgttattgtggggatgatttcattgtttgaagaattttaagaatttttatggcatttagtcaagttaattatcacactctacagttgttgaactgagaatatttttgttttatataattgttttgagctatcaacatctttctctgtgcccatttataattctgcaattttctatatctacttctttattagttccatgtgtttg

SEQ ID NO: 754 - DNA, 561 bp, Vaccinium corymbosum
acaccattacttctataaattgcaactttgactgaggcggcacttcttggcgattagggttttcaatcagagtctttttcagctgctgtggttgaaaaacttcttctcgtttatcaattcattcagaaaaaagcggacaaagatgggtcactcgaacatctggaacgcgcatccaaagactacggccctggttctcgcacatgtcgcgtgtgtgggaaccctcatggtttgatccgaaagtacgggctgatgtgctgcagacagtgcttccgcagcaatgctaaagaaattggctttattaagtatcgctaaaggattttgctgattctgcaagaaaagagggttttgcccaagaatatgcgggggttttgttttgaacggatctaagaacttttctcattgttttcgtcatgtatctttggctacaaacctttacattacaattaatgtttatcgtctcagtttaatgttgaatttgaattgattgctggaccaagaattcttgtatgaggaatttgctgggttgccatttggttctaatcctctctgttgtgctataat

SEQ ID NO: 755 - DNA, 1443 bp, Theobroma cacao
ggaaaactagggttttggaattcgcctataaaataccatcctattcccactaagcaaaacaactccgcgtcatctaggtttgcattttgctctcgggccgcctctcttctcctttcagagctttgatcgaggagcggctaatctatcatgggtcactctaacgtctggaactctcaccccaaaacctacggccctggctctcgtgcctgccgtgtgtgcggaaacccccatgccatcatcaggaagtacggacttatgtgttgcagacagtgcttccgtagcaatgccaaggaaattggatttatcaagtaccgctgaagaatttaaatggtgtgaagtaggaaggaattcgtccatcatgagccattttagtttggtttttgaattttaatgaacttaatatgatgttctgtttttggttaatttagtgtggccctttaaggctttgttgaactaagaatactttgttggtttttcaatcaagtaatcatactgtttttgtttagtaatctcttaatatctttcttgttagttacctgttcgttgcagtgtgatgatttggttgactatttgtattttatgtgaattttaaatggaattagaggtttaaagttggtagtgtatggatataatgcatcaaaacctgccactgtggatttgatacctgaaaactagaatgtttcataactcattaagctgtatactctagaaattgtggtgtcttatgcaagatattgttgatgctttgggccatcatacaatgcgagcatgagcagtggatgtagttttagtacccattctctcatcaactgcaaggtttcttgtaaaaaaggcaccttcacctgttttatctccattttttttttcattttcaccatgaatacctgaagatcagattctgcccgttgtttgaactattgggtttggagaaagagatgtaaagtgaacgggataggatgtctttgtttttctttgtttaaacgtgtggatctttgtggccaatttaaggaggagattaggctggcaaacattactagtactctaatactggtttaacttttgaccttgttgagtgcgatgtttgaagagagcatgcaaattgagttacaatgatggaattgacaggaagaagtgcctaagtgggcagggcacgccatattcgggatgacactgcaaattcattacgctcggttatgcaaaagtttgctttgcttgactgcctttcgacggtccaagtttctgcaaacgatgattgagtaaattttttccttgtcaaacaaaacttgaggagaacatgtctgccgggcaccatttctagaaaagatgcagcaaaggtgtaaccagttcattgcatgctgagtaaaccttaagtgagcaggcgtagcttggcaatgctttttcaatctggttttaaagaccttgtgcacaccacatgagaagcaa

SEQ ID NO: 756 - DNA, 240 bp, Cannabis sativa
tcttcttcttcttcttcttctgttctcaatccaatcatgggacactctaacgtctggaactctcaccccaagagctatgggcccggttctcgcacctgccgtgtgtgtggaaacccccatggtttgatccgaaagtatggtctcatgtgttgcagacagtgctttcgtagcaatgccaaggagattggcttcattaaggtaacaaagaaaccttttttttttttggattatcaatttaga

SEQ ID NO: 757 - DNA, 303 bp, Cannabis sativa
ccgctctcttcaacctctgctcgagctttcggttcttactcttcttcttcttcttcttcttcttcttcttcttcttcttcttcttctgttctcaatccaatcatgggacactctaacgtctggaactctcaccccaagagctatgggcccggttctcgcacctgccgtgtgtgtggaaacccccatggtttgatccgaaagtatggtctcatgtgttgcagacagtgctttcgtagcaatgccaaggagattggcttcattaaggtaacaaagaaacctttttttttttggattatcaattta

SEQ ID NO: 758 - DNA, 1438 bp, Centaurea maculosa
gtataacaaggcctttttcgtcattttcacgtctaaaccgagacgcctcgccacgtgcaacccataggtaccgtgcaacacgtttcctaatcttatccccctcccatttgttcagccgataaccaaaccctctctctctacaccttacaatgtcaggatcgcagtgctgcgaaaaccctcctgcaccttcctccggtggtgaatccggcgaactccaccagatcgcttccctcaattcatatgtttccgggaatcctgattccaaaatcgcagttcttcttgtttctgatgtttttggttatggagctccaaaattgaggaaacttgcagacaaagttgcatctgctggatattatgtggttgttcctgacttcttccacggcgaccccttgactcctgaagccaagtttgaagattggctcaacattcatccaccgggtccagcggttgattttgccaaaccagttattcaggctctcaaagagaagggtattactaaaattggggctgcaggattctgttggggtgccaaggttgttgtagatctagcaaaagatactgatctacaagttgctgcactcgtgcatccttcttttgtcactttagatgacatcaagggggtgaaggtacctattgcaatactaggagctgagatcgaccaacgatcaccgcccgaagttatcaaacaattcgaggaggctttggaagccaagccagaggtggttgatcagtttgtgaagatttatcctggggttacgcatggttggactgtccgatataaagatgaagatgaagtggctgttaaatgtgcattagaggctcatcaggatcttttggattggtttggtaagcgtcttaagcattagacattccgccctgtaaaaccgaaacctcaaccagtagacattggatatatttcagaaatctcttgtgtgtttattaactaaataaagcgataatggatcgcaccttcgactctatgtataagtgccttgcttacctttatagtcggtacttttttctttttaagcagtgaaatcaacttatggagatagatgacataaactaatgttaaatagattgaaacacaaatgaaaatttcaattaaaaacctaaagatgcatcaacaatcctactacatccattgttatccaaaagagatgaattaagaagacaatgggatactgtaaactgtaaaaacaccacaagctttcaattgggtatatgctccattgataacgcttcaaaactccttaacgatacttaatgaaaccaatttccttggcattgctgtggaagcactgtctgcagcacataagaccatacttcctgatcaagccatgtgaattcccacacacacggcaggtgcgagaaccaggaccgtaggtcttaggatgagagttccatacgtttgaatgccccatctgatctctgatct

SEQ ID NO: 759 - DNA, 487 bp, Centaurea maculosa
accctaaccggcgctaaactcgattcgattgcaggttttttcaaatcgatctctgataatggggcactcaaacgtatggaattcgcatccgaagacctatggccctggttcacgcacctgccgtgtgtgtgggaattcccacggcttgatcaggaaatacggccttatgtgttgcaggcagtgtttccacagcaatgctaaggaaattggtttcattaagtaccgttaaggagttcggaagatctggttggaaaaggatgactatactcgattgaaacgggcttgtagtgtcttttacatttcagtatgtctatgacttattgattgttcttttattaggcatttttgttttgctattggatggttttttgtggagatttagagtatttatgatcaattgttcttaaaaggtattaagaccattccaattttaaacctagcaattatagttgggtatgaaaattatacctcttgagataaaggtaaa

SEQ ID NO: 760 - DNA, 505 bp, Centaurea maculosa
ctccctgtataaatactaattttcgttgcattggccgcgaaccatctcctctgaatctaaaagctttttgaaggatcggatcagaccagatcagatcagagatcagatggggcattcaaacgtatggaactctcatcctaagacctacggtcctggttcccgcacctgtcgtgtgtgtgggaattcccatggcttgatcaggaaatacggtcttatgtgctgcagacagtgcttccacagcaatgccaaggaaattggtttcattaagtatcgttaaggagttttgaagggttatcaatggagcgtatacccaattgaaagcttgtggtgtttttacaatttacagtatctcattgtcttcttaattcatctctttttggataacaatggatgtagtaggattgttgatgcatctttaggtttttaattgaaaatttcatgtgtgttcaatctatttacattagtttatgtcatctatcttcataagttgatatcactgcttaaa

SEQ ID NO: 761 - DNA, 408 bp, Centaurea maculosa
ttctaaagctttatcgcctccatagacgaagaatgggtcactcgaatgtctggaactcccatcccaaaacttacggccctggatctcgtacctgccgggtatgcggtaactcacatgggttgatcagaaagtacgggcttatgtgctgtaggcagtgcttccacagcaacgctaaggaaattggtttcattaagtaccgttaatttgcaccaacgaggggaacagttggaagttagccatcatcaactaaaaaatgatccgaatatcttgtagtatcgttggtaacaatgatttttctcatcttacctttaagacgttttatgattcatgtatgacgatgaaaaattgaaatgctacccttttttgttgcttgattttgcatttgaaataggtaccatctttagtgtc

SEQ ID NO: 762 - DNA, 538 bp, Cichorium intybus
aattagggtttttggttactctcatataaataaagccaccttcgaaccctcacccgcgctagactcgatcaattgcggctttcaaatcgatctgcagatggggcactcaaacgtgtggaattctcaccctaagacctatggccctggttcacggacctgccgtgtgtgtgggaactcccatggcttgatcaggaaatatggtcttatgtgctgcagacagtgttttcacagcaatgctaaggaaattggtttcattaagtatcgataaggagttttgaaggtttgaccaagaagagatgattatatactgattgaaaggggggcttctagtgtgctttttattgattgagcttacttgttttttgacttcttgatttttctctttaaattaggcaattttgttttgatttgaacgttttggtggacatgaaatgaaaatcatttgttcatgaaaatgtacaagcattcaagtaaagggtaattaagggtaattatgtgattggttgattgtctatcaaattggcatctgatggtgtat

SEQ ID NO: 763 - DNA, 779 bp, Cirsium arvense
gggttttgacagagctccctgtataaatactaattttcgtggcattggccgcggctttcacaaccatcacctctgaatctaaaagcatcagattcagatcagagatcagatggggcattcaaacgtatggaactctcatcctaagacctacggtcctggttcccgcacctgccgtgtgtgtgggaattcccatggcttgatcaggaaatacggtcttatgtgctgcagacagtgcttccacagcaatgccaaggaaattggtttcattaagtatcgttaaggagttttgaagggttatcaatggagcatatacccaattgaaagcttgtggtgtttttacaatttacagtatctcattgtcttcttaattcatctctttcggataacaatggatgtagtaggattgtcgatgcatctttaggtttttaattgaaaattttcatttgtgtttcaatctatttacattagtttatgtcatctatctccataagttgatatcactgcttaaagttgacatgaatccttgaaaattgagtactttgaattctttgaggctttgcacatgaaccctgttagttaggtaagggcaggttatgtggttgttattttaggaaaagtcaaatgatacatagtcaacttctactcaatgcttacagttcaaatgtcattatcctcatcatttactgtatgcttcactttttgggtggttttgctttccgcacacatgggtaatacctaaaactaggagtgagaccaacctaaaaccaggttgggtttgt

SEQ ID NO: 764 - DNA, 681 bp, Cirsium arvense
tcctcacagaaattggctgcgcctttcacaatctgcatctaaaaagttttgaagaaatggggcattcaaacgtctggaactctcatcctaagacctacggtcctggttcccgcacctgtcgtgtgtgtgggaattctcatggcttaatcaggaaatatggccttatgtgctgcagacagtgtttccacagcaatgccaaggaaattggcttcattaagtatcgctaaggagttttgaagggttactagtagagagcttatatacccaattgaaatcttgtggtgtttttacaattaaagtatccgattgtcttattaattcagccgttttggataacaatggatgtagttggattgttaatccatctttaggtttttaattcaaaatttcatgtgaacatcatagaccttttcaatctagtcgcagtcggtacttttttctttttggtcttaaatgtgattttcaatataaagcgaccaccaaaactattaagagttataacaagttccaacaagatagataaccctaagcaaaaactatttcaaaatatacgctaattaacaccttatcatatatgtcctaacaaaaactacaaaataattacaaatgaaaaatcggaaaaaaacggagtcgattgcgatcaatcagtaataggaagaaaaaaaagacaaaaaggaactc

SEQ ID NO: 765 - DNA, 332 bp, Cirsium arvense
aatgggtcactcgaacgtctggaactctcatcccaaaacttacggccctggatctcgtacctgccgggtatgcggtaactcacatgggttgatcagaaagtacgggcttatgtgctgtaggcagtgcttccacagcaacgccaaggaaattggtttcattaagtaccgttaatttgcaccaatgaggggaacagttgaagttagccatcttcatttaaaaatgatccggatatcgtgtagtattgttggtaacaatcagttttgtcatctttacttttaagacggtttatgattcatgtatgacgatgacaaattgaattgctaatttgcta

SEQ ID NO: 766 - DNA, 365 bp, Trifolium pratense
actacgaacaattcttcatcggcggcgcgtttggtctcaccggcgaaaatctaatcaaagcaaagcaataagccatgggacactctaacgtctggaactctcaccccaagacctatggtcctggttctcgcacttgccgtgtgtgcggtaattcacatggattgatcaggaagtacggccttatgtgctgcaggcaatgcttccacagcaatgccaaggaaattggtttcattaagtaccgctgaagagctattgtctctgccgagccaatgttaggttttggcattagaatgctgtgaagatgttttgtttgaagaaactttatttagataaaatgtttgaagacacttgataattgctttttt

SEQ ID NO: 767 - DNA, 796 bp, Trifolium pratense
ctgaaattgagaattaaagcttagggttttgaccagccatcctagtatataataagttgggaaatacatatagatgtccgtctgttgatcatttgttttgtgcgactgcgtgagggggggggggggggggggggggggggggggggggggggggggggggggggggggggggggggggggggggggggggggggggggggggggatttggtgcaaaattcgaaatcgaaagcaatcaagcaagcatgggtcactccaatgtctggaattctcaccctaagacctacggacctggttctcgcacctgccgtgtgtgtggaaactcacatggattgatcaggaagtacggactcatgtgctgcaggcagtgcttccatagcaatgccaaggagattggcttcattaagtatcgttgaaaagctctgagtccttttcgggggttgcagaatcatatgccagcaggatgattttagtttttgatgaacttgtaatttttggctttttgttaatcgactactcagttatcaaacttgagttgtgagactaaacacatatttactttctacttagctgatgacattttctctttattcatcactggagttataaattaaatgttggcatctatttgtctggtatctgttttatgatgtgaatggaaataatctgccttgcataaagtttaactagatttttagcatagtttacaatttacaatttgtaaacttgaaaatgatgccatttgtaaagattaaaaagattgggacacccactctcctgataacctatcatctggt

SEQ ID NO: 768 - DNA, 772 bp, Trifolium pratense
acaattcttcatcggcggcgcgtttaggtctctccggcgaaaatcaaatcaaccaaagcaataagccatgggacactctaacgtctggaactctcaccccaagacctatggtcctggttctcgcacttgccgtgtgtgcggtaattcacatggattgatcaggaagtatggccttatgtgctgcaggcaatgcttccacagcaatgccaaggaaattggtttcattaagtaccgctgaagagctattgtatctgccgaaccaatgttaggttttggcattagaatgttgtgatgtgaggtggttttgtttgaagtaactttatttagacaaattgtttgaagaaactttattttgcatctagtttatttttcagaccttatgttgttgaatcaagattgagaatccttttatatatattgctttttacttctgacttccctgtttgtgatggtatattcggttataaagttttaattgatttcattgttaagtaaaatttaaggtataataacgatctcattgcatgcatcctgtatggctggctgtatatggtcccccatgtttaacaaagaaattcaagtataacactttagttctatagtaatgagctataattggttattttaacaaattcattcgggcgtttgttctcataccatcccaatttggtatcctgctccccattttgaaattaattatcttcataagcttgacttaaaactgcataataaagttgacttaaatttgcattgtatttgtataagctatttt

SEQ ID NO: 769 - DNA, 453 bp, Trifolium pratense
actacgaacaattcttcatcggcggcgcgtttggtctcaccggcgaaaatctaatcaaagcaaagcaataagccatgggacactctaacgtctggaactctcaccccaagacctatggtcctggttctcgcacttgccgtgtgtgcggtaattcacatggattgatcaggaagtacggccttatgtgctgcaggcaatgcttccacagcaacgccaaggaaattggtttcattaagtaccgctgaagagctattgtctaagccgacgcaatgttaggtgttggcattagaatgttgtgaggtggttttgtttgaagtaactttatttagacaatatgtttgaagaaacttgataattgttttttgcatctagtttatttgtcagaccttatgttgttgaattaagattgagaatccttttatatatatattgctttatacttctcacttccct

SEQ ID NO: 770 - DNA, 525 bp, Gossypium hirsutum
aaagctgggactgcgcgcctgcagtcgacactatggcaccaaacaattcgcacgagtcaattccaggctcatttctctcgcattttcagagcaatcatgggtcactctaacgtctggaactctcaccccaaaacctacggccctggatctcgcgcctgccgtgtttgtggaaatccccatgccatcatcaggaagtacggtctcatgtgttgcaggcagtgcttccgtagcaatgccaaggaaatcggattcatcaagtaccgttgaagaattttgtatggtgtaaagtaggaaggactttgtccctctatgagccttttgtactatgttcttatttttattttttttgaatttgaaagaacaagatgctgttttgttttggtgaattactaaagtgattgttgaactaagaatactttgtggttcctcaatgaagtaatcatactggtttaatttggtattttctttattgttaagtgtgcttattgatagtcattgcaatgtgatgatcttcttgtttattgg

SEQ ID NO: 771 - DNA, 509 bp, Gossypium hirsutum
gcggagcctgcctactcttactttttttcagagctttgatcgaggagtagcagctcacctaatccatcatgggtcactctaatgtctggaactctcaccccaaaacctacggccctggctctcgctcctgccgtgtgtgcgggaacccccacgccatcatcaggaaatatggactcatgtgttgcaggcagtgcttccgtagcaatgccaaggaaattggattcattaagtaccgctgaagaatttatgttgggaagaactttgtcagagtatgagcctttggtaatgtgattattgaattagaaggataatttttattgttttcagtctggacatctaaagtggtgttgaactaaggatgctttgttgtttctcaatcaagtaatcatagtgtttattttttttaaattatttcgtaatttctttatgatcaagaaaagatgcaacagaagtgcaacattgagtaaacaattaggcagcttagcgcttattaagtatacttaaaagtt

SEQ ID NO: 772 - DNA, 546 bp, Gossypium hirsutum
tttggcttcttgcagagcctccattgacgagcagctaaatcaacaatgggtcactctaacgtatggaactctcacccgaaaacctacggccctggatctcgctcctgccgtgtgtgcggcaacccccatgccattattaggaagtatgggctcatgtgttgcagacagtgcttccgtagcaatgccaaggaaatcggattcatcaagtaccgctgaagaatttatatggtctgaattaggaaggactttgtttaagcacgaatcattggtgtggagttttctaatttatcggtactagaagacaacgttttggtttttggttaatttagtatgaacttgaactaaaaatactttctcctttctcaatcaagtaatcatattgttaactttctttgcagtgtgatggtcctgttaattttttggcatttcatgttattttattttgggttaaaataagctacaagtccctgtactcttcacaaatttagaatctaggcactgtatttttattttcgagaatctaatacctttactttttagatttgt

SEQ ID NO: 773 - DNA, 877 bp, Gossypium hirsutum
caagttcctaggttttcaataagctctaaagcctccttttgcctttcagagctttgatcgatcatgggtcactcaaacgtctggaattctcaccctaagacctacgggcctggctctcgcgcctgtcgcgtgtgtggaaacccccatgccatcataaggaagtatgggctcatgtgttgcagacagtgcttccgtagcaatgccaaggaaattggattcattaagtaccgttgaagaatttatatggtgtgaagtaggaaaggaatttgtccaagtatgagctattgtagtaaggttttggaattcaaagaaaaacttctaagaaaatgtttttgttgaatctattatgggacattgaagtgtcttacaaggagtacattgttgtttttcaatgaaaggttaatgctagcttgctattaatttgtctatgtaatgtgatggtcctgtttgatttacagcatttcatgtgttaatataaatggaattagaggttgagtcttttatacatttgaaacctgggggcaaagcttttgtccacattcacatttgattcttgttatttagtattatgtcttgtttattatgctccaaggactggttgtacgtggattcaatgcatcttccaatgtagttctggtgtttgaaatatgctttgttccatttttgtttctgttgttgtttttggggttcaaacttgtatattggattttgcttttttatatacttcaattaaggcttttcattttcattgatttggggaaaaaaaaaggaatgaatgcagatttgagtttaatataatcggtaatgcttttcattttgcttcctaaagtgtcttaggagacttgtcattgtttggctggataaccagtatactgcc

SEQ ID NO: 774 - DNA, 450 bp, Gossypium hirsutum
ccttctttcagagcttccattgacgagcagctaaatcaacaatgggtcactctaacgtatggaactctcacccgaaaacctacggccctggatctcgcgcctgccgtgtgtgcggcaacccccatgccattattaggaagtatgggctcatgtgttgcagacagtgcttccgtagcaatgccaaggaaatcggattcatcaagtaccgctgaagaatttatatggtctgaattaggaaggactttgtttaagcacgaatcattggtgtggagttttctaatttatcgtgtgatggtcctgttaattttttggcgtttcatgttattttattttgggttaaaataagctacaagtccctgtactcgtcacaaatttaaaatctaggcactgtatttttattttcgagaatccaatacgtctactttttagatttgggaattcagatgtact

SEQ ID NO: 775 - DNA, 633 bp, Cyclamen graecum
tcacaggcatcgcctcatttcgaatctctctcaattcctctctgggcgagaaagagaaaggagaaagatgggtcatgccaacatatggaattctcatcctaagagctatggccctggttcccgcacttgccgggtttgcgggaatcctcatggtttgatcaggaagtatggcctcatgtgttgtaggcagtgcttccgcagcaatgccaaggaaattggattcatcaagtatcgctagatggataaagctagaagcagagtggagcaacacatttcagcagcatgtttctctagtaggaattactctgaaatatgttgaggaccagtcttgcggaaaaaactgatggagacatgttttttattttatttgtctgttttcgtgcatttgttacttggaattttctggataatgtaatgtcggttttcagtgtgggaacttattgcaacttccaaattgcagtatccttttgaaattcaggataataggattgcgatgctagtgtttgttttagtttattgactaaaatttcaagacacgattttgggattactagtgatatgaatgtctaaattctcatcaaaaaaaaaaaaaccccacaaaaaaaaaaaaaaaaaaaatacaaacggaaacct

SEQ ID NO: 776 - DNA, 510 bp, Cyclamen graecum
ctctctctgtatccgtgtttctctctctaggaaaggaagagcaggaagaagaagaagtatggggcacgccaacatatggaactctcatcccaagagctatggccctggttcccgtacctgccgggtgtgcgggaatcctcatggattgatcaggaaatatggcctcatgtgttgcaggcagtgcttccgcagcaacgccaaggaaattggattcatcaagtaccgctaaatggttaaagctaggtgccaagtggagcaacacatttcagcagcatgtttttcattattactgtttcatgtattttgataatttgaattttccggataatgtaatgttgattttgggtgttcccaagttgttgcaattccaaattgcaatgaccttagaactctggagagaaagtattgcattgctggtgtttgttttggtttcttgactaatttcaagactggattttgggatttagtagtaattactctttttagtgtggatgtctctattctcgtcat

SEQ ID NO: 777 - DNA, 516 bp, Distylium racemosum
tttgaatttgatccgagcagaagacagatcgagaattcttctgccccgaattatcttcgaagatgggtcacactaacgtctggaactcccaccccaagacctatgggcctggctcccgttcctgtcgggtgtgtgggaacccccatggtctcattcggaagtatggtctgatgtgctgtcggcagtgcttccgcagctatgccaaagacattggctttgtcaagtaccgctaagagagtatcagcatattaaaggtgcctggaggtttgcaactaggacttcagcatcagtggcaggaatacgatggagaattagttttttttggaatagtctccaatatacttttttggcagatctattgattgttagatgggatattgttgtaaggagaaattggcaaactcaatatggatttaacgatgttttctttattgtttttttgaaagctagaagtgcatttttgttctattggagtgcattgtatgcttgcaacagttatttaatatttaatgaatc

SEQ ID NO: 778 - DNA, 542 bp, Eucalyptus grandis
gtctcttccggctgcaaagtccgaggtattcaaacgccggttgaacgaactagggttttacagggcgggaagggagaaaggaatgggggcactcgaacgtgtcgaactcgcatccgaagaactacggtcccggctctcgcgcttgtcgagtgtgtgggaaccctcatggtttgatcaggaagtacgggctgatgtgctgccggcagtgcttccgcagcaacgctaaggaaatcggtttcatcaagtgccggtgatggctcggtggagatgaataaaaatcttctgatgtcttgcttgaggagtagcccttgcagcagccagctggtttcctcatgtgtggaagggctctgaactaagagttacctgtcttatagtcgggtagtcggggatagtaatcatctgacatttgagctaattatagaacgttaactacattcttttgtttcttgcatcggtacttaccttttggtctatttaaggtcatgtttgtggtcatgattttggctgcggtctggcttaatgaatgccttctgtgagaaagc

SEQ ID NO: 779 - DNA, 464 bp, Euonymus alatus
cgcctttctttcaactgcaggggaaggcaattagggttttgagctcctcgaggaagtctggtatctgtggcgcagccaattagggttctcgtttccgtctttcgaacagcgaaaaatcaacaatgggtcacgcaaatgtttggaattcgcatcctaagaactacggtcctggttctcgtgcctgccgtgtgtgcggaaaccctcatgcaataattcggaagtatgggctgatgtgttgcagacagtgcttccgcagcaacgccaaggaaattggcttcattaagtaccgctgaatgatgagaggaaatcttcgttggtcggagttttcgtctaaaagtgtggtcggaggagccgtttttttcttttttcccaatgttaccttcttcattccaccactgatgtgatccaccttatctaaattatgccaacccatttgaacctgataaaatagtagttgtttggag

SEQ ID NO: 780 - DNA, 590 bp, Euonymus alatus
gtgccttaaatattccttcctggttcctgcaaatccacactgcgattactagggtttccaaacgagcgcagctcccagagttgacagaagagcgagcgagcgagctatgggccacgccaacgtgtggaactctcatcccaagaactatggccctggatctcgtgcctgtcgtgtgtgcgggaatccccatgcgatcattcggaagtatggcctcatgtgttgcaggcaatgcttccgtagcaatgccaaggaaattggcttcattaagtaccgctaaaggagatttgccgttcccactagtgtggaagaattggctggagaacaatcatggcaatggtttttatttctgaaagatttttaagatgctgtcttttgttaatgataagttgttgaacttgaattgatcaaatggattgaaaactttttgaagtgtccaagttgggtactgctgatcccctgttcttctacaattttttcttttctaatgtattagtcattgtccacttcatttgaattggtttcatcacaatatcacattgccaaataagagtactacgattccacaacctaggaaaggttggaggttggtt

SEQ ID NO: 781 - DNA, 554 bp, Euonymus alatus
cgcactgcaatttctagggttttcagaagaactcggcagcccccaagtcccaactccaacattcgaaagaagcaaacgcgcgagcgagcgagcgagcaggctatggggcacgctaacgtgtggaattctcatcccaagaactatggccctggatctcgtgcctgtcgtgtgtgtgggaacaaccatgggatcattcggaagtacggccttatgtgttgccgacagtgcttccgcagtaatgccaaggagattggcttcattaagtaccgctaaagtagttctgcctatgccactagcacggaagaattggctgcataccagttgtggcaattgtttttgttctgaatgaatcataatgatgcttttttttgtttgttgatgatacattgttgaacttgaattgatcagaggatcaaaaaattttggagtgtctaatgcagtatacgtttgtcctcatggaaagatacttgagatcactaaattagacacccattttatccccaaattcatgggtagtgttggatgttaatgaagctctatgtatgtttatgaat

SEQ ID NO: 782 - DNA, 538 bp, Euonymus alatus
actgcaatttctagggttttcagaagaactccgcagcccccaagtcccaactccaacattcgaaagaagcaagcgagcgagcgagcaggcaagctatggggcacgctaacgtgtggaattctcatcccaagaactatggccctggatctcgtgcctgtcgtgtgtgtgggaacaaccatgggatcattcggaagtacggccttatgtgttgccgacagtgcttccgcagtaatgccaaggagattggcttcatcaagtaccgctaaagtagttctgcctatgccactagcatggaagaattggctgcataccagttgtggcaattgtttttgttctgaatgaatcataaagatgcttctttttgtttgttgatgatacattgttgaacttgaattatcagaggatcaaaaactttttggagtgtctaatgcagtatacgtttgtcctcatgggagatacttgagatcaccaaattagacacccattttatccccaaattcatgggtagtgttggatgttaatgaagctctatgtatgt

SEQ ID NO: 783 - DNA, 437 bp, Euonymus alatus
cggccgggggacactgcaattactagggtttccaaacgagcgcagctagtccgcagctcccagagttgacagaagagcgagcgagcgagcaagctatgggccacgccaacgtgtggaactctcatcccaagaactatggccctggatctcgtgcctgtcgtgtgtgcgggaatccccatgcgatcattcggaagtatggcctcatgtgttgcaggcaatgcttccgtagcaatgccaaggaaattggcttcattaagtaccgctaaaggagatttgcctttcccactagtgtggaagaattggctggagaacaatcatggcaattgtttttatttctgaaagatttttaagatgctgtcttttgttaatgataaattgttgaacttgaattgatcaaatggattgaaaactttttggagtgtccatgttgggtacta

SEQ ID NO: 784 - DNA, 517 bp, Euonymus alatus
gggttttgactctgccttaaatattccttcctggttcctgcaaatccacactgcgatcattagggtttccaaacgagcgcagctcccagagttgacagaagagcgagcgagcgagcaagcaagctatgggccacgccaacgtgtggaactctcatcccaagaactatggccctggatctcgtgcctgtcgtgtgtgcgggaacccccatgcgatcattcggaagtacggcctcatgtgttgcaggcaatgcttccgtagcaatgccaaggaaattggcttcattaagtaccgctaaaggagatttgcttttcccactagtgtggaagaattggctggagaacaatcatagcaattgtttttgtttctgaaagatttttaagatgttgtcttctgttaatgataaattgttgaacttgaattgatcaaatggattgaaaactttttggagtgtccatgttgggtactactgatcccctgttcttctacaattttttcttttctaatgtatttgtcatt

SEQ ID NO: 785 - DNA, 457 bp, Euonymus alatus
cggccggaggggaaggcaattagggttttgagctcctcgaggaagtctggtctctgtggcgcagccaattagggttctcgtttccgtctttcgaacagcgaaaaatcaacaatgggtcacgcaaatgtttggaattcgcatcctaagaactacggtcctggttctcgtgcctgccgtgtgtgcggaaaccctcatgcgataattcggaagtatgggctgatgtgttgcagacagtgcttccgcagcaacgccaaggaaattggcttcattaagtaccgctgaatgattagaggaaatctttgttggtcggagttttcgtctaaaagtgtggtcggaggagctgtttttttctttttgcccaatgttacctttttcattccaccactgatgtgatccacttgatctaaattttgccaacccatttgaacctgataaaatagtagttgtttggagtatg

SEQ ID NO: 786 - DNA, 430 bp, Euphorbia peplus
agcgattcgtaaagatggggcattcaaaagtctggaattctcatcctaaaaactacggtcccggttctcgtgcttgccgggtgtgtggaaatcctcatgggattataaggaacatatggactgatgtgctgcaggcagtgcttccgcagcaatgccaaggaaattggattcatcaagtatcgttaaatatgtgatgagcttctgggctgtttcgggtatgaagtggagaagcatagtcctctgttttattatcgggttgtcagttttataatgatggattttagaaattctgattatattgctagctgtttaaaaatattgagccaaataactaatttgagtaagaattttatttgtactggttccttttaacattcattttttttagtataaatgggttgcagtgaagaaaggttaaggagtggctgtt

SEQ ID NO: 787 - DNA, 459 bp, Flaveria ramosissima
cggcgctgaattcgatctactgcggctttctgtttcatatcaatctgccattgatgggtcactctaacgtctggaattctcacccaaagacttatgggcctggttcacgcgcctgccgggtgtgtgggaactctcatgggttgattaggaagtacggtcttatgtgctgcagacagtgtttccacagcaatgctaaggaaattggtttcattaagtatcgttaaggagttgtgacggagatgatgatgatgatataagatgatgatgaattgaaatgcattctagtatgtgtttttgctttttagtatgtctatgacttgtttaatgttatctttgttttggtactgaattgtttctgatggaaatttagaccagtttttgaaattaaagacttcaatatgaatgaagttgatatatattaaccaaaaaaaaaaacaacctgcggcgcgcgagagcccc

SEQ ID NO: 788 - DNA, 314 bp, Flaveria ramosissima
tcagcgtgcaaattctagggttttgaaatcatcgcgtttcggtgctcatcgcctccttcagcagacgaagaatgggtcactcgaacgtctggaactcgcatcccaaaacctacggcccgggttctcgtgcttgccgtgtatgtggtaactcacatggacttatcaggaagtacgggcttatgtgctgcaggcaatgcttccacagtaatgcaaaggagattggtttcatcaagtatcgttgattttcaccagcaacagaagatgagttcgtgtttgcattattaatgccaattggttttcatcttttgatttta

SEQ ID NO: 789 - DNA, 466 bp, Flaveria ramosissima
ctagggttttgaattcatcgcgtttcggtggtcatcgcctccttcaacagacgaagaatgggtcactcgaacgtctggaactcgcatcccaaaacctacggcccgggttctcgtgcttgccgtgtatgtggtaactcacatggacttatcaggaagtacgggcttatgtgctgcaggcaatgcttccacagtaatgcaaaggagattggtttcatcaagtatcgttgattttcaccggcaacagaagatgagttcgtgttagcattattaatgccaatcggtttttcatcttttgatttttaagatattgtttatgatatatgtatgacagactgaaagtgtttactggatttgttacttgtttctgcacttaaatctagacttgttttgacatctgctgattccaacttttatgttatcttcttattgcgttaattatgccctagtggttttaatatgcaaaaaa

SEQ ID NO: 790 - DNA, 401 bp, Flaveria ramosissima
cgagtttcagagctcatcgcctacactgcataccaacgtcgaagaagaagaagaagaataatgggtcactccaacgtctggaactcacaccccaaaacttatggacctggttcccgtgcttgccgggtgtgtggtaactcgcatggcctaatcaggaagtatgggcttatgtgctgcaggcaatgctttcacagcaatgcaaaggagattggatttatcaagtatcgttgatttgcacctccgaaggagatcagttggagttggcagtatgacaaaagaaagatgatttcaagtatcttgttagctattactgaataaacaaattagttttcttgttttttggttacaagtattattgtttatgtatttatgtatggacagtattgaatgtacttacttac

SEQ ID NO: 791 - DNA, 403 bp, Flaveria ramosissima
aacggcgctgaattcgatcgactgcggcttttctgattcaaatcgatctaccattgatggggcactcaaacgtctggaattctcatccaaagacttatgggcctggttcacgcgcctgccgggtgtgtgggaactctcatgggttgatcaggaagtatggtcttatgtgctgcagacagtgtttccacagcaatgctaaggaaatcggtttcattaagtatcgttaaggagttgtgatggagatgatgatgatgatataagatgatgatgaattgaaatggattctagtatgtgtttttgctttttagtatgtctatgactttttaatgttatcttgttttggtactgaatggtttctgatggatgtttagaccagttgttctcgaaattaaagactttatta

SEQ ID NO: 792 - DNA, 377 bp, Flaveria ramosissima
cggcgctgaactcgatcgactgcggctttctgattcataacgatctgccattgatgggtcactcaaacgtctggaattctcaccccaagacttatgggcctggctcacgcgcctgccgtgtgtgtgggaactctcatgggttgatcaggaagtatggtcttatgtgctgcagacagtgtttccacagcaatgctaaggaaattggtttcattaagtatcgttaaggagttgcgaaggagatgatgatgatgatgatataagatgatgatgaattgaaatggattctagtatgtgtttttgcttattagtatgtctatgacttatttaatgttatctcgttttggtactgaatgatttctgatggaaatttagaccta

SEQ ID NO: 793 - DNA, 412 bp, Flaveria ramosissima
ctagggttttgaaatcatcgcgtttcggtgatcatcgcctccttcaacagacgaagaatgggtcactcgaacgtctggaactcgcatcccaaaacctacggcccgggttctcgtgcttgccgtgtatgtggtaactcacatggacttatcaggaagtacgggcttatgtgctgcaggcaatgcttccacagtaatgcaaaggagattggtttcatcaagtatcgttgattttcaccacaacagaagatgagtttgtcttagcataattaatgccaatcggttttcatcttttgattttaagatattgtttatgataaaatgatatatgtatgacagactacaagttgtttactggttttgttacttgtttctgctacttaaatctagacatgttttgacatctgctgattcc

SEQ ID NO: 794 - DNA, 318 bp, Flaveria ramosissima
cgctgaactcgatcgactgcggctctctgtttcatatcgatctaccatcgatgggtcactcaaacgtctggaattctcacccaaagacttatggacctggttcacgcgcatgtcgtgtttgtgggaactctcatgggttgattaggaagtatggtcttatgtgctgcagacagtgtttccacagcaatgctaaggaaattggtttcattaagtatcgttaaggagttgtgaaagagatgatgatgatgatataagatgatgatgaattgaaatggattctagtatgtgtttttgcttcttagtatgtctatgactttg

SEQ ID NO: 795 - DNA, 342 bp, Flaveria ramosissima
cggcgctgaattcgatctactgcggctttctgtttcatatcaatctgccatcgatgggtcactctaacgtctggaattctcacccaaagacttatgggcctggttcacgcgcctgccgggtgtgtgggaactctcatgggttgattaggaagtacggtcttatgtgctgcagacagtgtttccacagcaatgctaaggaaattggtttcattaagtatcgttaaggagttgtgacggagatgatgatgatgatataagatgatgatgaattgaaatgcattctagtatgttgtttttgctttttagtatgtctatgtacttggttaatgttatcttttgttt

SEQ ID NO: 796 - DNA, 400 bp, Flaveria ramosissima
aacggcgctgaattcgatcgactgcggctttctgattcaaatcaatccaccatcgatggggcactcaaacgtctggaattctcaccccaagacttatgggcctggttcacgcgcctgccgggtgtgtgggaactctcatgggttgattaggaagtatggtcttatgtgctgcagacagtgtttccacagcaatgctaaggaaattggtttcattaagtatcgttaaggagttgtgacggagatgatgatgatgatgatataagatgatgatgaattgaaatggattctagtatgtgtttttgctttttagtatgtctatgactttgtttaaggttatctttgttttggtactgaaatggtttctgtatggtaaatttagacctagtttcttagaaattaa

SEQ ID NO: 797 - DNA, 453 bp, Fraxinus spp
aatttattctgcaattacggttgctcatcatacaatcggcttttcttttgcgctgaaagaggaagatggggcactctaacatctggaactctcaccccaagacctacgggcctggttcccgcacctgtcgtgtatgcgggaacccccatggaataattaggaagtatgggctcatgtgctgcagacagtgcttccggagcaatgccaaggaaattggctttatcaagtatcgttaaagctgtgcatgtctgaatttctgccagtggacggagggctttccttggtgggatgggatctcttcaggcatccttttttatttatcttcttttctttaaaagggttgtaatgggagattgttctagtttgagatagaactcaatttggttcttcaactggcttaatcttttttatttgatgaatcaagaaattgtttatgcagcagttttgttcaac

SEQ ID NO: 798 - DNA, 477 bp, Fraxinus spp
tagtctacgagcggccggggctcaaacctacaatttattccgcaattagggttcctcttcctcgtacatacaatcggtttttcttttgcgctgaaagatggggcactctaacatctggaactctcaccccaagacctacgggcctggttcccgcacctgtcgtgtatgcgggaatccccatggaattattaggaagtatgggctcatgtgctgcagacagtgcttccgtagcaatgccaaggaaattggctttatcaagtatcgttgagctgctgtgaatgtctgaatttctgccagtgggaggagggctttccccagtgtaatgcttttggatctctacgggcgttatttatcttggccttttgtttaaagaatgggtttaatgagaaagactattctagtttgagagagaactcaatttgtttgttcaactcgttttatttatttctattggcgaatcatgaaattgtttattca

SEQ ID NO: 799 - DNA, 416 bp, Fraxinus spp
ttaggttttttcacttgcaaaccctagtagcctttctttcagcagaagaggaagaatggggcactccaacatctggaattctcatcccaaaacctacggccctggctcccgcacttgccgtgtttgtgggaacccccatggtataattcgaaagtatgggctcatgtgctgcagacaatgctttcgcagcaatgctaaagaaataggcttcatcaagtatcgctaagcagtcgagccaagttttgtattaagaggaagatatttcttaatagaatgctttcaactatttcagatttacctttttaaatcatctcatctcttcgctctgaaaatggatgtattgagaatgattattccaagtttatgattgaactcgaagtgatatttgaatagacaaattatatttgcttatttcc

SEQ ID NO: 800 - DNA, 502 bp, Fraxinus spp
gacgctgctcatataaatacgtttcacaatttgtgcggaaacctccactgttctccggaattaggctttttcacttgcagaccctaccggcctttggttcagcagaagaagaagatgggacactccaacatctggaattctcaccccaagacctacggccctggctcccgcacctgccgtgtgtgtgggaacccccatggtataattagaaagtatgggctcatgtgctgcagacaatgctttcgcagcaatgccaaggaataggcttcatcaagtatcgctaaacaggcaagccaagatttctacaggaggaagatttttcttatgtgatgcttttaaccatttcagagtgaactctcttatcccgtcttctttcagacaatggatgtattgagaataagctaataatttaacttgaaattttatgtgaacaacaaattatatttgcttattttattgttgttcccattgcttctctgcattcacatggtattctactttg

SEQ ID NO: 801 - DNA, 399 bp, Zingiber officinale
gcacgaggtttggttgttctgcttttcgattcgaggaagatctgccggagagaagatggggcactcaaacatctggaactcgcatcccaagaactatggacctggatctcggctatgccgtgtttgtgggaacccacatgcaataatcaggaagtatggtctcatgtgttgcagacagtgcttccgcagcaacgccaaagaaattggctttattaagtatcgctgaaggtggaagggtctcaacgatgaagagttttcattataaaactactatgcgctagaagattttagtttggatttgtttttacatgtttcttcccaagactagaaactttgtctgaaagaactgtggctaagcaatgttttaagcagtattttggttttaatgaattgattttc

SEQ ID NO: 802 - DNA, 640 bp, Gnetum gnemon
gtctatataaagtataaactaggtttttaactaaaccctaattcgccagagacaataccagactctgcgacggcgtcgagctattccttgctagcgagcagcgattcagcgcgtatctccggtgagaaaagagttttcggtgttttcttgcgagatgggtcatactacagtgtggaattctcaccctaagacttacggcccgggttccagggcatgccgcgtttgcgggaatccgcatggattgatcaggaaatacgggctgatgtgctgcagacagtgcttccgtagctatgccaaggatatcggatttatcaagtaccgctaaagatggtgtaactgttctggagatgaatgacatttcatagatatgatctgtttaagaatgctaggccgaattttattttattcgaagtacatttgtcaacctgacttttgttttgtccaaaggacatgaatttagttacagttttgctagtgcttagatgttaaattggtggtcgctaatttgtgtattccagaattttaacattgcttgtcagaaattttaaacccaatatagggtcgtgatgcttaaatgatgatgaaattggtttaatcatttttcgagtttgtttctgatcgagcaaaatcattgattatt

SEQ ID NO: 803 - DNA, 995 bp, Gossypium raimondii
tggaacccatctataaataccttgttttcccacaattttaactccatcgtcaagttcctaggtttccactaagctctaaagcctccttttgcctttcagagctttgatcgatcatgggtcactcaaacgtctggaattctcaccctaagacctacgggcctggctctcgcgcctgtcgcgtgtgtggaaacccccatgccatcataaggaagtatgggctcatgtgttgcagacagtgcttccgtagcaatgccaaggaaattggattcattaagtaccgttgaagaatttatatggtgtgaagtaggaaagggctttgtccaagtatgagctattgtagtaaggttttggaattcaaagaaaaacttctaagataatgtttttgttgaatctattatgggacattaaagtgtcttaccaggagtgcattattgtttttcaatgaaaggttaatgctagcttgctattaatttgtctatgcaatgtgatggtcctgtttgatttacagcatttcatgtgttactataaatggaattagaggttgagtcttttatacatttgaaacctgggggcaaagcttttgtctcacagtcacatttgattcttgttatttagtattatgtcttgtttattatgctccaaggactggttgtacatggattcaatgcatattccaatgtagttctagtgtttgaaatatgctttgttccatttttgtttctgttgttgttttggggttcaaacttgtatatttgatttttctttttatatacttcaattaatgcttttcattttcattgatttgggaaaaaaaaggaatgaatgcagattgagtttatataatcggtatgcttttcattttgcttcctaagtgtcttaggagacttgtcattgtttggctggataaccagtatactgccatatacaagtatggtttgtataggctatatcatggcaagcatcattttgtaaataaagctttgtttttattatta

SEQ ID NO: 804 - DNA, 903 bp, Gossypium raimondii
ccccgcttaattcggaaactagggttttaggctccgcatatatataatcattttctaaatgatccaaacacctccgtgaaatctagggttttcaattccaggctcatttctctcgcattttcagagcaatcatgggtcactctaacgtctggaactctcaccccaaaacctacggccctggctctcgcgcctgccgtgtttgtgggaacccccatgccatcatcaggaagtacggtctcatgtgttgcaggcagtgcttccgtagcaatgccaaggaaatcggattcatcaagtaccgttgaagaattttgtatggtgtaaagtaggaaggactttgtccctctatgagccttctgtagtatgttattatttttatttttttgaatttgaaagaacaagatgctgttttgttttggtgaattaccaaagtgattgttgaactaagaatactttgtggttcctcaatgaagtaatcatactggtttaatttggtattttctttattgttaagtgcgcttattgattgtcattgcaatgtgatgatcttgttgattattggcatttcatgtgttctctaaatggaattaagatgttggcttaaattgtttattcgttaaaaaccacagaatgtatggttctgaagtcttattgtcatatttggtcataggctatggtgttaaaggactttgattagtattgtccatggagtggctgcgtattattaagtgtgcttattgtctatgcaatgtgatgatcctgttgattattggcattttatatgttctctaaatggatttagatgttggcttacgtagtttattcattaaaaaccacagtacatatagttttgaagtcttattgtttggtcttgttatggtgttaaaggcgtttgattagtatggt

SEQ ID NO: 805 - DNA, 676 bp, Gossypium raimondii
tcacttatttttgcccaaccttgacaatttgaaacctagggttttcggattacatctataaatactctaattttcccactaaaccaaacccttcctccaaaactaggccgcttccgtttatcagagctttcttcgacgagcagccatttgtaatcaatcatgggtcattctaacgtctggaactctcaccccaaaacctacggccctggctctcgcgcatgccgagtgtgtggaaaccctcatgccatcatcaggaagtacgggctcatgtgttgcagacagtgcttccgtagcaatgccaaggaaattggattcattaagtaccgctgaggaatgtttatatggctagaagttggaaacactttttagctagtatgaacctttgtttcgaaattgtagcaacttttaagataacattgctgttttttgttgaatttagtttaagagcttgaagttttgtttctgcaaaggataatttgttgttttctcaatgaagtaatcatactgtttttatcttacttattgttaattttggtataatctcctatgcattttgatgatgatgttgattattagcatttggcaattccataaatggaattcaaggttttaacttgtttgagaacttatttatggttatgaaagtattgttgtttgctggtgtttttgttgttaa

SEQ ID NO: 806 - DNA, 1493 bp, Gossypium raimondii
taaggtttcatctatagaagaaatgttgagggaaagggagcaaatgagaagattatgggttgaccagcttaaagaggctcaggacagaatgaaatactacgcagatagacacaggcaggagaggcagatacggtttatctaaaagttcagccttacaggtgaaggtgattgggcttgaggaagaatttgattgctaaaagtgaaactttaattacctacctcatctcacctacacctagtttctcatattaagagaaaagttggtcctaaaacactgtttaatatagctccaccacaactcaacagttaagctcagcattgagtttacctttgcagatacgcattttgttgggataattaatatattgaaatttacactttgctcagctgaactgcatcctcaccgtttagttagatgatagcttcggatatgtcatgatttacagtgacatgtcaatcatttatcttttacatgtatgcagcatgcaaggaaacaaatttaaaagttgaacatgtgtgtgtttttatcatattggctattgtcaaatcaggtgggtgttaaggaatcggggtggattatagcacagaaaatttatacaatattaaagtatacgttcttttaagggggagagatgacatcgtacttaggggcctaagatgatattaatccgtcatgatcatgcttattgggcctaagtttttctaccccgcccaacaaattggaaactagggttttggatactttatatatatcgtcgtttcgtctagtataggttttgtgattagctgcggagcctgcctactcttacctttttcagagatttgatagaggaagagcagctcacctaatccatcatgggtcactctaatgtctggaactctcaccccaaaacctacggccctggctctcgcgcctgccgtgtgtgcgggaacccccacgccatcatcaggaaatatggactcatgtgttgcaggcagtgcttccgtagcaatgccaaggaaattggattcattaagtaccgctgaagaatttatgttgggaagaactttgttagagtatgagcctttggtaatgtgattattgaattagaaggataatgtttattgttttcagtctggacatctaaagtggttgttgaactaaggatactttgttgtttctcaatcaagtaatcatactgttttttttaatatttcttaatttctttatgatcaagaaaagatgcaacaggagtgcaacattgagtaaacaattaggcagcttagtgcttattaagtatacttaaaagttggcatccttggcatgttagtcttcaggttttagcattgattgagacccgaagctattttcgttttaattcttgaaggcacttgtcgaggatgatactttaaaacgtggtttgaggacttgctctaatgtctgtgagtgtcctgcattttgaagcccataaaaaagatgagcttgtcggtaaccaattgctagggtgtaattg

SEQ ID NO: 807 - DNA, 1037 bp, Gossypium raimondii
attgagtatagttcaatgcaggagtaaaaagatttggagcatatttaaagtagaaagaactaaatctaaaattctgtaaaagtacgtgtgctaacagcacattttgacccaaaaaattatacatttgaccccgccatataaatactctaatttccccagtggaccaaactccactgtcgaaatctagggttttaaattttgccttctttcagagcttccattgacgagcagctaaatcaacaatgggtcactctaacgtatggaactctcacccgaaaacctacggccctggatctcgcgcctgccgtgtgtgcggcaacccccatgccattattaggaagtatgggctcatgtgttgcagacagtgcttccgtagcaatgccaaggaaatcggattcatcaagtaccgctgaagaatttatatggtctgaattaggaaggactttgtttaagcacgaatcattggtgtggagttttctaatttatcggtactagaagacaatgttttggtttttggttaatttagtatgaacttgaactaaaaatactttctcctttctcaatcaagtaatcatattgttaactttctttgcagtgtgatggtcctgttaattttttggcgtttcatgttattttattttgggttaaaataagctacaagtccctgtactcttcacaaatttagaatctaggcactgtatttttattttcgagaatctaatacctctactttttagatttggaaattcaggtgtaccagaattttgaaatttgaaaaggattaaattcctaaaagtaaatatatagggaccaaattttaaatttatgaagagtacaaggatttatgggatattttaacctttattctgatgttagacctgttaattttggtccgaaattagaaaacttgagttgatcatcttaaattagatccaattttgatttgattgttaaaagtcaacaatgaatgaacaaaatttcaaatgactggactcttaattttagaaatgaaaacaatagaattaaatatttaaagg

SEQ ID NO: 808 - DNA, 404 bp, Guizotia abyssinica
gctaacaaacgtcggaacacatcggctgcggcttgcataacgatctaaagctttgaagcatcagattgagattgaaattgaaatggggcattcaaatgtctggaactctcatcccaagacctacggccctggttcccgcacctgtcgcgtatgcgggaattcccatggcctgattaggaaatatggtcttatgtgctgcagacagtgcttccacagcaatgctaaagaaattggcttcatcaagtaccgctaaggagttttgaagggttatcgatggtgtggaccgaatggcgtattgaaagcttgttttggtgtttttataactatagtatctagtggtgtttttgatttatctctatgggataacaatggatgaatgttgttgaattgttactgcattttag

SEQ ID NO: 809 - DNA, 505 bp, Lactuca sativa
cgagctcccagtataaatactattttccttacaatttccaaaccctaaacacattagctgccgctattacaacgatcttctcagcatcagattcaaatggggcactcaaacgtctggaactctcaccctaagacctatggtcctggttcccgcacctgccgtgtgtgtgggaactcccatgggttgatcaggaaatatggacttatgtgctgcagacagtgttttcacagcaatgccaaggaaattggtttcattaagtatcgctaaggagttttgaagggttatcagttgatcatttatgatatgcccaattgaaagaaagatgtgtttttttggttacaattgtagtatctaaattgtttttgtttggtctctttgggataactttgaatgtagttggatttttataatacccctttaattatttatttgaaaattttcctgtgaacatcaagatcatatgtgtttggtttcatttaatcttagttacttgattgtgtctaat

SEQ ID NO: 810 - DNA, 767 bp, Lactuca sativa
tgaaatgttaaaaactacctcacaacgtcgtcccacacccactgcaaaatctagggttttgagttcatcgactttcagagctcgtcgcctccatacaccaacaatgggtcattcgaacgtctggaactcccatcccaaaacatacggccctggttctcgtacctgccgtgtatgtggtaactcacatgggttgatcagaaagtatgggcttatgtgctgcagacaatgcttccatagcaatgcaaaggagattggtttcatcaagtatcgttgattagcaccaatgatggagcaatggagccacgtctttgatgagaagagatattgttagtattttagcatcaatctgttattctcatgtttactttaaagacatgtttatgatatatcatgaatgagactacttaattttgttgcttggttttgcacttcaattaagagcctctttcattttcgttgttaagagaatattttgaaagttttggattatttgggattagttttgttacttttgtatttatccgtatattgtgtaaggttgcaaaagttatagggagtgtgctaaatgggtttttgggattttgcttatttgttgggtgtttgggattgcacttatatagagtttttgataagtcgattctcttttgttatcgacttaaataatgagttattacttcttcattgtgtaagtagattatgtcaaacactaaaagacaaaaactataaaatgttttgagaaattaaattgctttttattttttatgcgt

SEQ ID NO: 811 - DNA, 1310 bp, Medicago truncatula
gagaagtgaaaataaaactaactattgctaatgtgtgattaaaatattcaatatttgttttcattatgactatgattgtgtaaccaatgatattccttcttctatgttgagtaaatatgtgacaactaagcacacatagatcatcaatatacatagttgattgaggaggggtgttagaattataaattatattccctgtaagtgcaacaaatcaccgcacaaaattaagtatatcgtcttaatagttgatatgggccaaatgaagcccaagtaatatctaacccaccacccaaaagaaacagaaaaccctaattttgattctttgtataaattggcatttgcatcatcgaaatatccttcacctaccacacaattcttcagctgtttgcgcatttgagtctcaccggcgatcaaatcaataaaacatgggacactcaaatgtttggaactctcaccccaagacctatggtcctggttcccgcacttgtcgtgtgtgcgggaattcacatggattgatcaggaagtatggccttatgtgctgcaggcaatgcttccacagcaatgccaaggaaattggcttcattaagtaccgttgaatgaagagctattttctctgcccagccaatcttaggtttcgtcattagaatgttgtgaggtggttatgtttgaagaaactatataattgtttttgcatttactttatttgtcagactttatatttttgaattgaggttgaaactccttttttatatatacattgccttctactattgacttccctatctgcgttgttctaacttctctaaatctacacaaccttgattcacaaatctttgtctaatttattttcactctgctattttttgttatatattataaacgttggaattaggattgtgtgattattgtttaattgatgttgccccacgcatcaattttaaggtcatacagattgtgtttttatgcagtcagcaatttctgaacgttcgattatgattctactgtatacatcttgtgtcagtaatctttgtttttaaaataatcaaaacattattttctaggactgatcacgattggtcgctcgttcgcatattttctacatcatgtagtttgtgactgcgtttaatttgatttctattggtggcttccttattgtaacgacaaacaagtaatgatttcattgtactgagagtgcctgtcatcaagtttcaattgattttgttctttaattaaaaccttaagatatagtagtaatttctttacctatctgtgatctttgtgggtcagtgttcataacaatgaagtagtct

SEQ ID NO: 812 - DNA, 1137 bp, Medicago truncatula
caaaattaaaggagcaaggtgttaaaaacaaaaacaaaaatgaaaggaataaaaaaaaataaaaagatgatatattgagaattgaaagcttagggttgagttttgacggtagtatataaagttaggaaatacatagacagagtctttgattcattccatctgcgactgctagttagggtttttgagatcgctgcctgccgccgagtaagaaatcatgggtcactccaatgtctggaactctcaccccaagacctatggtcctggttctcgtacatgccgtgtgtgtggaaactctcatggattgatcaggaagtacggactcatgtgttgcagacagtgcttccacagcaatgccaaggaaattggcttcattaagtatcgctgaaaagtttagagtccttcggagctgcaaaatgttgccaggatgattttagttattaaagaacttataatgttgtggcttttttattttattcagtcagttaatcaaacttgagttgttactaaaaacatatttacttcctacttggttgtggagttgttattttctctttatccatcactagaattataaatttgatgttggcatctttttgcatggtgtgttttatgatgtgaatggaaataatttccctttcataagcttttaacttgatctataacctgctaaggtatgatttgtaaacttgaaaatgtgccatttgtaaagattaaaaaaacagggagttattccagagattggagcaagtagagatgatttgaaacattgattatagactttcaacacagtatattttgtagcccattgtcagccaatgtgtgtgtgctgcaaattctagatttttagaatgtccatacattgaaatacatctgttgtgattgtatacaccaactctgtaacctataaaactttcatatatttgtttggcagtttccaacctctcacttgtttgttaacctgtcatccggtaggttagcacgattctttgagtatgggactacagagagctatttggcaaagcgtattgaacgacactatctaggttgttttacttctcaatatgttaaacgatcctctgtaaaattggttttggtatctaatttgagtaaggtgttggaatacaccttgggtagttt

SEQ ID NO: 813 - DNA, 1043 bp, Mimulus guttatus
gaaaccctagcaattagagagcatcaacgcagagttcatcggcgacgactgattttgcagaaagatggggcactctaacatctggaactctcaccctaaaacctacggccctggatcccgcacctgtcgggtttgcggaaatccacatggattgattagaaagtacggtctgatgtgctgcagacagtgcttccgcagcaactccaaggaaattggcttcattaagtatcgctaagctgtggttggcaaaggctattacagctgaagaggatgttcttttttttttttttccgattttttctcatgttggatttctagaagacgatggtgaatcaatttgtatgagagtgattgttctagtcaatgattcaactcttgtttgatttctgaaccaactagcttatatatttgatttctgttttttgcttgatattgaagcaatctatttcgactttgttaagttatgttgtttttattgtcctcgtttttgttttgatcacagtcggttaaaatgtgaccaaacattttacaattatagcgaatttatcacttattttgataacagtcgggttgattggtcgttcttagggtcaaaaactcaaaatttattaaaattacttcgaaaccctaatttcccgactctctctctctcagcaatccgacctttctttctaccccaccaccaccagcgccttctccgacgaccaccaccaccactgcctcccggttctccgacgaccaccaccactagcgcatctcggctctccgacgaccaccaccagcagcagcgcctcccaattctccgacgaccaccaccacttgcgcctcccgattctccaaccaccaccatcgcaaccaggcctcccggctctccgaagaccaccaccaccagcgcctcccggctctccgaagaccaccagcaaagccgctctctctatcggtcgttttggacttccgaaaaaaatcggaaattttccgaaacacccaaatccgatccgatccgtccgatttccacccctaggctcgttctcaagtcttcttga

SEQ ID NO: 814 - DNA, 453 bp, Tropaeolum majus
tagttttttggaatcgatttgtagttgttagggcttctttcgtttgcaagaggaagatgggtcactccaacgtctggaactcgcatccgaaaagctatggccctgggtcacgtacctgccgggtttgtggaaattcacatggattgatcaggaagtatggccttatgtgctgcaggcagtgcttccacagcaacgccaaggaaattggattcatcaagtaccgctaaggagacagaggaaacataacactatgaggagggcatagaaaggtttcccttttattaagttgtttgtctcaaggcctaaactttaaacgatgtttagttttgtgtttcagttttgtgactctttaagccgattgttctaaattctctttgttagtaagtgaaagttggtttaaatttacatgcacagttttcgctaaatgcttatgataatattcgctcctgttga

SEQ ID NO: 815 - DNA, 425 bp, Olea europaea
actataaatttattctgcaattagcatttctcattatacaatcggcttttcttttgcgctgaaagacgaagatggggcactctaacatctggaactctcaccccaagacctacgggcctggttcccgcacctgtcgtgtatgcgggaaccctcatggaataattaggaagtatgggctcatgtgctgcagacagtgcttccggagcaatgccaaggaaattggctttatcaagtatcgttaagctgtgaatgtctgaatttcatcaagtagaaggagggctttacttggtggaatgggatatcttcaggcatcccttttcatttatcttctttttctttaaaaagtgctgtaatgggagattattctagtttgcaatagaattcaatctgattcttgaactggcttaatagtatttgcttatttt

SEQ ID NO: 816 - DNA, 292 bp, Olea europaea
cattcgatcggcttctcttttgcgctgaaagatggggcactctaacatctggaactctcaccccaagacctacgggcctggttcccgcacctgtcgtgtatgcgggaacccccatggaattattaggaagtatgggctcatgtgctgcagacagtgcttccgtagcaatgccaaggaaattggctttatcaagtatcgttgagctgtgaatatctgaatttctgcccgtgaaggagggcttttctaagtgggttgcttttcgatctctacgggcatcctttttataatttat

SEQ ID NO: 817 - DNA, 788 bp, Olea europaea
ctattgcgaattagggcttcttttagttattatcagcgcctcattcgaagctaggttttccgagagaggcgaaaatgggtcactccaacatttggaactcgcatcccaagacctacggccctggctcccgcacatgccgcgtctgtggaaatccacatggtatcattaggaagtatggattgatgtgctgcagacagtgtttccgcagcaacgccaaggaaattggatttatcaagtatcgctgaacggatttcagaggggttgaagccaacggcatctcaaaatatgcataaatgaactttcgaacttttgctagaggaagtattattgtcgtaatttgtttatggattgaattttgtttattaatatcgtagatcgttgtttttgttttaactttacttggaatattagtgttaaagctccggaccacagttcactcgattctccagaaattgtgattatgagcctattcctgagtagagaaggtactttccagttgcgtgctaaatttagtctattcgaggaaaagttcatattgaattttagaccctctgggattaacgtagtgtacagtttttacgaagtttccctattggctagctgacctaatgtaattattgatatattactagtaaatttctagcagactccttgccttcatgcttgtaatcattattatgacatcactgtacggtccggttaacttttaagtaacctaaaaaatcgacgtacttctagtccgttagactacctacttcgcctacttccttagtcgttagacttaaccg

SEQ ID NO: 818 - DNA, 597 bp, Olea europaea
tcgccgttgttgggctttttcacttgcaaaccctagcagcctttcgttcggcagaagaggaagaatggggcactccaacatctggaattctcatcccaaaacctacggccctggctcccgcacttgccgtgtttgtgggaacccccatggtataattcgaaagtatgggctcatgtgttgcagacaatgctttcgcagcaatgctaaggaaataggcttcatcaagtatcgctaagcagtcaagccaagttttgtactagaggaagatttctcttaatgggatgcttttagttatttcagatttacctttttaaatcatctcctgcctttgttctcaaaatggatgtattgaggatgattattccaagtttataattgaacttgaagtgatatttgaacagacaaattaatatttgcttatttcatagttgtgaccattgcttctatgcatccattatagtcaatgatgttgctcagcacaacttgaattagtattcccattgtatcctgtggaaggcaaatccttctctaagatttcttcgaagtggtattctactttgaattgtagaatcatgaaagcttaagacaatttataat

SEQ ID NO: 819 - DNA, 337 bp, Allium cepa
agaaacaattggggcacgccaatgtctggaactcgcatcctaaaaactatggtcctggatctcgtgcgtgccgtgtttgtggaaatccccatggattgatcagaaaaatacgggcttatgtgctgcaggcagtgctttagggaaaacgctaagcagattggcttcattaagtaccgctgagtattgggttgtgaagtgatgcttctaatttttcacttgcttttgggtaattttcgattagttgctattgaacttgaactctatgttatgtatttcttattttctgaaccctatgttctcaaattaattatgtacaagtgattgcttttgtttgtca

SEQ ID NO: 820 - DNA, 391 bp, Allium cepa
gggcacgccaatgtctggaactcgcatcctaaaaaactatggtcctggatctcgtgcgtgccgtgtttgtggaaatccccatggattgatcagaaaatacgggcttatgtgctgcaggcagtgctttaagggaaaacgctaagcagattggcttcattaagtaccgctgagtattgggttgtgaagtgatgcttcaatttttcacttgcttttgggtaattttcgattagttgctattgaacttgaactctatgttatgtatttcttattttctgaaccctatgttctcaaattaattatgtacaagtgattgcttttgtttgtcacagatttaactgttctatttttctgaaatcgtggttatcttcagcaatatcagtttattcttgtt

SEQ ID NO: 821 - DNA, 403 bp, Allium cepa
ataaaatcagagtttggtgccgccatcgaaacttaatcagcacagaagcaatggggcacgccaatgtttggagctcacatcctaaaaactatggtcctggatctcgtgcctgccgtgtttgtggaaatcctcatggattgatcaggaaatatgggcttatgtgctgcaggcagtgcttcagggaaaacgccaagcagattggcttcattaagtaccgctgaatattggattgctaaatgatgcttcctcagcaattcacttgctttttgagaatttcagtttgttgctattaaatttgagctctatttatatgcatttcttagtttatgaaccatgtgttctccagttaattatgtataagtgattgcttttatttatcacagatttaagtgttaagtttctg

SEQ ID NO: 822 - DNA, 544 bp, Arachis hypogaea
ggtccttggtcagtctacacgaagcacgtggtatcaacgcagagtacgggggagggttttcactcacacgctaaggcaggcgcttccatcgtcttcttctgagcttgagattttgtgcatttgaatttggtctagcggaaacatcatgggacacaccaacatttggaactctcacccaaagaactacgggcctggttctcgcacttgtcgcgtgtgtggaaacccacatggaataatcaggaagtatggcctcatgtgctgcaggcagtgcttccgaagcaatgccaaggaaatcggattcattaagtaccgctgaagagctttgacgcttagctgcaaaaccagctgttttagattattgatttatgttgttatgtttgaagaaacttgatttttgtttatggcaactagttaatcatcagaacaaagttttggattactcagaatattttctatacattgttgattgttttcaacgtccaatctgatcctttaatcatatacttaaaaaagaaaaaaaacaaaagtactctgcgttgatacc

SEQ ID NO: 823 - DNA, 842 bp, Phalaenopsis aphrodite
gagaattcgattcggggtcctgcggctcttcttcatctcaagctagggcgtctctgatctaagattcaactgcgcaacatgggccactctaacgtttggaactcacatccgaagaactacgggctgggatcccgggcttgccgtgtctgcggtaatgtgcatggcttgatccgtaaatacggcctcatgtgttgcaggcagtgcttccgtaacaacgccaaggagattggattcatcaagtaccgctgaggatcaatgggctttcaagacgaggaggaagatgaaggataatacgttttataaatgcatgattttctggtagttatgcaaatttctttcttgcaaacttggttttacaagtttttctgtgttgaaactctaggcctttattgaccttctgttggcttttaatttcagtccgttgtctatgtaatacctttcattttagttatgcttttgtctatggaagacctcgattttatttaagtactaaagacctagttaaaattcgaactcattgattttaccaaaattaaattagttggcttatgcagcattgtaaattcaaatcaaattaatctggaggaagcagaatcgatttatttgatttggatgttttggctcaattgcctcttcatctccatattttgacctgttttggctcatctatggcatcatcttgagttgatgttagcatgtgactaggtttgggttgttgaaatagatggcagtgcatcttaattctaatatagtagttaatggctatttgtttagaaaaagtttaaggaaaatttgactatacatagtattctagttcttatgctatttgactatatactaac

SEQ ID NO: 824 - DNA, 497 bp, Lippia dulcis
tctgcaattagggctttcagagtattcaatcggcggcttttgattcacaagaaagacgaagatgggtcactccaacatctggaattctcacccaaaaacctacggccctggctcccgcacctgccgtgtttgcgggaatcctcatgggattattaggaagtatggtctgatgtgttgcagacagtgcttccgcagcaatgccaaggaaattggcttcattaagtaccgttaagatgtggaggagggcaacagtgttgcaacttttgaaggggatgtttatgctatttcgttttcgcaatatttagaaatttatagcttgaattttggttcatctcgtctagccttttctcaggaatgggatgtaatgagaatgatgataactattatgatctatgattaaaaccctaatttgatttgtgagttatattagccttcttttatgtactttcctattatatcttgaatcatgattgttattgtctagaaaaaaaaagtgt

SEQ ID NO: 825 - DNA, 399 bp, Lippia dulcis
ttcattagcctaattcttgtcgatctagagagagagacagagagattgaggaagatggggcactctaacatctggaattctcaccccaaaacctatggccctggatcccgcacatgccgtgtttgtgggaaccctcatggaattattaggaagtatggcttgatgtgctgcagacaatgcttccgcagcaatgctaaggaaatcggctttattaagtatcgctaaactattttggcatggactttgtcagagggttggttttgtttatttagtggtagacatttatttagaatggatgcagttagaatgactgttataaaccatgttcaaactcttttttggtggtaaaccatgagatttttgttttattaccctcttctttaggcaaaaacttttgtg

SEQ ID NO: 826 - DNA, 788 bp, Ananas comosus
atggcatgcataaaaaataatgccaattacttagcatctaatagcaagctaatttgttgaaaggaaaccaaaactagaaacaccaatttcagcattgcattcacgcagtgacaagttgccccagttcccacaagcaccaaccaaacaatcaacaggaactcaactctgaagaagcggtaggataaactggaaaccttttaacataataaggcacctaaatagtaaaagcgtgttctcgtaatagccacatatcaggccacgtatgcaataaaatatgggaattctgatgaaaatgaactaaagaacttgggacgaaatatgtaatagctgctaaaacactcatccaaaagattacaaaatgctggtatcaacagcaattaattcgagcctgcattcaaactaattggaacaactacgaaggctaaaacccctcgattcaaaccctaatcgcatatttagcgcacgattcaactccagcaccacgaatcgaggacgagaaagagaaaggagaaagatgggtcatgccaacatatggaattctcatcctaagagctatggccctggttcccgcacttgccgggtttgcgggaatcctcatggtttgatcaggaagtatggcctcatgtgttgcaggcagtgcttccgcagcaatgccaaggaaattggattcatcaagtaccgctagatggataaagctagaagcagagtggagcaacacatttcagcagcatgtttctctagtaggaattactctgaaatatgttgaggaccagtcttgcggaaaaaac

SEQ ID NO: 827 - DNA, 528 bp, Plantago ovata
gccggggagatcaattagaattagttacccacacacacctagggtttcactgcaataatcttcaaatcgttactgagaatttgagacgccattgtcagcggcacgaagagaattgaaaacatgggacactcaaacatctggaactctcatcccaaaacctacggtcctggttcacgtacctgccgtgtgtgtggtaatccccatggaataattagaaagtatggtctgatgtgctgcagacaatgcttccgtagcaatgcaaaggaaattggcttcatcaagtatcgctgaacttttgctgcaggagaaatgtgataccttcattttgaccttactgtttcagagaatgtaatatggatgtaatgactattttaactttctggactcatgaatcaatgtcttggtacatccatatcgttcgagagttagcttgttcttcatttaaaatatcaactaatttggcagacatgtcaagttgtacctgttgcaaatgtcttactctttcttcataattagcgtacctgttct

SEQ ID NO: 828 - DNA, 471 bp, Podocarpus macrophillus
tgatccttcacctgagagagagaggtaggtcgagatttcgaatcccttgccctctattatcgaagatgggtcacactaacgtttggaattcccaccccaagacctacggacctggctcacgcacctgtcgtgtgtgtggaaacccacatggtctgatccggaagtatggtcttatgtgttgtcggcagtgcttccgcagctatgctaaagacattggctttgttaagtatcgttaggagatcagtaacagatcatagctgctagagagttgcaagtagcatgttttgctaaagtagaaccagtggcagcaaaacaatggtgaaaggagatttgtttggaaaatgttctttgaaatagactttgttttttgtcagagcaattgattatttaaacggatattggtgtatgggaagtattaaaacatgatttatgtgacaatatctttattgtaatggatgcttgagtgttccc

SEQ ID NO: 829 - DNA, 591 bp, Papaver somniferum
aaacatatataatccatttttcctttcgattaaggtattagggttttaatctcttcttctcagtccgcctatgtgaaaacaaatctagggttttcgaagaagaagaagaagatgggtcacgctaatgtctggaattctcaccctaagaactacggtcctggatctcgtacttgccgtgtgtgtgggaatccacatgctatcatcagaaagtatggactgatgtgctgcaggcagtgcttccgtagcaatgccaaggagatcggtttcatcaagtaccgttaaggaagtatggttctatccatcaagtaccttatgatggaggaggataaagggaaaaagctgaagttacgtttctctggaaggatgggttactgaaatgagtctatacctagtaaagtagttttagttagatctgttcgattgatatttagaatttgtaagttgaggtgttattgacatcattattccatgttttgatccgaatgttatgctggctatcaacatcagattcttatattttaatgttgcattttaatgttgctcagtcagatcttctatgtcagctacttttttcaacttataaatgtcttt

SEQ ID NO: 830 - DNA, 503 bp, Papaver somniferum
agtccgcctatgtgaaaacaaatctagggttttcgaagaagaagaagaagatgggtcacgctaatgtctggaattctcaccctaagaactacggtcctggatctcgtacttgccgtgtgtgtgggaatccacatgctatcatcagaaagtatggactgatgtgctgcaggcagtgcttccgtagcaatgccaaggagattggtttcatcaagtaccgttaaggaagtatggttttatccatcaagtaccttgtgatggatgaggataaagggaaaagctgaagttatgtttctctggaaggatgggttactgaaatgagtttatacctagtaaagtagttttagttagatggtatttagaatttttaagttgagatgttattgacatcattattccatgttttgatccgaatgttatagtgaccatcaacatcagattcttatatttttaatttgctcaatcagatcttctatgtcaagtacttttttcaaaaaaaaaaaaaa

SEQ ID NO: 831 - DNA, 580 bp, Papaver somniferum
cgattagggttttattgcgctcctccatctttctctgcaagtcggctaagcaaaagttctcttgaagaatcaatcatggggcacgctaatgtctggaactctcaccctaagaactatggacctggttctcgtacttgccgtgtttgtggaaaccctcatgctattatcaggaagtatggtctcatgtgttgcagacagtgcttccgcagtaacgccaaggaaattggtttcatcaagtaccgttaagattgcagtgctgttacgaagatgtaaggctggtattttatcgagggggtgatgtttttcctaagaagatatgatactttagaaatgatttggtagacatcctttggataattttgtagacttcatttggttactgaaccccgacaaattctagtgtttatcttttgaaatggttataacttaaaatgcgactttattgtgtcaacaaattctactttttctgttaatctgcattacaactgcatatgtattgaatgaatgtcatgggattcagaatccactagtttatgttaaaagatgcaatttcctttcttgctggtaaaaaaaaaaaaaa

SEQ ID NO: 832 - DNA, 484 bp, Papaver somniferum
tcagtccgcctctgtaaacaaatctagagttttccaagaagaagaagaagatgggtcacgctaatgtctggaattctcaccccaagaactacggtcctggatctcgtacttgccgtgtgtgtgggaatccacatgctatcatcagaaagtatggactgatgtgctgcaggcagtgcttccgtagcaatgccaaggagattggtttcatcaagtaccgttaaggaagtatggttttatccatcaagtagcttgtgatggatgaggataaagggaaaagctgaagttatgtttctctggaaggatgggttactgaaatgaggctatacctagtaaagtagttttagttagatctgtttgattggtatttagaatttataagttgagatgttattgacatcattattccatgttttgatccgaatgttatagtgaccatcaacatcagattcttatatttttacttttgctcaatcagatcttctat

SEQ ID NO: 833 - DNA, 861 bp, Papaver somniferum
tacgatacgtcgaaccaggaaagaagtcttggtacaaattcagcgacaaccttagtaacaaacgaagaagatgtaacaccttattagagtgaaatgaagaagaaaccgtaagtgggtttggtttgtagagaagaagaaagacaagagttgaagataggtaaagacaaacaagtgttcttccgtttggataaaactagggttttattatcttcttctcagtccgcctctgtgaaaacaaatctagggttttcgtagaagaagaagaagaagatgggtcacgctaatgtctggaattctcatcctaagaactacggtcctggatctcgtacttgccgagtgtgtgggaatccacatgctatcatcagaaagtatggattgatgtgctgcaggcagtgcttccgtagcaatgccaaggagattggtttcatcaagtaccgttaaggagggataagtaccttatgatggaggaggataaagggaaaagctgaagttacgtttttcatcatggaggatgggttactgaaatgagtctatacctagtaaagtagttttagttctggctatcaacatcagattcttatattttaattttgctcaatcagatcttctatgtcagctacattttcaacttgttaagtacttttgtcaccaatttaagatgtcatggcggaattttttatcaatcagtgtggatgagaatgttgaaagtctagtattttagaaatttgtctgttggtgctatatgttcttatggatgcagaatggccctttgcatggaactgtatgcaagagtgtctttattagattgatatctcattgcatctggagtcgttgtattaggtggaagcttaatattaaacg

SEQ ID NO: 834 - DNA, 544 bp, Rosmarinus officinalis
cttcatctgcgtctagggcttttttattttgatcggcggcggaaaaagagaagaaaatggggcactccaacatctggaattctcaccctaagaactacggccctggatctcgcacttgccgcccttcatctgcgtctagggcttttttattttcatcggcggcggaaacagagaagaaaatggggcactccaacatctggaattctcaccctaagaactacggccctggatcccgcacttgccgcgtgtgtgggaatcctcatggcataatcagaaagtatgggattatgtgctgcagacaatgcttccgcagtaatgcaaaggaaattggattcattaagtaccgctaaactagacttgggcattgcgttaacttaggaaggaacctagtcttggctgggttgttttttgaaaagttaaaacatagccaatctctgtttctatcatttctgagaaatgtgtaatgacagcgattatccaatatgtgactgaatttggatttatttatgaaccatcaggttatatttttgtttcagagtattga

SEQ ID NO: 835 - DNA, 502 bp, Rosmarinus officinalis
cttcatctgcgtctagggcttttctattttgatcggcggcggaaaaagagaagataatggggcactccaacatctggaactctcaccctaagaactacggccctggatcccgtacttgccgtgtgtgtgggaaccctcatgggataatcagaaagtatgggattatgtgctgcagacagtgcttccgcagcaatgcaaaggaaatcggcttcatcaagtaccgttaaattcgatgagggcatcgccacaacttaggaatgaacctagtcttggctgggttgttttttgaaatgttaaaaacatagccaatcatctgtttctatcatttctgagaaatgtgtaatgacagcgattatccaatatgtgactgaatttggatttatttctgaaacatcaaattatattttcgtttcttagtattgacattccttacttctatcgttcatttactttcttgatttttcttgtttatgtgggcattctaaatttgggggttttgatt

SEQ ID NO: 836 - DNA, 576 bp, Rosmarinus officinalis
gggttttatatcatcggcgcctcgtctccaaaactctagatttttgatagagagagaagagatgggtcactctaacatctggaactcgcatcccaagagctacggccctggctcacgcacttgccgggtttgcggaaacccgcatggaattattcgcaagtatggtctcatgtgttgcaggcagtgcttccgcagcaacgccaaggagattggcttcattaagtaccgttaatgatgcatggattctgaggcttgaagcgaagttcttgtcgaagttggaggaattaggaactcctttgtttaagataaacatggattcttcaaatttttgttttgctagttgaatttcttctagactatgttaactagtatcactcgatataagttgtcacatttttattttttatactactttcactttctttatcttttatcgtcgtgtttatgtggttatggtggatatggatttcaagtgagattgcttgaatctatcatctgctgtatggatatttcctgatgcaaaaatttactcttgtttgttttaaatgagatgaactaataaatagttaagccacg

SEQ ID NO: 837 - DNA, 425 bp, Carthamus tinctorius
cggggctgggtttcgaattcatcgagtttccgagctcctcctcgcctccatagacgaagaatgggtcactcgaacgtctggaactcccatcccaagacttacggccctggatctcgtacctgccgggtatgcggtaactcacatgggttgatcagaaagtacgggcttatgtgctgtaggcagtgcttccacagcaacgcgaaggaaattggtttcattaagtaccgttaatttgcaccaatgaggggaacggttgaagttagccatcttcaattaaaaaaatgatccgaatatcttgtagtatcgttggtaacaatcagttttgtcatcttaacttttaagacggtttatgattcatgtatgatgatggcattgaattgatacccttttttgttgcttgaatttgcatctgaaattcataccac

SEQ ID NO: 838 - DNA, 406 bp, Salvia sclarea
agacatggggcactccaacatctggaattctcacccgaaaaattatggccctggatcccgcacctggcgtgtttgcgggaaccctcatgggaataattaggaagtacggtttgatgtgctgcagacaatgcttccggcagcaatgctaaggaaatcggatttattaagtatcgctgaactgtgttgccatcgactttgcagagagggtgctgtgatttatttagttgtagccatttatttttaatggatttagttgaaatgatttttattcggcatgtttagacgctcatttgatggtaaatcttaagattttgtttttatgggtttgttactaccttctgtcaccatgatgtggaagtctcattttaggcataacctggtgtgcctctttataattcgactcttg

SEQ ID NO: 839 - DNA, 529 bp, Sarracenia psittacina
cggggagtttaatcttgttccagcttaaagatctcggttttcaaataggttgcgagcatcgcagagtctccgagtctctttgtggtcgttcctgttgctgatcgtctcccaaaatttggtttggaagagagagaatgggtcactcgaacatctggaactcgcatcccaagcattacggccctggatcgcgtacttgccgagtctgtggaaacccacatgggttaatcaggaagtatggtatcatgtgttgcaggcaatgcttccgtagcaatgccaaggaaattggtttcatcaagtaccgctaaatgggtgaagtcaagtgcaaatggaactgcattggagaactttctccttttataaggattcattataatataaccagtttctagaactactcttttagtaccctgggcttttgtccgattgttataggtcctatgatgttatttttcactgttaatccatgtttaaattgttggtttgccgagttctttgctctgtggacatcatgtggctgttgattgcttag

SEQ ID NO: 840 - DNA, 626 bp, Sarracenia psittacina
gtggtcgttcctgttgctgatcgtctcccaaaatttggtttggaggagagagaatgggtcactcgaacatctggaactcgcatcccaagcattacggccctggatcgcgtacttgccgagtctgtggaaacccacatgggttaatcaggaagtatggtatcatgtgttgcaggcaatgcttccgtagcaatgccaaggaaattggtttcatcaagtaccgctaaatgggtgaagtcaagtgcaaatggagctgcattggagaactttatccttttataaggattcattataatataaccagtttctagaactactcttttagtaccctgggcctttgtccgattgttatgggtcctatgatgttatttttcactgttaatccatgtttaaattgttggtttgccgagttctttgctctgtggacatcatgtgtggctgttgattgcttagttccccaaacttttgcttagcctagtgtctgttttgggagaaattattccatatgatgggaagattacgtagtataactactacgttagcatgatttttataattatcaatacatgacgtgtatgcattggttgaacaatcacgtcaacgtgttgacgtgattttttcgcctatag

SEQ ID NO: 841 - DNA, 463 bp, Sarracenia psittacina
tccgagtctctttgtggtcgttcctgttgctgatcgtctcccaaaatttggtttggaagagagagaatgggtcactcgaacatctggaactcgcatcccaagcattacggccctggatcgcgtacttgccgagtctgtggaaacccacatgggttaatcaggaagtatggtatcatgtgttgcaggcaatgcttccgtagcaatgccaaggaaattggtttcatcaagtaccgctaaatgggtgaagtcaagtgcaaatggaactgcattggagaactttctccttttataaggtattcattataatataaccagtttctagaactactcttttagtaccctgggtctttgtccgattgttataggtcctatgatgttattttcactgttaatccatgtttaaattgttggtttgccgagttctttgctctgtggacatcatgtgtggctgttgattgcttag

SEQ ID NO: 842 - DNA, 445 bp, Sarracenia psittacina
tctccgagtctctttgtggtcgttcttgttgctcatcgtctcccaaaatttggttttgaagagagagagagagagagagagaaatgggtcgactcgaacatctggaactcgcatcccaagcattatggccctggatcgcgtctttgccgggtttgtggaaacccgcatgggttaatcaggaagtatggtctcatgtgttgcaggcaatgcttccgtagcaatgccaaggaaattggtttcatcaagtaccgctaaatgggtgaagccaagtgcaaatggagctgcattggagaactttttccttttataaggattcattataatataacaagtttctataactactcttttagtaccctgggattttgtcagtttgttatagattctgtgatgttatttttcactgttaatccatgtttaaattgttggtttactgagttctttg

SEQ ID NO: 843 - DNA, 194 bp, Scabiosa columbaria
aaaaatgggacattcaaatgtctggaattcgcaccccaaaagctacggccctggttctcgcacctgtcgggtgtgcggaaacccacatggaatcatcagaaagtatggaataatgtgttgcagacagtgcttccgcagcaatgccaaggagattggcttcatcaagtatcgctaaatggttaattggtcgtgac

SEQ ID NO: 844 - DNA, 221 bp, Scabiosa columbaria
aaaaatgggacattcaaatgtatggaattcgcatcccaaaagctatggccctggttctcgcacctgtcgggtgtgcggaaacccacatggaatcatcagaaagtatggaataatgtgttgcagacagtgcttccgtagcaatgctaaggagattggcttcatcaagtatcgctaaatgggtaattgatcgtgcaagaggatttcaccgaagttacatgaag

SEQ ID NO: 845 - DNA, 476 bp, Helianthus annuus
aggaaatggggcattcaaatgtgtggaactctcatcctaagacctacggtcctggatcccgcacctgtcgtgtgtgcgggaattcccatggcttgatcaggaaatatggtcttatgtgctgcagacagtgcttccacagcaatgccaaagaaatcggtttcattaagtaccgctaaggagtttggaagggtgtgtaccaatggccaatggaaagcttgttttggtgtttttttaattatagtatctaattgtacctttagtttatttttcttgggataacaatgaattgagtgaacttggtttcttgttgcatctttggtgttaagtttaatctttttaagaaaatcaaagaccaattgtgatgttaaaaaaaccaatttttttgaaaatgttgggaaaacaccgtctcgcacacgaaaaaaaccatttttactgaataaacaaagggtctcgcccgcctcggcccattcggctct

SEQ ID NO: 846 - DNA, 402 bp, Helianthus annuus
aacgttcaacatattggctgcggcgttcataggaattgaaggaaatggggcattcaaatgtgtggaactctcatcctaagacctacggccctggatcccgcacctgtcgtgtgtgcgggaattcccatggcttgatcaggaaatatggtcttatgtgctgcagacagtgcttccacagcaatgccaaagaaatcggtttcattaagtaccgctaaggagttccaaagggtgtgtaccgatggccaatggaaagcttgttttggtgtttttttaatgatagtatctaattgtacctttagtttatttttcctgggataacaatgaattgagtgaacttggtttcttgttgcatctttggtgttaagtttaatctttttaagaatatcaaagaccaattgtgat

SEQ ID NO: 847 - DNA, 522 bp, Trigonella foenum-graecum
gtgttacaagaattagggttttttgagatcggcggcgaggaagaaatcgaaggaagccatgggtcactccaatgtctggaactctcaccccaagacctatggtcctggttctcgcacttgccgtgtgtgtggaaactctcatggattaatcaggaagtacggactcatgtgttgcaggcagtgcttccacagcaatgccaaggaaattggcttcattaagtatcgctgaaaagtttagagtcctttggagctgcaaaatgatgccatgccaggatgattttagctattgaagaacttataattttgtagcgttttgttaattcagtcagttatcaaactttagttgtgagactaaacatatttacttcttgcttgattttggatttgatgttattttctctttatccatcactggaattataaactggatttggcatctttgtgcgtggtgtctgttttatgatgtgaatggaaataacttgcctttcatgattttaactttctaaggtatgcttttaaacc

SEQ ID NO: 848 - DNA, 557 bp, Trigonella foenum-graecum
aaagaaatagaaaaccctaattttgattctctgtataaattggtattgttgcagcattgaaaaatccttcacctacctcacaattcttcagctgcggcgcatttgagtttcaccggcgatcaaatcaagcagcgacaaccatgggacactcaaatgtttggaattctcaccccaagacctatggtcctggttcccgcacttgccgtgtctgcgggaattcacatgggttgatcaggaagtatggccttatgtgctgtaggcaatgcttccacagcaatgccaaggaaattggtttcattaagtaccgttgaaaagctgttttctttgccccacccatcttagatttcggcattataatgttctgaggtggttatggttgaagaaactttatgtttgaagaaatttgacaattgttttttgcatctagtttatttgtcagactttatattgttgaatcaaaattgggaatccttttatatacatttgctttttaatattactattgtcctcctatctgttttgttctaacttttttgaaatttacttgaccttgatcc

SEQ ID NO: 849 - DNA, 455 bp, Trigonella foenum-graecum
gggaactaaactaaactaaactaaaccctaatctgaaagcgaacatcaaaccaaacaatgggacacagcaacgtttggaattctcatcccaagacatacggtcctggttctcgcacttgccgcgtgtgcgggaattcacatggattgatcagaaagtatggccttatgtgctgcaggcaatgcttccatagcaatgccaaggaaattggcttcattaagtaccgctgaagagttattgtcacatgccctaccaattttatgttccagcatttgacatgttgtgaggactttatgtttgaagaaacttgacacttttgtgcatttagtttatttgtggaattaagaatcgttttatatatattgccttttactattattcatcttcctatatgcgatcctctatttatttattttgaaatgtaggcaacctttgtcttcaattcttgcagaattta

SEQ ID NO: 850 - DNA, 373 bp, Trigonella foenum-graecum
ctagggttttcaattccaggctcatttctctcgcattttcagagcaatcatgggtcactctaacgtctggaactctcaccccaaaacctacggccctggatctcgcgcctgccgtgtttgtggaaatccccatgccatcatcaggaagtacggcctcatgtgttgcaggcagtgcttccgtagcaatgccaaggaaatcggattcatcaagtaccgttgaagaattttgtatggtgtaaagtaggaaggactttgtccctctttgagccttttgtactatgttcttatttttattttttttgtaattttgaagtaacagatgctgttttgttttggtgaattactaaagtgattgttgaactaagatactttg

SEQ ID NO: 851 - DNA, 390 bp, Triphysaria pusilla
agagaaagtcaccggcggcggcttttgattgaacggaaaacatgggtcactccaatgtttggaactctcatcctaaaacatacgggcctggatctcgcacctgccgggtgtgtggtaacccacatgccattatcaggaagtacggtctgatgtgctgcagacagtgtttccgcagcaacgccaaggagattggcttcattaagtaccgttgatcattgcctgatataaaagctggaagatgagagatggcttgcccttttgattcttctagtctagctttatgttttgattgttttttagcttttatccttcaatgaaagattaaactttcgtttgttttgtgaaccattctgttacatttttatgttttaatggatgaagttgaacatt

SEQ ID NO: 852 - DNA, 333 bp, Triphysaria pusilla
catcggcggctgtgcttgatttagcagaacgacaagaaaagatgggccactccaacgtctggaattcgcaccccaaaacctatggtcccggatctcggacctgccgggtgtgtggtaacccgcatgccataatcaggaagtatggtctgatgtgctgcagacagtgttttcgcagcaacgccaaggagattggctttattaagtaccgttgatttacaaaccttgaagcttggaagatgtgagatataaatagtgtgcattttgatttattaagatgattgttaaactatcttttgttttgtgaacctttatatacatatatgaagttttaat

SEQ ID NO: 853 - DNA, 368 bp, Triphysaria pusilla
taatttccaagaaggaagtacatcggcggctgtgcttgatttagcagaacgacaagaaaacatgggccactccaacgtctggaattcgcaccccaaaacctatggtcccggatctcggacctgccgggtgtgtggtaacccgcatgccataatcaggaagtatggtttgatgtgctgcagacagtgtttccgcagcaatgccaaggagattggctttattaagtaccgttgatttacaaaccttgaagcttggaagatgtgagatataagtagtttgcattttgatttattaagatgattgttaaactatcttttgttttgtgaacctttttatacatttttgaagttttaattgatcaacttaatat

SEQ ID NO: 854 - DNA, 425 bp, Triphysaria pusilla
gagaaagtcaccggcggcggcgtttgattgaacggaaaacatggggcactcaaacgtctggaactcgcatcctaaaacatacgggcctggatctcgcacctgccgggtgtgtggtaacccgcatgccattatcaggaagtacggtctgatgtgctgcagacagtgtttccgcagcaatgccaaggagatcggctttattaagtaccgttgatcattgcctgttatgaaagctagaagatgagagatggcttgccctttgattcttctagtctagttttatgtttgattgttttttagcttttatccttcaatgaaagattaaactttcgtttgttttgtggaccattttgttacatttttatgttttaatggatgattttgaacattcgtattcttgtgctttgcatatccataacatgattctg

SEQ ID NO: 855 - DNA, 476 bp, Triphysaria pusilla
acatataaattgcggctaacctcacaagtcacaaccctaaataccctaaatctctctgctagttccaaagcggttgatcggcgccggcgtttgatttagcagagacagaacaaaaaaatgggccactccaacgtttggaactcgcaccccaaaacttatggtcccggatctcggacctgccgggtgtgtggtaacccgcatgccataatcaggaagtatggtctgatgtgctgcagacagtgcttccgcagcaacgccaaggagattggctttattaagtaccgttaatctgttacaaaccttgagcttgaggctggaagatgaaagatagtttgtgcttttgattgtctatcatagccttttgtttagatttattttagcttatctatctatgaatgattattaatctctcgtttatttttgtgaacctttttgttacattttaagttatatgtatgaacttaattgaaaattaa

SEQ ID NO: 856 - DNA, 390 bp, Triphysaria pusilla
tcggccgcccgggcaggtcggcggcgtttgattgaacgtaaaacatggggcactccaacgtttggaactcgcatcctaaaacatacggccctggatctcgcacctgccgggtgtgtggtaacccacatgccattatcaggaagtatggtctgatgtgctgcagacagtgtttccgcagcaacgccaaggagattggctttattaagtaccgttgaacattgcctgttataaaagctggaagatgagagatggcttgcccttttgattcttctagtctagctttatgttttgatttgtttttagcttttatccttcaattaaagattaaactttcgtttgttttgtgaaccattttgttacattttaagctttaattgatgaacttgaaga

SEQ ID NO: 857 - DNA, 386 bp, Triphysaria pusilla
gaaagtcaccggcggcggcgtttgattgaacggaaaacatggggcactccaacgtctggaactcgcatcctaaaacatacgggcctggatctcgcacctgccgggtgtgtggtaacccgcatgccattatcaggaagtacggtctgatgtgctgcagacagtgtttccgcagcaatgccaaggagattggctttattaagtaccgttgatcattgcctgttatgaaagctagaagatgagagatggcttgccctttgattcttctagtctagctttatgttttgatttgtttttagcttttatccttcaatgaaagattaaacttttgcttgttttgtggaccattttgttacatttttatgttttaatggatgaatttgaacatt

SEQ ID NO: 858 - DNA, 473 bp, Triphysaria pusilla
agcaaccccagaaaaagtcaccggcggcgtttgagcggagagaaaatatgggtcactcaaatgtctggaactctcatcctaaaacatacgggcctggatctcgcacctgccgggtgtgtggtaacccgcatgccattatcaggaagtacggtctgatgtgctgcagacagtgtttccgcagcaatgccaaggagattggctttattaagtaccgttgaacattgcctgttataaaagctggaagatgagagatggcttgccctttgattcttctagtctagctttatgttttgattgtttttagcttttatccttcaatgaaagattaaactttcgtttgttttgtggaccattttgttacatttttaagtttgaatggatgaatttgaacattagtattcttgtgctttgcctatccataacatgattctgaaatgttaacttcataatgtgtggtctaaaaaaaaaaaaaa

SEQ ID NO: 859 - DNA, 388 bp, Triphysaria pusilla
agagaaagtcaccggcggcggcgtttgattgaacggaaaacatggggcactccaacgtctggaactcgcatcctaaaacatacgggcctggatctcgcacctgccgggtgtgtggtaacccgcatgccattatcaggaagtatggtctgatgtgctgcagacagtgtttccgcagcaatgccaaggagattggctttattaagtaccgttgatcattgcctgatataaaagctggaagatgagagatggcttgccctttgattcttctagtctagctttatgttttgatgttttttagcttttatccttcaatgaaagattaaacttttgcttgttttgtggaccattttgttacatttttatgttttaatggatgaatttgaacatt

SEQ ID NO: 860 - DNA, 353 bp, Triphysaria pusilla
caccggcggcggcgtttgattgaacggaaaacatggggcactccaacgtctggaactcgcatcctaaaacatacgggcctggatctcgcacctgccgggtgtgtggtaacccgcatgccattatcaggaagtacggtctgatgtgctgcagacagtgtttccgcagcaatgccaaggagattggcttcattaagtaccgttgatcattacctgttataaaagctggaagatgagagatggcttgccctttgattcttctagtctagctttatgttttgatttgtttttagcttttatccttcaatgaaagattaaacttttgtttgttttgtgaaccattttgttacattttt

SEQ ID NO: 861 - DNA, 387 bp, Triphysaria pusilla
aaagtcaccggcggcggcgtttgattgaacggaaaacatggggcactccaacgtttggaactcgcatcctaaaacatacggccctggatctcgcacctgccgtgtctgtggtaacccacatgccattatcaggaagtacggtctgatgtgctgcagacagtgtttccgcagcaacgccaaggagattggcttcattaagtaccgttgattttttcctattacgaactttgaagctggaagatgagagatggcttgccctttgattcttctagtctatccttatgttttgattgtttttagcttttatccttcaatgaaagattaaactttcgtttgttttgtggaccattttgttacatttttaagtttgaatggatgaatttgaac

SEQ ID NO: 862 - DNA, 386 bp, Triphysaria pusilla
gagaaagtcaccggcggcggcgtttgattgaacggaaaatatgggtcactcaaatgtctggaactctcatcctaaaacatacgggcctggatctcgcacctgccgggtgtgtggtaacccgcatgccattatcaggaagtacggtctgatgtgctgcagacagtgtttccgcagcaacgccaaggagatcggctttattaagtaccgttgatcattgcctgttatgaaagctggaagatgagagatggcttgccctttgattcttctagtctagttttatgtttgattgtttttagcttttatccttcaatgaaagattaaactttcgtttgttttgtggaccattttgttacatttttatgttttaatggatgattttgaacatt

SEQ ID NO: 863 - DNA, 594 bp, Zostera marina
aaataatccataagtcgttcttccgaattccaaatcgccggaaagaaaaagaaggatcgtcatctagggtttgttctttgtcgtctctctctttgatctacgatgggtcacgcaaacgtttggaactctcatcccaagaactacggtcttggatccaggctctgccgagtctgtgggaactcgcatggtttgattcgcaagtatggactcatgtgctgcagacagtgtttccgtagcaacgctaaggaaatcggattcatcaagtatcgttaaattcccagcattcattctagttagaagctgctgcttcttctgttgaaaatgaggatggtggatctacttttttattcattcaatctgttttaaacttattttgtttggatcatgtaatcttatgaaattttaaaccataaatggtgctgtagttgttttttgctcagagattttattttgtttctcagtaaccttaaaattaatatctttattgtcatgtagacttgtattatttatattttccatactagtttattttatgaaatggtaatttcataccaaacatagatacatgatatagttataatattcaaatattta

SEQ ID NO: 864 - DNA, 502 bp, Zostera marina
tcggggagggtttcgtatattttcctataaataatctttacctcctccgactgaaaacaatctcaattttgacggagcaaaatttggattttgaagaaaaaatatgggacatgccaatgtttggaattcgcatccaaagaattacggcctcggctctcgtttgtgccgagtttgtggcaattctcatggtttgatcagaaagtatggattgatgtgctgcaggcagtgttttcgcagcaatgcaaaggaaattggcttcatcaagtatcgttaaagagtgaatcttactgtctgctttgttttttgtcttactgttggattaaatcttccgaagattaaaagttttgaaacctgatcttcattccttgtcctaaatttgtgtctattaactcttttttcaagttgtttgtaatttgcaaatcaaatctataaatgaaagttgttaaattagtagaaaaataggattttatcgatgttttattatataagtttggccttaaat

SEQ ID NO: 865 - DNA, 452 bp, Secale cereale
gccgccgccgccgccatgggacactcgaacgtctggaactcgcaccccaagaactacggccccggatccagggtttgccgtgtctgcggcaactcgcatggcctgatccgcaagtacgggctgatgtgctgcaggcagtgcttccgcagcaacgccaaggacattggcttcatcaagtaccgttaagaatggaaaccaaggaagcaaggactaggaaattatcatcgtcgaactgtggtgcttcatgaggccgatctttatcctataaactatgtaatgaactactattaatgtttgaatcgtagtagaaaaactgtagaaaccatgttggtgtacttctgtttgagcatgtagaaaccgataattctgttactgttgtggctattatgtattaggaaggttgtctctgacattaactaaaaatttaaaaaaaaaaaactaagagtactaga

SEQ ID NO: 866 - DNA, 379 bp, Secale cereale
atgggacactcgaacgtctggaactcgcaccccaagaactacggcccccggactacccagggtttagccgtgtctgcggcaactcgcatggcctgatccgcaaggtacgggctgatgtgctgcagggcaaggtgcttccgcagcaacgccaaggacattggcttcatcaagtaccgttaagaatggaacctcaaggaagcaggactaggaattatcatcgtcgaactgtggtgcttcatcgaggccgatctttatcctactaaactaatgtaatgaactactattaatgtttgaatcgtagtgaaaaaaaccgtagaaaccatgttggtgacttctgtttgtagcatgtgaaacccactaattctgttactgttgtgcc

SEQ ID NO: 867 - DNA, 425 bp, Antirrhinum majus
aaaaagcacgctttgaatacatcactgtgtggcttttgattcagctgatagacgaagaagatggggcacgctaacatctggaacatgcatcctaagaactacggtcctggatctcgcacatgccgtgtgtgtggaaatccccatgggattatcagaaagtatgggctgatgtgctgcaggcagtgcttccgcagcaacgccaaggaaattggcttcatcaagtatcgctaatttgttgatgccgtgccattatgaagggatgcttcttcaaggacctttacagctttttttccgaaccatgaatgtctagtttttcttatgaattaatgtgttgagaattattgttctagttgaaccttattttgtttgagaatagacaagtttaaattttcctattttaatggtttcagctgttctgtttgagc

SEQ ID NO: 868 - DNA, 490 bp, Artemisia annua
accctcaaacggcgctagtctcaaacagtagcagctttcataagaataacaatctgataatcaaatcatgggtcactcaaacatctggaactctcatcccaaaacttatggtcctggttcacgcacatgccgtgtgtgtggaaattctcatgggttgatcaggaagtatggtcttatgtgctgcagacagtgcttccacagcaatgctaaggaaattggtttcatcaagtatcgttaaggacttttgaagatctgatggacaagcgatgactatatatattgcatcagaaggattttgaatgtgttatttacatttcagtatgactaaaacttcttgattgttctcttttcattagacatttttgttttgctattttggtgaaatcaaaaccaaatgctttgagagggttctgaatcctgttatggttaaatgagcatctatgtgctcaacaaacaaatgccggattactatgctattgcaactttgcat

SEQ ID NO: 869 - DNA, 532 bp, Artemisia annua
gggagggtattgcattttcagcactttttttgtgatcaaacggcgcatctgtaagaagaaagaaataatgggtcactcaaacatctggaactctcaccctaagctctacggccctggttctcgtacctgccgtgtgtgtggtaactcacatggactcatcaggaagtatggactcatgtgctgcaggcaatgcttccacagcaacgccaaggaaattggtttcatcaagtaccgttaatcaatcaatggctggaccttttgaagattgcagatttcattttggagtattatgtctaggaactgttggtaatggctggaccttttaaaaatatgttagtttaaaaaaaatggtgttgtaaacgactatgattgagattgcacttaagttcatctgattttgctatatatctggaatcgggggtatgcagatccatatgtggttatgttatttatattatcgtatgccgtttttgctttgttacatttattgagattcagaaaatattgttgcaagtgtccaactatacggaaa

SEQ ID NO: 870 - DNA, 557 bp, Artemisia annua
gggggggctgaaggcctttacatttcaacaacactataaaacccactcattcttgatctccaaaactagggtattgcattttcagcactttttttgtgatcaaacggcgcatctgcagcagtaacaagaaagaaagaaataatcatgggtcactcaaacatctggaactctcaccctaagctctacggccctggttctcgtacctgccgtgtgtgcggtaactcacatggactcatcaggaagtatggactcatgtgctgcaggcaatgcttccacagcaacgccaaggaaattggtttcatcaagtaccgttgatcagttgatggctggaccttttgaagattgcagatttcattttggagtattatgtctaggaactgttggtaatggctggaccttttaaaaatatgttagtttaaaaaaaatggtgttgtaatgactctcatgattgagattgcgcttaagttcgtctgattttgctatatatctggaatcgtggtatgcagatccatatgcggttatgttatttatattatcgtatgccgtttttgctttgt

SEQ ID NO: 871 - DNA, 474 bp, Taraxacum officinale
cggcggggctctcaccggcgctaactccatcgattacggctttcaatcgatctgctgatggggcactcaaacatatggaattctcaccctaagacctatggccctggttcacgcctttgccgtgtgtgtgggaactcccatggattaatcaggaagtatggtcttatgtgctgcagacaatgtttccacagtaatgccaaggaaattggtttcattaagtatcgttaaggatatatgaagatttgaccaagaagagatgattgtatactgaattgaaagggcttctgttatgctttttgcatttagtgtatttgtgatttctttgattgtggtctcttttttgttatttaatgcttttgtagacatgaaaaccatttgtttttaaagtatgaggaacctagtttgttgaaaatttacaggttatttgaatctggtatttatgtgattagttaaatatctaccatatttatttag

SEQ ID NO: 872 - DNA, 457 bp, Taraxacum officinale
cggggctacacaacattagccgcggcattcacagcgatctcctctgcatctaaagttcgaagcatcagattcagatggggcactcaaacatctggaactctcaccccaagacctatggtcctggttcccgactctgccgtgtgtgtgggaactcccatggtttgatcaggaagtacggacttatgtgttgcagacaatgtttccacagcaatgccaaggaaattggtttcatcaagtaccgttaagcaagtttgaagggttatcactggacgaatatgcccaattgaaagcttgtggtgtttttttacaattatagtatctaaattttgttttaactttcatctattttggataacaatgaatgtagttgaatctattatgcctctttaatatatttcaattgacaattttcttgtgggcctttggtgcttaattgttgctaattttttttatcaca

SEQ ID NO: 873 - DNA, 475 bp, Taraxacum officinale
ccatcacagggaaatctagggttttgagttcatcgagtttctgagctcgtcgcctccgtacaacaagaatgggtcattcgaacatttggaactcgcatcccaaaacttacggccctggttctcgtctgtgccgtgtatgtggtaactcacatgggttgatcagaaagtacggccttatgtgctgcaggcaatgcttccacagcaatgcaaaggagattggtttcatcaagtatcgttgattaaccaatgatggaggaacagagcaacatctttgatgagaaggtgattggaaaatcttgatagaattgttagtatcaaacagtttttgtcatgttcattttaagacatatttatggtatttcatgtatgagacaaatgaaaactgctatttaaatattgttgcttgtttctgcatttcaaattccaaccactttcattttcattgttaattatatatatattagactttttgatc

SEQ ID NO: 874 - DNA, 723 bp, Solanum melongena
ctcattgtgaacaaagtgagttctgcaaaaagtagggttttcttgcaaacacagcgcgcagcctcgctcttctgccttgtgaaagatgggtcactccaacatctggaacgctcacccaaagaactacggtcctggctctcgtacctgccgtgtctgtggcaatcctcatgcaattattagaaagtatggactcatgtgctgcagacagtgcttccgcagcaatgccaaggaaattggcttcatcaagtaccgttaaaactttagacgactttctatgaggacctctccatgtggtgctggtagattatatggtattagagctttttgattggcatctcccttcagttaaatgatgtaatgggataattttgatttatgtttaattgtggaaactgcatgtggacctaaagattagcttttaaattgaatattttgttctgtgctttccttgtttctcgattttgattcactcttttccaagggggtattagatgtagccctccagtggttgctttcatggttggaatccttttccattttgctgtttttccaaaagaaaacaaagggcatcgtgcttaaaaggtgtcctagtatttagatttgatgttgggagtaagcaccaaacccactttacagtatgtaaactagcaatgtaggtgctacaatatatgtagtccaacgaaggaaaatagaaacccaaatgttaagagggaccgagtgtgg

SEQ ID NO: 875 - DNA, 410 bp, Gerbera hybrid cultivar
ggttttgaatatctccatttgtgatctcggcgcctccgtacgaagaagaagaatgggtcactcgaacatctggaactcgcatcccaaaacctacggccctggttctcgtacctgccgtgtctgcggtaactcgcatggtttgattaggaagtacgggctcatgtgctgcaggcaatgcttccacagcaatgccaaggaaatcggtttcattaagtatcgctgatttacattgatggtggagcaatcagggcttgcaatcttcaatcgaaaagacgatcttggtaatttgttagtaatatttctgttggattaatgtcatgttttcaattttaaactagttttggcgtcttgtgacaatgtgctactcttttccttgattgaaattgcaacttaattcaccagtctttact

SEQ ID NO: 876 - DNA, 461 bp, Ipomoea nil
gtcgatcacttctcagtctcctacattgatcgaaagctacgcagtaacgcagagcagaagagcatgggtcactccaacatctggaacgcacaccccaagaactatggtcctggttcacgggcttgccgcgtgtgcgggaattcgcatgggataattaggaagtatggattgatgtgctgcagacaatgcttccgcagtaatgctaaggagattggatttatcaagtatcgttaagggcaggatcatttgtggtcactattgcaatggaggtgaaattggatggcgaaggaattggggtagattttcatgtagtaatgctctagttgtaaactagtaattttcactggttaccttttatttagtgaaattttacagactcagtttaaacatgtgaaaagactgtttgtttctttaaacaatataacttgttgattttatgattttactttatatgtgagaat

SEQ ID NO: 877 - DNA, 430 bp, Ipomoea nil
ctccccagattcttaagcgttagggttttctcgcagctgctctgtggtcgaagcctcaacgaggaagagagaacaatgggacactctaacatctggaacgctcaccccaagaactacgggcccggctcgcgcgcatgccgtgtctgtggtaattctcatggaattatcagaaagtatgggcttatgtgctgcagacagtgcttccgaagcaacgccaaggaaatcggattcatcaagtaccgctgaagaatccagagacccttgcaatcaagaacaagaacaatttgatatttgatcaatatgtagttgccttaagaacagattataatatctgatatttaatggttttgtttttccatattatcaaactagctgttatcttgtttaaagattgttgaactttgtgatatgttttctcccatcttttaaa

SEQ ID NO: 878 - DNA, 464 bp, Orobanche aegyptiaca
catcggcggcattagatcgagcagaaagaggaaagatggggcactccaacgtctggaattctcaccctaaaaactacggtcctggatcccgcgcttgccgggtttgcggcaacgtccatgctatcatcagaaagtatggtatcatgtgctgcagacagtgcttccgtagcaatgccaaggaaattggctttattaagtaccgttgagggatggctgtcatatttcaacttggaagctgaaaagatgagagatagtttgccttttgatcatcttgttttagctttcagtttgatgatatggatgtcatgagaatcattgttctacttaagattgttctagagtctctcttttgttttgtgaaccagcttgttatattttatgattctatggatgaacatgcttaaaaattaatattttgcaggaaatgcaaattttattctgataacaaaaaaaaaaaaaaaaaa

SEQ ID NO: 879 - DNA, 488 bp, Orobanche aegyptiaca
cgactagtaatttcagagcgagtcatcggcggcgttagatcgagcagaaagaggaaagatggggcactccaacgtctggaattctcaccctaaaaactacggtcctggatcccgcgcttgccgggtttgcggcaacgtccatgctatcatcagaaagtatggtatcatgtgctgcagacagtgcttccgtagcaatgccaaggaaattggctttattaagtaccgttgaggcatggatggccgtcatatttcaacttggaagctgaaaagatgagagattgtttgccttttgatcatcttgtgttagctttctgtttgatgatatggatgtcatgagaatcattgttctacttaagattgttctagagtctctcttttgttttgtgaaccagcttgttatattttatgattctatggatgaacatgcttaaaaattaatagtttgcaggaaatgcaaattttattctgataattaaaaaaaaaaaaaa

SEQ ID NO: 880 - DNA, 435 bp, Orobanche aegyptiaca
tgcaattagggttttcatacaacgcagcgccgccgctctcgcttatagcttctgaagaagaaagatgggtcactctaacatctggaatgctcaccctaagaactacggccctgggtctcgtacctgccgtgtctgtgggaatcctcatgcaattataaggaagtatggactcatgtgctgcagacagtgcttccgcagcaatgctaaggaaattggcttcatcaagtaccgttaaatcttcaatatgagcttctacgaggacctctctctgagagtggtgctggtggatatctggaattagagttttaaattttcatctcccttcagctaaatgatgtaatgggataattttgattttatgttagcttctgaatttaaccgctgttggtggatctaaagactagtacctttaatctgaatattggttctatacct

SEQ ID NO: 881 - DNA, 526 bp, Solanum tuberosum
gtaccgggaatcggcattacggccggggctcattgtgaacaaaagtgagttctgcagaagtagggttttcttacaaacacatcgcgcagcctcgcttttctgccttgtgaagatgggtcactctaacatctggaacgctcacccaaagaactacggccctggctctcgcacatgccgtgtgtgtggtaatcctcatgcaattattagaaagtatggactcatgtgctgcagacagtgcttccgcagcaatgccaaggaaattggcttcattaagtaccgttaaaatctctgatatgagcatctacgaggacctctacatgtggtgctggtagatatatgccattagagctttttgatttgcatctcccttcagttaaatgatgtaatgggataattttgatttatgtttaacttttggaagtgaactgctatgtggacctaagaaagactagctttttaaatttaatattttgttctatacattcctaattttttgtttttcgtttactcattgcttctcaagctc

SEQ ID NO: 882 - DNA, 806 bp, Solanum tuberosum
gtaattagggtttttgatatatcagaaagcgcagcctcagcctctgcctctgctttgtgaagatgggtcactctaacatctggaatgctcaccccaagaactacggccctggttcccgcacctgccgtgtgtgtggaaatccacatgcaattattaggaagtatggactcatgtgctgcaggcagtgcttccgcagcaatgccaaggaaattggtttcattaagtaccgctgatcggggccagtttcagtagaggatctcttcatatggtgcaaagggattcttttgatttatgatagcgtatttatagtggtttgctttcagacttatatatcactgtgtttagctttgtttcagtgttctattttcatttacttttttccctgcgcaattctgttgctggtgggattgaattgatggggatttaagttcccaaatgagtaccttataatttcgttttatgtcaatgaaatagtcagaattatattgtctaaaaaaaaaaaaaaaaaaaatcggcacgaggaatgatctttggcaacactggaaaacatgcaagtaggtcactagaaagcaaaacaagtttgaaatgaaaacaatactgcaatgtagtgccaaaaataaacaaaatgtactaaggagccacaattttgttgagctgttcatacaaatcaggtatctgatccttgtaagggtagcacaaagtaatccatgaacttttgtcctctgttatgctcagagcataatagaaacccaaatttctctctcaaccttctttcatcccaaaatttcaagctttcacccgaggta

SEQ ID NO: 883 - DNA, 448 bp, Solanum tuberosum
cagcctcagcctctgctttgtgaagatgggtcactctaacatctggaacgctcaccccaagaactacggccctggttcccgcacctgccgtgtgtgtggaaatccacatgcaattattaggaagtatggactcatgtgctgcaggcagtgcttccgcagcaatgccaaggaaattggtttcataaagtaccgctgatcggggccagtttcagtagaggatctcttcatatggtgcaatgggattcttttgatttatgttagcggatttatagtggactgctttcggacttatcactgtgtttagctttgtttcagtggtctattttcatttacttttttccctacataactctcttttgttagtgggattgaattgatggggatttaagttcccaaatgagtaccttataatatcgttttatgtcaatgaaatagtcagaattatatt

SEQ ID NO: 884 - DNA, 499 bp, Raphanus sativus
ggaatgcattggatggatgcccgggcattgagaagagaagaaacattttctagggttcacgcagacgccgcttgttctttccctctgtgagcagcaaccgacgaaatgggtcatgacaacgtgtggaactctcatccgaagaagtacggtcctggctcacgcacctgccgtgtgtgtggaaactcccacgggctgatcaggaagtatggtctcaactgctgcagacagtgtttccgcagcaatgccaaggagattggattcatcaagtatcgttaatgaaagcaccagttcttgattgatgcttatgatacacaaacatgatggcgtcaataaattggctctgaagcttttttagttttttttcatttttgtatcgaataagttggtggacaagacctatgtattttgtcttaaaagcttatgtttcaatggaacaatgctatatgatcaaaatatctatatgatttttgcaagtgaatgacataatcttggttgtaaa

SEQ ID NO: 885 - DNA, 416 bp, Raphanus sativus
gagaagaaacattttctagggttcacgcagacgtgcttgttctctccctctgtgatcagcaaccgacgaaatgggtcatgacaacgtgtggaactctcatccgaagaagtacggtcctggctcacgcacctgccgtgtgtgtggaaactcccatgggctgatcaggaagtatggtctcaactgctgcagacaatgtttccgcagcaatgccaaggagattggattcatcaagtatcgttaatgaaagcaccagttcttgatcgatgcttatgatatacacaaacatgatggcgtcaatcaattggctctgaagcttttttagtttttctttaatgcatttcattttttatatcgaataagttggtggacaaggcctatgtatttgtcttaaaagcttaagtttcaatggaacgatg

SEQ ID NO: 886 - DNA, 453 bp, Solanum phureja
ggagaggtattgagtaattagggtttttgatatatcagaaagcgcagcctctgcctctgcctctgctttgtgaagatgggtcactctaacatctggaatgctcaccccaagaactacggccctggttcccgcacctgccgtgtgtgtggaaatccacatgcaattattaggaagtatggactcatgtgctgcaggcagtgcttccgcagcaatgccaaggaaattggtttcattaagtaccgctgatcggggccagtttcagtagaggatctcttcatatggtgcaaagggattcttttgatttatgatagcgtatttatagtggtttgctttcagacttatatatcactgtgtttagctttgtttcagtgttctattttcatttactttttttcctgcacaattctgttgctggtgggattgaattgataccttataatttcgttttatgtc

SEQ ID NO: 887 - DNA, 477 bp, Solanum phureja
tccctcattgtgaacaaaagtgagttctgcagaagtagggttttcttacaaacacatcgcgcagcctcgcttttctgccttgtgaagatgggtcactctaacatctggaacgctcacccaaagaactacggccccggctctcgcacatgccgtgtgtgtggtaatcctcatgcaattattagaaagtatggactcatgtgctgcagacagtgcttccgcagcaatgccaaggaaattggcttcattaagtaccgttaaaatctctgatatgagcatctacgaggacctctacatgtggtgctggtagatatatgccattagagctttttgatttgcatctcccttcagttaaatgatgtaatgggataattttgatttatgtttaacttttggaagtgaactgctatgtggacctaagaaagactagctttttaaatttaatattttgttctatacattcctaattttttgtttttc

SEQ ID NO: 888 - DNA, 467 bp, Tamarix hispida
cggcacgagggccgaacaggaggagagaagaagaagaagaagaaaagagaagagaaagatggggcactccaatgtctggaactctcatcccaagaactacggtccgggatctcgcacctgccgtgtgtgtgggaactcccacgcaatcatccgtaagtatggactgatgtgctgcagccagtgcttccgtagcaacgctaaggaaatcggattcatcaagtaccgctaaggagccgagggagatcttcaacaagcagtttggaagtttctctccgagttttgcgttatcatggtgtttgattgagttttagaatgttgaccgctggaactttatagtatcaattttcccattttgaactgctttgttgacttatggatgtgatttagacgccaaatactgcccttgtgtcattgatgttgctatgatagtattataatattcagttcaattctgctccaaaaaaaaa

SEQ ID NO: 889 - DNA, 758 bp, Nicotiana tabacum
ttctcgtgaacaaagtgagtcctgcaattagggttttcatacaacgcagcgccgccgctctcgcttatagcttctgaagaagaaagatgggtcactctaacatctggaatgctcaccctaagaactacggccctgggtctcgtacctgccgtgtctgtgggaatcctcatgcaattataaggaagtatggactcatgtgctgcagacagtgcttccgcagcaatgctaaggaaattggcttcatcaagtaccgttaaatcttcaatatgagcttctacgaggacctctctctgagagtggtgctggtggatatctggaattagagtttttaaattttcatctcccttcagctaaatgatgtaatgggataattttgattttatgttagcttctgaatttaaccgctgttggtggatctaaagactagtacctttaatctgaatattggttctatacctttccattttgacatttttgtcatactttttccttactgtttcctcaccaccttccagcgttctctctcagtaacagatgagggagtaatcactgtcacagcaagttagcttggctatatgaatctttgccatgctgatgcataatattcttcagactcctaacaagttcatataacaccaaaaaatcatacaccaatatgcttccagtgttacgtaggttagccattttactaatgttctctttctttcgctgtaacaagtatgtgtttgtcatattgacgagacaaaagaatgtttttt

SEQ ID NO: 890 - DNA, 612 bp, Nicotiana tabacum
taaggcgggctttctcgtgaacacaaagtgagtcctgcagttagggttttcatacaacgaagcgccgcctctctcgcttacagcttctgaagaagaaaaatgggtcactctaacatctggaatgctcaccctaagaactacggccctgggtctcgtacctgccgtgtctgtggtaatcctcatgcaattataagaaagtatggactcatgtgctgcagacagtgcttccgcagcaatgccaaggaaattggcttcatcaagtaccgttaaatcttcaatatgagcttctatgaggacctctctcggagtgtggtgctgatagatgtctggaatgagagttttttccattttcatctcccttcagctaaatgatgtaatgggataattttgattttatgttagcttctgaaagtgaacctttgtgggttgatctaaagactagtacctttaatctgaatatttcttctatactttccatttttatattttcgtctactttttccttttgaagtttgtttcttcatcactttttagcaatctgtctcagtaacagacttgggatatccgtgaacagttacctttatagtcacttttcatagcaagttatgttgg

SEQ ID NO: 891 - DNA, 527 bp, Nicotiana tabacum
ggggcagtgattagggtttttccatatatttcagaagcgcagtctgcagccgacttcagaagatgggtcactccaacatctggaacgctcaccccaaaaactacggccctggctctcggacctgccgcgtatgtggcaatccacatgccattattaggaagtatgggcttatgtgctgcaggcagtgcttccgcagcaatgcaaaggaaattggcttcattaagtaccgttaatggaattcagtttccatggaggatctttctccagatggtgtgatgcgattattttgattatgtttgcatgtactcgaagtgaattgctagacttaaaagatctttgtgtttagctttgtttcagttttctatttctatttactctcctacgtaactttgtttcgtcaagatatttttggaaaaatgagtagcttataatttcgttggatgtgaaatgtagtagtcagaaacatattgtcgagagatttattatcaaatataagaactatcatatgcttgcctgtgtttgttccg

SEQ ID NO: 892 - DNA, 483 bp, Amaranthus tuberculatus
ccatttctccccattcgtcgtcaagagtgtgctagcctgctagggtttttccgaagccgagcggcgctacaatcttcaacgaatttttctaaaatcttgatttcatagcaaaaatggggcattctaacatctggaattctcaccctaagagctatggacctggatctcgcgcttgccgtgtttgtggaaatcctcacgcaatcattcgcaagtatggattgatgtgttgcaggcaatgcttccgtagcaatgctaaggagattggtttcatcaagtaccgctgaaccatagcatatggttggatctacagcaggatctgattttgaagtttttatagactagattatgtttatgcattatatcttctgtgttgtgacctctaaacgtccggcaatcggcacaactgaagcttttgtggttttgacatttttataaactattgaatgtaaaagattctaattctgcagagaatataaatccccc

SEQ ID NO: 893 - DNA, 2254 bp, Ambrosia trifida
aacccaattcatccatccatatcttcagttgagcagagctttaattgaagatacagaacaaacaatattaataaatttggcgcgaaattggttggaattgtgaattgggttgtaatattattattgttattgtaatcgaatgacgggaattgaagtgggtagatggaatattattgtgagatgtgtgtcggtgatggtgatggtgatgatgaactgtgtgtttgtgtctggtgaagaaaaagatgaaacgacgacgtattttgttaagttggttaagagtttgtttcaaacggatggatccggttatcatcatgtttggcctgaaatggaatttgggtggaaaattattgttggtagctttataggattttgtggagcagcatttgggagtgtaggtggggttggaggtggtggtatatttgtgccaatgcttaccttaattattggttttgatgctaaatctgctactgcaatctcaaaatgtatgatcatgggtgcagcaggctcaactgtatattacaatcttaagttaaggcatccaacacttgacatgccaattattgattatgatctagcattgcttattcaaccaatgttgatgcttggaataagtcttggagttgcttttaatgtgatttttgctgattggatggttacagttttgttaattattctttttataggcacatcaagcaaggcgttcttccgaggcgttgaaacatggaagaaagaaacaataatgaaaaaggaagctgctaagcgtttggagaacaatggcggcgctgaggcagaatacaagattcttcctggtggtcccagcaatggaagttcaaccaaacccgaaagaacattgaaagaagaggtttcgatcattgagaatgtttgttggaaagaactaggacttcttgtgtttgtttggattgcattcctcggtctgcaaatcgggaagaattatacatctacttgttcaacattgtattgggtgctaaacttatcacagattccaatttctcttggggtatcgggttatgaggcggtttatttatataaaggaacacgaactatatcatcaatgggagattcggccagcaaccttagcataggacagttggttttgtattgttcttgtggtgtgctagctggtttggttggtggcttactcggtctaggtggcggttttatcatgggcccgatgtttttggagcttggagttccgccgcaggtttcaagtgcaacagccacttttgcaatgacgttttcgtcatctatgtctgttgtagaatattaccttctaaagcgttttccggttccttatgccgtttattttctaattgtggccacgattgctgcttggatcgggcaacatgtggtgagaaggctgattgtgatattaggacgcgcttcgttaattatattcatcctcgccttcactatattcgttagcgctatttcattaggtggagttggaatatcagacatgattgggaaatttgagcgacatgaatacatgggattcgaggatctttgcaagtacgaggtctaaaactagattcaaagcatttctccaaactagaatttgtcaagattctatgctatggtgacttgtacctcgtgctgtgaaagatgtactacgccacggaaggcaggcttagcacaagattgtttcatttatgtcaaatccatgttagattcaattgcttttgaaagttattgtcaatacaccgatgatcgtgagacttttgttggacattttatttgttgtttctaacgaaatgaaagtttcgttgagaatgttttgtggttatgttcgagttcatatgtataaatttatctgttgttttaagctattttattgttttcaaaaagaaagactagtgccatttccaagaaacagaaagtcgtttacatgagcattagtttaaaactaaagacaatacattatccatacttgcatttccgacaattccctaggaatcaatgaatcataccctccattgatgaacctctgaagatcgggatcccaccatatatcaatcaacgatacttaatgaagccaatttccttggcattgctgtggaagcattgcctgcagcacatgagcccatacttcctgatcaatccatgtgagttaccacacacacggcaggcacgagaaccaggtccgtataacttaggatgtgaattccagatgtttgagtgacccattcttcttcttcttacggaggcgcagacttaacaaacagacttttgcagt

SEQ ID NO: 894 - DNA, 398 bp, Ambrosia trifida
caaaagctagggttttgaattttgatcgtgtttgagagctcaccgccgccatacgctaagaatgggtcactcgaacatctggaactcgcatcccaaaacctacggccctggttctcgtgcctgccgtgtatgcggtaactctcatgggctgatcaggaagtacggccttatgtgctgcaggcagtgctttcacagcaatgcaaaggagattggtttcatcaagtaccgttgattttcattactgacggagatgacttcttgttggcggtattcaattaaatgatgatctcttgttcttgttaggattgttgatgccaaatgggttttcatcttttgactttttgagatattgtttatggtttatgtttgacagattgaaagtctttactgtttttggt

SEQ ID NO: 895 - DNA, 534 bp, Brassica juncea
gagcttactctcacaaagaaacattctctagggtttcgctcgcataacgccgcttgttctttcttctgtgagcaatcgacgaaatgggtcatgacaacgtgtggaactctcatccgaagaagtacggtcctggctcacgcacctgccgtgtgtgtggaaactctcacgggctgatcaggaagtatggtctgaactgctgcagacagtgtttccgcagcaatgccaaggagattggattcatcaagtatcgttaatgaagcaccagttcttgattgatgcttgtaatacgcaaaaatgatggcgtcaatcggttgtctctgaaactgttttagtttttttttaatgtacttcaattttgtggggaggtatcgaataatttggtggacctttctaaatacctatgtaatttctctcaaaagcttactagatttgcaacaatactttacaaacctattacatatgtggtttaataaaaggaattgtcttatatttctaataatataacggacttagttccaattaaattggtatgtc

SEQ ID NO: 896 - DNA, 338 bp, Brassica juncea
cctctagggtttcgcataatacgccgcttgttctttcttctgtgagcaatcgacgaaatgggtcacgacaacgtgtggaactctcatccgaagaagtacggtcctggctcacgcacctgccgtgtgtgtggaaactcccacggcctgatcaggaagtatggtctgaactgctgcagacagtgtttccgcagcaatgccaaggagattggattcatcaagtatcgttaatgaagcaccagttcttgattgatgcttataatacgcaaacatgatggagtcaatcaagtggttgtgaaactgttttagttttgattcatagaaaccccgcggactctgcg

SEQ ID NO: 897 - DNA, 685 bp, Brassica oleracea
cgaaacaaagtttatagaatttactcattaatgggcctttaaaaacggggaggcccatttgtttggttgtacaaaagagaggaccagttataagattcagcttatccctcaaataaacattctctagggttttcgcatacgccgcttgttctttcctctgtgagcaaccgacgaaatgggtcatgacaacgtgtggaactctcatccgaagaagtacggtcctggctcacgcacctgccgtgtgtgtggaaactcccacgggctgatcaggaagtatggtctgaactgctgcagacagtgtttccgcagcaatgccaaggagattggattcatcaagtatcgttaatgaagcaccagttcttgattgatgcttgtaatacgcaaaaatgatggcgtcaatcagttgtctctgaaactgttttagttttttttttaatgtacttcaattttgtggggaggtatcgaataatttggtggacctttctaaatacctatgtaatttctctcaaaagcttaagtttcatggaacaatgctctatatggtcaaaatatcaacgcgattttgtaattgaatgacataatcttggttgtattagacattaaacgcaacaaaagcttaagtgtctaaacaaaaatttgaaacatgaaaatgctttttcaataattgccatgagcttaatacccg

SEQ ID NO: 898 - DNA, 583 bp, Brassica rapa
agcttatccctcaaaataaacattctccagggtttcgcatacgccgcttgttccgacgaaatgggtcatgacaacgtgtggaactctcatccgaagaagtacggtcctggctcacgcacctgccgtgtgtgtggaaactcccacgggctgatcaggaagtatggtctgaactgctgcagacagtgtttccgcagcaatgccaaggagattggattcatcaagtatcgttaatgaagcaccagttcttgattgatgcttgtaatacgcaaaaattatggcgtcaatcagttgtctctgaaactgttttagttttttttttaatgtacttcaattttgtggggaggtatcgaataatttggtggacctttctagatacctatgtaatttctctcaaaagcttactagattctgacccgtctgcacgggttgtttttataactttatattgttcttaatatgaatgtgttatcatactataggagtggaatttatatgttaagattagagatttagatttacaacaatactttacaaacctattacatatgtggtttaataaaaggaattgtcttatatttctaat

SEQ ID NO: 899 - DNA, 597 bp, Beta vulgaris
agggttttctaaaagacagcggcgccgcactctctccattctcttccaacttttctcagaagaagaagaaaatgggtcactccaacatctggaattctcaccctaagagctacggtcccggatctcgtgcttgccgagtttgcggcaaccctcacgcaattattcgcaagtatggtttgatgtgctgcaggcagtgcttccgtagcaacgccaaggaaattggattcatcaagtatcgttaaagtgcagtatgatgtattcgctgctgaagctgtttttgaagatctagacttgttaagctattcatgaatatttttaaaattttgatcttttaaattgtagactgctgaaccgatgtttgatcttaaattttactgtcggatggagtaggcttatattcagaggatttggtttaattgtgttgccaaatacttttatgtctctagtattctgttcagtgttgtgcaagttcagggttgtcgttacttttgagtatatgcttaatttggctgaatggttaataatgaaactaaaaggttaaccatattagaaaaagtaacaattagatataaacagataaaaagaaagtggtgcaat

SEQ ID NO: 900 - DNA, 522 bp, Beta vulgaris
aaatttataaaaccctcatccatctgtcatattctgccctcattcaccagcaattcctaattcataatctaatctagggtttttgctccaaagatcagagcagcgccgagaaaaacctcaaaaacatggggcactctaacatctggaactctcaccctaagagctatggtcctggttctcgcgcttgtcgtgtttgcggaaatcctcacgcaattattcgaaagtatggtttgatgtgttgcagacaatgcttccgtagcaatgctaaggaaattggtttcattaagtaccgctaaagcgtagcatggaaatcctctgcagaagacgacgttttgaagtgttcttattagattaggctatgaatcaattttctatattgtgtgacatttaaagatgtgaagtactcagccatccatattgaaattctagactctgtttaatgtagcaatcttggattttcagagaatcatatcatatctatatatatatctaaagtaaaatccttgaggccaaaaaaaaaaa

SEQ ID NO: 901 - DNA, 501 bp, Beta vulgaris
aatttttagggtttttattcccaaatcagagcgccggaaaaaagaaaaaaatggggcactccaacatctggaattctcaccctaagagttatggtcctggatctcgcgcttgtcgtgtttgcggaaaccctcacgcaatcatccgcaagtatggtttgatgtgttgcaggcaatgcttccgtagcaatgccaaggaaattggtttcatcaagtaccgatgatgcacaatatgactccacagcagaagacgttttatttttttccgtagaccaaaacaatggatcattttaatatctgattttaggcaaaggccactggatatgtatggacagtatggtcctctatattttgttattaaaattttgcacgatttgctgttatgaaaatatagtcttggttattgttttaaaatcgtatgttgtttaagagtctcttggcttgtcttcccatcattttgaaatggatcatgaataattttgcatatagtctcctttattcctc

SEQ ID NO: 902 - DNA, 484 bp, Brassica napus
cggccatttggccggggagggtttcgcatacgccgcttgttccgacgaaatgggtcatgacaacgtgtggaactctcatccgaagaagtacggtcctggatcacgcacctgccgtgtgtgtggaaactcccacgggctgatcaggaagtatggtctgaactgctgcagacagtgtttccgcagcaatgccaaggagattggattcatcaagtatcgttaatgaagcaccagttcttgattgatgcttgtaatacgcaaaaatgatggcgtcaatcagttgtctctgaaactgttttagttttttttaatgtacttcaattttgtggggaggtatcgaataatttggtggacctttctagatacctatgtaatttctctcaaaagcttaatagattctgacccgtctgcacgggttgtttttataactttatattgttcttaatatgaatgtgttatcatactataggagtggaatttatatgtt

SEQ ID NO: 903 - DNA, 466 bp, Catharanthus roseus
cggcacgagggggatacatagaagaaagaaggatggggcactcgaatatttggaactcccatccgaagctatacggccctggatctcgtgcatgccgggtttgcggaaattctcatgggatcataaggaaatatggactcatgtgttgccggcagtgctttcgtagcaatgccaaggaaattggcttcattaagtaccgatgatgcagcctgtttttgcattatgcttggacagagagttttagaagttttggttacaagaagatgaaggccccatatatgtcaccatttcttgtgttattatcagctaggatgttaaactagaatattgagcatgtcttattttactagtagtttcatgtatcctgttgagactttagagtttaacaacaaatttcccattgtaaggcttcaacggaagctggataacagaaattatcgacagtatgaatgaattaaattcggat

SEQ ID NO: 904 - DNA, 546 bp, Chrysanthemum coronarium
agacggcgcaaatctcaaacagcaacagcagcttttcgtagcaacaaattcgcctttcaatacaatgggtcattcaaacatctggaactctcatcccaaaacctacggtcctggttcacgcacttgccgtgtgtgtggaaattctcatgggttgatcaggaagtatggccttatgtgctgcagacagtgtttccacagcaatgctaaggaaattggtttcatcaagtatcgttaaggactttggagatctgacggacaagaagagatggtataatattccatcagaaggattttgaatgtgttgttttacgtttaagtatgactaagacttgttgattgttctctttttcattagacatgtttgttttgccattctggtaaaatcaaaaaccaaatgccttgagagagttgcgaatcctattatgtttaaatgatcatctgcttgcccatcagataaattctcgattactatgctattgcaactttgcgtatcattatgttgtgaccatcagataaatgctcgatttctatgctattgcaactttg

SEQ ID NO: 905 - DNA, 501 bp, Chrysanthemum coronarium
tttcatcatcctgtagacatataaatagcacctaccaccgtcacattttagaaccctcgaacggcgctagtctcaaacggtagcagctttcatagcaatctgatcatctgataatcatgggtcactcaaacatctggaactctcatcccaaaacttatggtcctggttcacgcacttgccgtgtgtgtgggaattcccatgggttgatcaggaagtatggtcttatgtgctgcagacagtgcttccacagcaatgctaaggaaatcggtttcattaagtatcgttaaggacttttgaagatctgatggacaagagatgactatatatattgcatcagaaggattttgaatgtgttatttacatttcagtatgacttaagacttcatgattgttctcttttgattagacatttttgttttgctattttggtgaaatcaaaaccaaatgctttgaatgggttgtgaatcctattatgtttatctatgatatatagattaaaca

SEQ ID NO: 906 - DNA, 448 bp, Chrysanthemum coronarium
tctcagacggcgcaaatctcaaacagcagcagcagtagcaggttttcatagcaacaaattcgcttttcaaatcatgggtcattcaaacatctggaactctcatcccaaaacctatggtcctggttcacgcacttgccgtgtgtgtggaaattctcatgggttgatcaggaagtatggccttatgtgctgcagacagtgtttccacagcaatgctaaggaaattggtttcatcaagtatcgttaaggactttggagatctgacggacaagaagagatggtataatattccatcagaaggattttgaatgtgttgttttacgtttaagtatgactaagacttgttgattgttctctttttcattagacatgtttgttttgccattctggtaaaatcaaaaaccaaatgctttagggagagttgcgaatcctattatgtttaaatgatcat

SEQ ID NO: 907 - DNA, 450 bp, Chrysanthemum coronarium
aaatcatgggtcactcaaacatctggaactctcaccctaagctctacggccctggttctcgtacctgccgtgtgtgtggtaactcacatggattgatcaggaagtatggcctcatgtgctgcaggcaatgctttcacagcaacgccaaggagattggtttcattaagtaccgttgatttgcaccaatgaggagatccgttgagttcaagtcttcaatgaaagatggttttaagtttttgttagcgttgttgatgacaatcagtgttatgtttttaattttaagatagtttttatgattcttgtatgagacggtgagaatgcaactctttgttacttgattttgcgcttcaaatccagaccatcttttgataccgttattgtctgtttgtattttttgacacacttatcttgtgatttgccgtgtttgcaactctttagcttgcttttaac

SEQ ID NO: 908 - DNA, 513 bp, Chrysanthemum coronarium
acactacaaaagccactcattcaccaactccaaaactagggtattgcatttttgtgatcaaacggcgcatctgtaagaaggaagaaagaaatcatgggacactcaaacatctggaactctcaccctaagctctacggccctggttctcgtacctgccgtgtgtgtggtaactcacatggactcatcaggaagtatggactcatgtgctgcaggcaatgcttccacagcaacgccaaggaaattggtttcatcaagtatcgttgatcaagaaacactgtttagggcttcttgggcatttggcaatgtaaggactgttttgaagattgcagatttcattttggagtattattatgtctaggaactgttggtaatgttatgttagttaaaaacaaatgctgtaaacgacttggatgattggaatttagtgtcctgagtttgcgttatatatttggaatcatggcatgcatatccggttatgttatcttattattgtatacccattttggtttgttt

SEQ ID NO: 909 - DNA, 392 bp, Chrysanthemum coronarium
ctagggttttgaaagaagcaagttagcagcagcagcagcctccattttattttctgaagaagaaaagatgggacattcaaacatctggaactctcaccccaaaacctacggccctggttctcgcacctgccgtgtgtgtggtaactcacatggattgatcagaaagtatggactcatgtgctgcaggcaatgctttcacagcaacgccaaggagattggtttcattaagtaccgttaatttgcaccaatgaggaagtcagttcgagttcaagttttcaatgaaagatggttttaagtttttgttagcattgttgatgacaatcagtattatgttttgaatttaaagatagtgtttatgattcgtgtatgagacggtgagaatgcaactcttt

SEQ ID NO: 910 - DNA, 387 bp, Chrysanthemum coronarium
catcaagccgccaagaaagaacagaaatcatgggacactcaaacatttggaactcccatcctaagacctacggccctggttctcgtacctgccgtgtgtgtggcaactctcatggactcatcaggaagtacggcctcatgtgctgcaggcaatgcttccacagcaatgccaaggaaattggtttcatcaagtatcgttgattaatctatggctggacgtggaagtgttggtctctactggattatgcaacttttggtatcttatgtctaggaactgttggtaatgtagtgaaattgttatgttaaacgaatgtggctgtaaacgactctcggatgattgaaattgcacctaagttcgtctgattttgctatattcttttttgtctgt

SEQ ID NO: 911 - DNA, 1008 bp, Chrysanthemum coronarium
taataagatgacataaccggataagcataccatgattccaaatatataacgcaaaatcagacactaaggtgcaattccaatcatccaagtcgtttacagcatttgtttttaactaacataacattaccaacagttcctagacataataatactccaaaatgaaatctgcaatcttcaaaacagtccttacattgccaaatgcccaagaagccctaaacagtgtttcttgatcaacgatacttgatgaaaccaatttccttggcgttgctgtggaagcattgcctgcagcacatgagcccgtactttctgatgagtccatgtgagttaccacacacacggcaggtacgagaaccagggccgtagagcttagggtgagagttccagatgttactgtgtcccatcttcttcttcattcctcatcatccaaacatgacgacaacaatggctgctgctgctacaaccctcctcctcttaaccctcttcacactctcactcgcctccgacatgtccatcttcaacttcaacaaccacaacaacctacgtacagacgaagaagtcaacgtgttgtacgaatcatggctgggccaacatgggaaaacatacaacgccttgggagaaaaagatcgtaggtttgagatctttaaggataatttaaggtttatagatcaacataactcagttgttgacagaagttataaagttgggttgaataagttcgctgatcttactaatgaagagtaccgtacgatgtatactggtgtgagaaagaacaagaacgtaggtttgagtaaggttaaaagtgatagatatgttttaaggtccggtgaatctttgccggaatctgttgattggagaagcaaaggtgctgttgcttctgttaaggatcaaggatcttgtgggagttgctgggcattctcaaccaccggggctgtggaaggtatcaaccagattgttactggcgacttgatttctgtctcagaacaagagcttgttgattgtgatacatct

SEQ ID NO: 912 - DNA, 386 bp, Chrysanthemum coronarium
tgcattttcatcaagccgccaagaaagaacagaaatcatgggacactcaaacatttggaactctcatcctaaaacctacggccctggttctcgtacctgccgtgtgtgtggtaactctcatggactcatcaggaagtacggcctcatgtgctgcaggcaatgcttccacagcaatgccaaggaaattggtttcatcaagtatcgttgattagttgatggcttcacgtggaactgttggtctactggattatgcaacttttggtatcttatgtctaggaactgtttggtaatgtagtgaatttgttatgctgttagttaaaaacgaatgtggctgtaaacgactctcggatgattgaaattgcacctaagttcgtctgattttgcta

SEQ ID NO: 913 - DNA, 523 bp, Chrysanthemum coronarium
aaccctcagacggcgcagatctcaaacagcagcaggagcaagttttcaaatttgcctttcaataccatgggtcattcaaacatctggaactctcatcccaaaacctacggtcctggttcacgcacttgccgtgtgtgtggaaattctcatgggttgatcaggaagtatggccttatgtgctgcagacagtgcttccacagcaatgctaaggaaattggtttcattaagtatcgttaaggactttggagatctgatggacaagaagagatgctataatattccatcagaaggattttgaatgtgttgttttacgtttaagtatgactaagacttgttgattgttctctttttcattagacatgtttgttttgccattttggtaaaatcaaaaaccaaatgccttagagttgcgaatcctattatgtttaaatgatcatctgcttgcccatcagataaattctcgattactatgctattgcaactttgcgtatcattatgttgtgaccatcagataaatgctcga

SEQ ID NO: 914 - DNA, 613 bp, Chrysanthemum coronarium
gatgagagttccagatgtttgaatgacccatgaactctcagacggcgcaaatctcaaacagcagcagcatcagcaggttttcaagtttgcctttcaaatcatgggtcattcaaacatctggaactctcatcccaaaacctatggtcctggttcacgcacttgtcgtgtgtgtggaaattctcatgggttgatcaggaagtatggccttatgtgctgcagacagtgcttccacagcaatgctaaggaaattggtttcatcaagtaccgttaaggactttggagatctgatggacgaagaagagatataatattccatcagaaggattttgaatgtgttgttttacgtttaagtatgactaagacttgttgattgttctctttttcattagacatgtttgttttgccattctggtaaaatcaaaaaccaaatgccttgagagagttgcgaatcctattatgtttaaatgatcatctcatctgcgtgcccatcagataaatgctcgattactatgctattgcaactttgcatatcattatgatgtgaccatatgcttgaccattgaatttaagctaacttttaaacatgtttaaaagccaaaaagacgagtagtgt

SEQ ID NO: 915 - DNA, 459 bp, Chrysanthemum coronarium
gcgggagggtattgtaatctaagcgcagccaacaaccagaaagaaaagaaaagatgggacactcaaacatttggaactctcatcctaagacttacggccctggttctcgtacctgccgtgtgtgtggtaactctcatggactcatcaggaagtacggcctcatgtgctgcaggcaatgcttccacagcaacgccaaggaaattggtttcatcaagtatcgttgattaatggattgctggacgtggaactgttgtctctactggattatgcaacttttggtatcttatgtctaggaactgttggtaatgtagtgaaattgttatgttaaacgaatgtggctgtaaacgactctcggatgattgaaattgcacctaagttcgtctgattttgctatattctgttatgtcgtggtatgcagatccatttgctgttatgttgtcttgtttatcgtataccttt

SEQ ID NO: 916 - DNA, 434 bp, Chrysanthemum coronarium
ctcaaacagtagcagctttgtgatcttcttgtgataagaatcaatcaaatcaaatcatgggtcactcaaacatctggaactctcatcccaaaacttatggtcctggttcacgcacttgccgtgtgtgtggaaattcccatgggttgatcaggaagtatggacttatgtgctgcagacagtgcttccacagcaatgctaaggaaatcggtttcattaagtatcgttaaggacttttgaagatctgatggacaagagatgactatatatattgcatcagaaggattttgaatgtgttatttacatttcagtatgacttaagacttcatgattgttctcttttgattagacatttttgttttgctattttggtgaaatcaaaaccaaatgctttgaatgggttgtgaatcctattatgttttatctatgatatatag

SEQ ID NO: 917 - DNA, 412 bp, Chrysanthemum coronarium
caaacagtagcagctttgtgatcttcttgtgataagaatcaatcaaatcaaatcatgggtcactcaaacatctggaactctcatcccaaaacttatggtcctggttcacgcacttgccgtgtgtgtgggaattcccatgggttgatcaggaagtatggtcttatgtgctgcagacagtgcttccacagcaatgctaaggaaattggtttcattaagtatcgttaaggacttttgaagatctaatggaaaagacatgattatatatattccatcagaaggattttgaatgtgttattttacatttcagtatgacttaagacttcttgattgttctcttttcattagacatttttgttttgctttgaatgggttgtgaatcctattatgtttatctatgatatatagattaaac

SEQ ID NO: 918 - DNA, 527 bp, Cichorium intybus
accgatctccctatataaatactaactttcgttgcatttgccaaaccctaacaaacgctgaacgagattagctgcggcttcttccccgatctcctctgcatctaaagctcgaagcatcagattccgatggggcactcaaacatatggaactctcatcctaagacctacggtcctggatcccgcctctgccgtgtgtgtgggaactcccatggattgatcaggaagtatggccttatgtgctgcagacagtgttttcacagcaacgccaaggaaattggcttcatcaagtaccgttaaggagttttgaagggtaatcagtggatcatatatgatgcccgattgaaagcctttggtgtttttgctattatagtatctatgttttcctttaattgatctctttgggataacaatgaatgtagctggatcttttatgctcatttaatattttaaattggaaaaatttctcgtggacatctgccctgtttgtgtttaatttcaattaatgttagttaacttgctttgtatct

SEQ ID NO: 919 - DNA, 539 bp, Cichorium intybus
cctctcaagttttgaaaagccaaaatctagggttttgagttcatcgagtttccgagctcgtcgcctccgtaagcaaagaatgggtcactcaaacatttggaactcgcatcccaaaacttacggccctggttctcgtctctgccgtgtatgtggtaactctcatgggttgatcagaaagtacggacttatgtgctgcagacaatgcttccacagcaatgcaaaggagattggtttcattaagtatcgttgattcatgatgatagagcaatgaagtaacaatttgagggaaaagatgatcttaagattagttttcttatcttcacttaaagacatgtttatgttgatgattattcatgtatgagactcagacactgaaagtgctgttaatttttgttgcttgattatgcgcttcatattcctgctaagtttagtatgttttttcatattattttcaagattatcttgttgatgttttccattgaaaatatatttgaagtatggaaaataaatgaatgggcgtgtgttggattattgacctg

SEQ ID NO: 920 - DNA, 389 bp, Cirsium arvense
gtctgaaagtgcaaaatctaggttttgaattcatcgagtttccgagctcatcgcctccgtacacgaagaaatgggtcactcgaacatctggaactcccatcccaaaacttacggccctgggtctcgtacctgccgtgtatgtggtaactcacatgggctgatcagaaagtacgggcttatgtgctgtagacagtgctttcacagcaacgcaaaagagattggtttcattaagtatcgttgatttgcaccaatgaggggagcagttgaagttgagccatcttcaatgaaaagatgattctgatatattgttagtaacaatcagttttctcatcttaacttttaagactgctttgtgattcatgtatgacaatgatataactgaaattcta

SEQ ID NO: 921 - DNA, 651 bp, Cirsium arvense
tcagtttctctgtttcaaagctcggcgcctccgtaagaagaagaaaaatgggtcactccaacatctggaactcgcatcccaaactatacggacctggttcccgtacctgccgtgtatgtggtaactcgcatggactgatccgaaagtacgggctcatgtgctgcagacaatgcttccacagcaatgccaaagaaattggtttcatcaagtatcgttgattctatcagaggttccaatctccattcagaagtatgatatctggaaactgttggaaaatgtagtctttcagttttaaactaatgctgatgtctctgttaagactttttgttgagtgaaattgcacctttctattccctatgtttgctataattatattattattattattactttgttattgaaagttatcaaaaaagaaaaaagtacaaacccaaagttccaaatcacgacgaacaaacaaaataatcatccttaacaaaccaatcgagatcgagaatataaatatcacttgcgaagttgtttgaccttgtgccatccttttttacaggaatcaccaacaatctttgcacccttttgaaagatcttcttaagctcctcggctctgtccttcacttgattctcgaaactacccatctgatttgagagtgatat

SEQ ID NO: 922 - DNA, 377 bp, Cirsium arvense
gggttttgaaaataaattcattgggcgcctccggaagaaggaagaaggaagaagaagaagaatgggtcactcgaacatctggaactcgcatccaaaactatacggacctggttctcgtacctgccgtgtatgtggtaactcgcatggattgatccgaaagtatggtctcatgtgctgcagacaatgcttccacagcaacgccaaggaaattggtttcattaagtaccgttgattctatcggaagctgcagtcttcaatcagaagtatgatatcaggaaaccgttggtaattttgggaaatgtagtctttcattttaaactaatgttgatgtctatgttaagattaagactttttgttgagtgaaattgcacctttac

SEQ ID NO: 923 - DNA, 751 bp, Citrus clementina
  Sequence also found in Organisms: Citrus sinensis
gtcacaattagcatttgcattgcggagaagagtgcggcagcagagtagagcagagcaggacaggacaggagagaagagatgggtcactccaacgtatggaattcgcatcccaagacctacggccctggatctcgtgcttgccgcgtttgcgggaaccctcatgcgattatcagaaagtacggcctcatgtgctgcaggcagtgcttccgcagcaacgccaaggagatcggtttcgtcaagtaccgctgaagaagatggctgtcaaggctttgcagtggactgtggagcatacctaggaatggagaaattttcagttttcatgtgatttctttttagtttttcacaagtagcataaagcttgtgaatcaattagagcttgaactttgtagatggatttctttgctgtcttaatatgactgccaatcttattactttaatgttctcttatgtatggagtgcaagagtgtcttatagttttctcttgcttttggagtattaacatgttaaatgatacctgatctgtgggaaatttatgcccgttttatcaagaaaaaattactaccaatgcccaccatgggcggcaggtggcctctcggtatttcgggcgtccagcttcagcagctgacaaagccgaagagttttaaaatatgattttaggtatttagctacttcgttatcagcaatcacttgttcaaaagtcatcgaactggtaggatcttagggaaagagattacaagtataatatctgcct

SEQ ID NO: 924 - DNA, 668 bp, Citrus clementina
aaattcctcggcagattgtagggttttacacaagcttaagcgaaccggctcttctctttgttaaagaagaagaaaacaatcgatcatgggtcactccaacgtttggaactctcaccccaagacttatgggcccggttctcgcgcttgccgggtttgtgggaaccctcatgcaataatcaggaagtatgggctcatgtgctgcagacaatgcttccgtagcaatgccaaggagattggttttgttaagtaccgctaaatgattaacatgttgtcaacatcggaaggggggttaccagtaccatgctgattttgtttcatctgtgatgcctgtagcgaatttctgtttctcaaggattgttaagcgatgttttgtcttaaattgattcaatgtttgacaaagcaattgttggactaagaatatcattgatcattcttattaaggtttaatcattctcacatcttggtgctgagttatttttgttctttcactgtatcatcaatccagctcagtgattttaaattggttgaaatcaagccaacagtgaatgatattgatcatacactgagcgtgtcttttcctctgtttcctatcttttggtaaatattagagtattgagcaattttttctaatagagctgctttatatgttaatgcaaaattttgtgcga

SEQ ID NO: 925 - DNA, 414 bp, Conyza canadensis
ctaaaaaacagcggcgccgcactctctccattctctttcaactttcctcagaagaagaagaatatgggtcactccaacatctggaattctcaccctaagagctatggtcccggatctcgtgcttgccgagtttgcggcaaccctcacgcaattattcgcaagtatggtttgatgtgctgcaggcagtgcttccgtagcaacgccaaggaaattggattcatcaagtatcgttaaagtgcagtatgatgtattcgctgctgaagctgtttttgaagatctagacttgttaagttattcatgaatatttttaaaattttgatcttttaaattgtagactgctgaaccgatgtttgatcttaaattttactgtcggatggagtaggcttacattcagaggatttggtttaattgtgt

SEQ ID NO: 926 - DNA, 1126 bp, Conyza canadensis
tttgtttaaacaagttattgggcctaaagtggctagaaatgaagttagaagttgaacatcttaacatagttatgttatcgagagttgaatgagccttacacaaacaaccaatataaaacctaggtagccgcctacccccgatcaatcaaactgcaaaatcacttgatttactgggttagggttttcagcatttgcaaggcgccgccgaagaagaaggagaaaaatgggtcactcaaacatctggaactctcaccctaaactttacggtcctggttctcgtacctgccgtgtatgtggaaactcgcatggcttgatcaggaagtatggcctcatgtgctgcaggcaatgcttccacagcaatgccaaggaaattggtttcatcaagtatcgttgattacttgatggttggtgattaaaaggtcataatcttcaaaatggaagttgttatgtagggcactgttggtaatgtttttggcagggactatgtatttacctcagtttaagctaatgtgtgtttagacacaactctttgttaaatgagattgctccttaattcgcctgtcttgctatttaatgttagtactttggttacgaaattttctgctgtcgttttacatgattgttgcattgaaaacaattatattgaggatagtttgttcttacgaattatcaccttcccaaaccattgatagatgttgaccatgaagtttaagatcgagtattgctggccttacttgaaaggatcactttgatattaagtgaacttagttgtttgtacaattgtttgtgttagaaggctaaatgttttaacagctttcttatatgctttcaaatcgaaaatggctttttcaaatctctgagtttaagtttcgactttaagttgagcctatctatactcaagtcacaccagagtcttaattaaggtttgtcaaaatgttatggattcaagttttaagttggccttcgctcaccttcatatatatgattgcttgtactttaactttcacttttgtgtttaggtgtcagtttaaccatttttacctaagtttaactttcccattttccatttagattatattctcatttgattttaacttttcacatcatgtaatctaagtaatctttg

SEQ ID NO: 927 - DNA, 470 bp, Gossypium hirsutum
aattccagtctcatttctctcgcattttcagagcaatcatgggtcactctaacgtctggaactctcacccccaaacctacggccctggctctcgcgcctgccgtgtttgtgggaacccccatgccatcatcaggaagtacggtctcatgtgttgcaggcagtgcttccgtagcaatgccaaggaaatcggattcatcaagtaccgttgaagaattttgtatggtgtaaagtaggaaggactttgtccctctatgagccttctgtagtatgttattatttttatttttttgaatttgaaagaacaagatgctgttttgttttggtgaattaccaaagtgattgttgaactaagaatactttgtggttcctcaatgaagtaatcatactggtttaatttggtattttctttattgttaagtgcgcttattgattgtcattgcaatgtgatgatcttgttgattattggaaaa

SEQ ID NO: 928 - DNA, 1825 bp, Gossypium hirsutum
aagtgtgtcctaatctggtggaccggttcagttccctggttttaatggtgaactgatttgtcctgcttaccacgaactctgtagcactggcactgtttccatgtccgggcaatgtccaaattcttgtaactttaacggtgactgtgtcaacggaaaatgtcattgctttctgggggtttcatggtcatgattgcagtaaaaggtcttgccccagcaattgtaatgagcgtggaaagtgcctgccaaatggggtatgcgaatgtgaaaacagtcgtacgggcattgattgctccacagccgtttgcgatgaacaatgcagtctccacggtggtgtctgtgacaatggagtttgtgagttccgctgctctgactacgcaggctacacgtgccagaacagctcgactcttctctcgagtctttcggtatgcaaagatgtattagagagggagttatccgggcaacattgcgccccaagcgagcattttccttacaagtttgttttcttgtgactaattgatatggctagctcaatgtcccttaagcttacatgtgtggtggtgttttgcatggtggtgggtgcacccctggctcaaggggccataagttgtggtcaaatcacaagcgccctcgcaccctgcattgcttacttgaaagggaatggtgctggttctgctcccccagcttgctgcaacggcatcagatctctcaactctgccgccaaaacaacaccagaccggcaagcagcttgcagctgcatcaaaagtgcggccaccggcatttctggcatcaactatagcactgcagccggactcccaggcaagtgcggtatcaacatcccttacaagatcagcccttccactgactgcaaaagcattaagtgaagtgtggtcatggaagttgggatcagctaatggaagggaaatagtgatgtcgacagaataaaaatgaatgttaaaaatccatagcggtactattcattgttggagttatcctagttttagagttagtggtaatgtacaaggtcgcatatgcgactatataatactatctttacctactctaaatattaatatcactctcactagttgtttcctctaaaaaaaaaaaaaaaaaaaaaactctaaagcctccttttgcctttcagagctttgatagatcatgggtcactcaaacatctggaattctcaccctaagacatacgggcctggctctcgcgcctgtcgcgtgtgtggaaacccccatgccatcataaggaagtatgggctcatgtgttgcagacagtgcttccgtagcaatgccaaggaaattggattcattaagtaccgttgacgaatttatatggtgtgaagtaggaaagggctttgtccaagtatgagctattgtagtaaggttttggaattcaaagaaaaacttctaagataatgtttttgttgaatctattatgggacattaaagtgtcttaccaggagtgcattattgtttttcaatgaaaggttaatgctagcttgctattaatttgtctatgcaatgtgatgatcctgtttgatttacagcatttcatgtgttactataaatggaattagaggttgagtcttttatacatttgaaacctgggggcaaagcttttgtctcacagtcacatttgattcttgttatttagtattatgtcttgtttatgatgcttcaaggaatggttgtacatggattcaatgcatattccaatgtagttctagtgtttgaaatatgctttgttccatttttgtttctgttgttctcggggttcaaacttgtatatttgatttttctttttatatacttcaattaa

SEQ ID NO: 929 - DNA, 335 bp, Cucurbita pepo
tcttgcaaacacagcgcgcagcctcgctcttctgccttgtgaaagatgggtcactccaacatctggaacgctcacccaaagaactacggtcctggctctcgtacctgccgtgtctgtggcaatcctcacgcaattattagaaagtatggactcatgtgctgcagacagtgcttccgcagcaatgccaaggaaattggcttcatcaagtaccgttaaaactttagacgactttctatgaggacctctccatgtggtgctggtagattatatggtattagagctttttgtattggcatctccttcagttaatgatgtaatgggataattttgattta

SEQ ID NO: 930 - DNA, 440 bp, Eschscholzia californica
ctgaaatatcactgccgattgcggttcgttcttgcttgattactgttctttcttgatcgattcagggttcgttcgcaaatatgggacacgccaatgtgtggaatagtcatccaaaactctatggacctggatctcggacatgccgtgtgtgtggaaacccacacgccattattcgaaagtacgggctaatgtgttgcagacaatgcttccgcagcaacgccaaggaaattggtttcatcaagtaccgctgaagggctaaagaatggagactggttttgttttgctttaatgctttattgtttgaggatgttgtctactttttatcctgaaccgaattctatctaatgtttgcttaaaaatacaaatcttccaattcttgatagctttctttcttggtattaatgatgtttagagattcttgattagaaaaaaaaaaaaaa

SEQ ID NO: 931 - DNA, 425 bp, Eschscholzia californica
tgccgattagggttttattgctttcatcttctagcagtcggcgaacaaatcatggggcacgcaaatgtctggaactctcacccaaagacctacgggcctggctcccgtacctgccgtgtgtgcggaaacccacacgccatcatccgtaagtacggcctaatgtgctgcagacaatgcttccgtagcaacgccaaggagattggtttcattaagtaccgttaaatggcgaaagacgagtggctggttctgtttagcaggcgaaaatgttttgggttatagttgctaagtttttaatttttttcacttaggtttgtactgaaactgagacagttctagttgttgctttgattttgaatgtgactgaaagacaacaagcttgtgttcaatgcagtagtttgttttttagttatcctcttactactatt

SEQ ID NO: 932 - DNA, 239 bp, Eschscholzia californica
gcgaacaaattatggggcacgcaaacgtctggaactctcacccaaagacctacgggcctggctcacgtacctgccgtgtgtgtggaaacccacacgccatcatccgtaagtacggcttaatgtgctgcagacaatgcttccgcagcaacgccaaggagattggtttcattaagtaccgttaaatggacgaaagacgagtggctggatctgttagcaggcgaaatgtttggttatagttg

SEQ ID NO: 933 - DNA, 356 bp, Eschscholzia californica
atggggcacgcaaacgtctggaactctcacccaaagacctacgggcctggctcacgtacctgccgtgtgtgtggaaacccacacgccatcatccgtaagtacggcttaatgtgctgcagacaatgcttccgcagcaacgccaaggagattggtttcattaagtaccgttaaatggcgaaagacgagtggctggatctgtttagcaggcgaaaatgtttgggttatagttgctaagtttttaatttttgtcacttaggtttgaaccaaaactaacagttctagttgttgctttgatattgaatgtgactgaaagttattaagttataaatttttcacggaccataaagaaaaaaaaa

SEQ ID NO: 934 - DNA, 355 bp, Eschscholzia californica
atggggcacgcaaacgtctggaactctcacccaaagacctacgggcctggctcccgtacctgccgtgtgtgtggaaacccacacgccatcatccgtaagtacggcttaatgtgctgcagacaatgcttccgcagcaacgccaaggagattggtttcattaagtaccgttaaatggcgaaagacgagtggctggatctgtttagcaggcgaaaatgtttgggttatagttgctaagtttttaatttttgtcacttaggtttgaaccgaaactgacagttctagttgttgctttgatattgaatgtgactgaaagttactaagttataaatttttcacggaccataaagaaaaaaaa

SEQ ID NO: 935 - DNA, 555 bp, Euonymus alatus
ggcaattagggttttgagctcctcgaggaagtctggtctctgtggcgcagccaattagggttctcgtttccgtctttcgaacagcgaaaaatcaacaatgggtcacgcaaatgtttggaattcgcatcctaagaactacggtcctggttctcgtgcctgccgtgtgtgcggaaaccctcatgcgataattcggaagtatgcgctgatgtgttgcagacagtgcttccgcagcaacgccaaggaaattggcttcattaagtaccgctgaatgatgagaggaaatctttgttggtcggagttttcgtccaaaagtgtggtcggaggagctgtttttttttccttttcccaatgttacctttttcattccaccactgatgtgatccacttgatctaaattttgccaacccatttgaacctgataaaatagtagttgtttggagtatgaattttttaatttttttggttagagttctgatttcttttatctattaacttttattagatgcctggatatgatcaccatttgccccggtttactaaattgataatcatcat

SEQ ID NO: 936 - DNA, 314 bp, Flaveria ramosissima
tgggtcactcgaacgtctggaactcgcatcccaaaacctacggcccgggttctcgtgcttgccgtgtatgtggtaactcacatggactcatcaggaagtatgggcttatgtgctgcaggcaatgcttccacagtaatgcaaaggagattggtttcatcaagtatcgttgattttcaccagcaacagaagatgagttcgtgttagcattattaatgccaattggtttttcatcttttgattttaatatgatatatgtatgacggactgaaagtgtttactagttttgttacttgtttctgcacttaaatctagag

SEQ ID NO: 937 - DNA, 522 bp, Linum usitatissimum
gcactagggttttcagttttgagaaatcagcaacagaagcagcgcagcagctttctactgcgatcagaaatcagccatgggtcaccaaaacgtctggaactctcatcccaagacctacggtcctggttccagggcttgccgtgtgtgcggtaacccccatgcaatcatcaggaagtatggtttaatgtgctgcaggcagtgcttccgcagcaatgccaaggaaatcggtttcatcaagtaccgttgattgagctttggagtaattctgttactggatagtgtcgaagcttgctagatggagttgctgctacttagtatttttacttttgaaatgaagaagtgatgtaattttgtcgaaacatcaaaggttccattgttttgtttgctccagtgacatatgttgaactgcaatgctactcatctttaagccaggataatctttcgttttctgcatatggtgtgccttctgattgattcaagctttcttttatgcttgacgaatatccaattgtcaagtgatcc

SEQ ID NO: 938 - DNA, 692 bp, Linum usitatissimum
gaaggatagacacgggaggaaaaaaagaaaaggatagagagagagagagagagacagacagacagaggcagagacagaccagagagggggagtgcctcttgtcattaatagaagaacagcagcagcgtttcagtttctccggcaagcagatcagccatgggacatcagaacgtctggaactctcacccgaagacttatggtccaggctccagggcctgccgtgtgtgtggaaaccctcatgcgatcatcaggaagtacgggctgatgtgttgcaggcagtgcttccgtagcaatgctaaggagattggtttcatcaagtaccgctaagtgtgctaggagctccttgtagctggaaggccatggagatgctgataatggtgcttaactttcatttgatgtgatgtaatccccgatgaacacgaagattttgaaaaattttgttttcctcaaggcatgttggactagattgcttttcgtcagtgaagcttaattaagtgtcaggttgattggttatacttgtgtcttcaatttgcagcatgctactatgcttttccataactttccatcagtgtcatcaattcgaaccgaactttgaacaccaaaatctctctttgatgcatttcctgcgacttgagactctagattcgtatgctgctcgtaggcgtattcgtccttcgtattcctcaccaaag

SEQ ID NO: 939 - DNA, 579 bp, Linum usitatissimum
gattcctgtgaattccataccaccgaacccctccacatatataacacactgcaatatttcccaatcaccgcagaagagatctagggtttagcgaaatcgccgcttgcctcgtatcataaacagaagaacacagcggcgcgtcagtttctcctgcaagcggatcagctatgggacatcagaacgtctggaactctcacccgaagacctacggtccaggctctagggcgtgccgtgtgtgcgggaaccctcatgcaatcatcaggaagtacgggctcatgtgctgcaggcagtgcttccgcagcaatgctaaggagattggtttcatcaagtaccgctgagtgtgctaggagctcctcgtagctggaaaacaatggatatgccgagattgtgttagctttttgcatttgatgtgatgtactcctaagattttgataattttggtttgctcaagaaatgttagacttgattgtgtttagtcggtgaagcttaattatcctctttggtgtattgcattgttccattcttatggcagcaaatatgctaaaatctgaagcaatgccagcaagcacagttaagggg

SEQ ID NO: 940 - DNA, 452 bp, Linum usitatissimum
gcactagggttttcagttttgagaaatcagcaacagaagcagcgcagcagctttctactgcgatcagaaatcagccatgggtcaccaaaacgtctggaactctcatcccaagacctacggtcctggttccagggcttgccgtgtgtgcggtaacccccatgcaatcatcaggaagtatggtttaatgtgctgcaggcagtgcttccgcagcaatgccaaggaaatcggtttcatcaagtaccgttgattgagctttggagtaattttgttactggatagtgtcgaagcttgctagatggagttgctgctacttagtatttttacttttgaaatgaagaagtgatgtaattttgtcgaaacatcaaaggttccattgttttgtttgctccagtgacatatgttgaactgcaatgctactcatctttaagccaggataatctttcgttttctgc

SEQ ID NO: 941 - DNA, 480 bp, Linum usitatissimum
gcacaagtgcactagggttttcagttttgagaaatcagcaacagaagcagcagcgcagcagcagctttttactgcgatcagaaatcagccagccatgggtcaccaaaacgtctggaactctcatcccaagacctacggtcctggttcccgtgcttgccgtgtgtgtggtaacccccacgccatcatcaggaagtatggtttaatgtgctgcaggcagtgcttccgcagcaatgccaaggaaatcggtttcatcaagtaccgttgattttgctttggagtaattctgttaactgggatgtgtcgaagctttttttagatggagtttgctggattgctacttagtatttttactttcgcaatgaaatgatgtaattttgtcgaaacatcaaggcttccattgttttgtttgctccagtgacatgttgaactgcaatgctctctactcatctttaagcctgaatgttatatcgtttttctacg

SEQ ID NO: 942 - DNA, 449 bp, Linum usitatissimum
gcactagggttttcagttttgagaaatcagcaacagaagcagcgcagcagctttttactgcgatcagaaatcagccatgggtcaccaaaacgtctggaactctcatcccaagacctacggtcctggttccagggcttgccgtgtgtgcggtaacccccatgcaatcatcaggaagtatggtttaatgtgctgcaggcagtgcttccgcagcaatgccaaggaaatcggtttcatcaagtaccgttgattgagctttggagtaattttgttactggatagtgtcgaagcttgctagatggagttgctgctacttagtatttttacttttgaaatgaagaagtgatgtaattttgtcgaaacatcaaaggttccattgttttgtttgctccagtgacatatgttgaactgcaatgctactcatctttaagccaggataatctttcgttttc

SEQ ID NO: 943 - DNA, 1472 bp, Linum usitatissimum
acaacttgaacaatcgttggtggtggcatttcgatggccaaggtcccacctgttacaagaccaagaagtccgttgctgtgagtataaggttgaactacgtgacaaatgcaatgattcaaggaataacaagcagggacagcaagcaattccacttcatagtaattggaggaaagaacatcactttcgaccaactcacaataaccgcggctggagacagtcccaacaccgacggaatccacttgggaagagcttcccaaataaacatccttaacaccaacatcggaacaggagacgattgcatctctgtcggagatggagtttcagatctcaacgtccagaacgtgacgtgtggacccggccatggaatcgcagtgggtagtttgggaaggtacgctaacgaggcaccggtgaaaggaatccacttcaagaactgcacgttgacaaacacatgcaatggtgtgagaatcaaatcatggcctgatctggagacaggttctgcaaccgatataagcttcgaagacatcatcatgaacaacgtctctttcccgatcgtcatcgatcaagtttattgcccctggaacacgtgcaagaaaacagggttgccgtcgaaagtgaaaatatcgggagtgacatacaacaacatacaagggacatctgcaacgccgcagataatacaagtgaattgcagttcagcaaacccctgcgaggatgttaaactctccaatatcaacattcaatctcttactggccctgctgtctctgcttgcgccaacgtcaaacctatcgttaccggcaccatccctcctggttgcgcctaattacaccgctaccggccttctacctactgctactactatttatcacctgattctttgcctctgtaacttcaaatattaaaaattgtattacatttttgtagtgtctggaagccaatggctctaaattttggaataagaattaaatgtactaaattatttattcgagtaatctttcgagctttttggttgtatatgacatttggatcaagaggagaaatgttatgtactgaactacaaacaacacacaacgacattacgaagatgctgcgatcaaacacatcaaatcaagattttggttcgtagttgcgataatggtgattatggatgcatactatctatcaaactgatacttcattaagctcaagcaatcttcggattacatcacatcaaacaaacgttcaacaccgttatcagcatctccatggccttccagctacgaggagctcctagcacacttagcggtacttgatgaaaccaatctccttagcattgctacggaagcactgcctgcagcacatcagcccgtacttcctgatgatggcatgagggttcccgcagacacggcaggccctggagcctggaccgtaagttttcgggtgagagttccatacgttctgatgtcccatggctgatctgcttgccggctccgctgcc

SEQ ID NO: 944 - DNA, 559 bp, Lactuca sativa
gaacactattaaaaagtttttgccttcaaaatcaaactgcaaattctagggttttgaatttctccatttgtgtgctcgagctcgacgccaacgcaagaagaagaatgggtcactcgaacatctggaactcgcatcctaaactatacggacctggttctcgaacttgccgtgtatgtggcaactcgcacggacttatcagaaagtatgggctcatgtgctgcagacagtgcttccacagcaatgccaaggaaattggctttattaagtatcgttgattaatggatggtggaacaatccgacgttgcaattttcaagcagaagcatgtcagtaatcttttagccatgaaaatttggcatttattatttctaaactaatgttatgtttagtgtaagactttgttgatgaagtttggtaagaattgttttaatttcactgtttttctttacacatttttaacgccacaacaatcaaatttaacctaaagttttaaaattgaactgttcaaaaacctttgattttcaaactgtgcttatactctgtaacaattcaaaaaccttc

SEQ ID NO: 945 - DNA, 611 bp, Mimulus guttatus
ccatcaccacgcaattagggttttcgcatcatatcggcgcctcttcctcagttgattccgacttagggtttctcaccggcggagaagaaaaatgggtcacgcgaatatctggaactcgcatcccaagacctacggccctggatcacgcacttgccgggtctgtggaaacccgcatgggttgatcaggaaatacggtctgatgtgttgcaggcagtgcttccgcagtaactccaaggaaattggcttcatcaagtaccgttaatgaagcatggatatcgcagcaggctttgaagttgaagttgttttgaaattcgtagtgcaaacttgaaaagcttgttagttttaagatgttcaaattttgttttccaagttgactttctctcaagacaaattagattatgttggttatgttttatttgtgctaactgctaaatgttgcaaccttttcaatatcgaaactttacttattttctctgtttatggttttaagatatcaactttttcgacagttaggtgatctgtgccttaaaggcaacttgctcagaccaccatggttattcagttgcgtttgattgaagcaatattactctaagcacgattcttatggttga

SEQ ID NO: 946 - DNA, 655 bp, Mimulus guttatus
tttattattttttttaacgcagcaaatttatagaggtgtgagttgagcaattagggtttctttcatacaatacagcggcgcctctttgagaatcgattccgaatatacatacgggctctgagaaatacacagtgagaggcgaaaatgggtcacgcgaacatctggaactcgcaccccaagacctacggtcccggctcacgcacttgccgcgtgtgtggaaacccccatgggttgattcgcaagtatggtctgatgtgctgcaggcagtgcttccgcagcaactccaaggaaattggcttcatcaagtatcgttaatgaagcatggatgcagagggcttgaagtgaagtgcttgtgaagatgcgggatggcctggaaaagttgattttgcagattatgttttatgtttcgttttaaagtttaaatttctctttggatatacaattggttacgttattgctttgaacagtacttggaatgatgcaaaattatttaactagtttattagcacttctattccgctgatatgttgtcaagtcttgtgggatgcaaaatctcttcaaaatttcggcgtggttgctttctctttgcatagtacgatgttacccccaaaaaaatacacaaatttatctctatctgaatttgcagattttcaac

SEQ ID NO: 947 - DNA, 497 bp, Tropaeolum majus
tatgagaatctggtgtttagtggctcctctgcagcgcgactaagtcccatattttcatctacaagcagctcaaccatgggtcacgcaaacgtatggaactctcaccccaaaacctacggtcctggttcgagaacctgccgtgtttgtggaaactctcatgggttgatccgaaagtatggccttatgtgctgcagacagtgcttccatagtaacgccaaggaaattggtttcatcaagtaccgttaattatcttagctcttctcagaacatctggtaatgcatcttgaagattaggagattttgttttcgcaaagtacaattatgtttttattatattagacccttatagggtcttgctggactagaagtgtttgtgttaatgagattgtttgatataatcacttggaatatcataaagtcttctacttattatgcttgccttgaattatatttatactgaatcaaatgtattgaattttaaaaaaaaaaaagtaacg

SEQ ID NO: 948 - DNA, 436 bp, Nicotiana benthamiana
ctcctcgtgaacaaagtgagtcctgcagttagggttttcaagcaacgcagcgccgcctctctcgcttacagcttctgaataagaaagatgggtcactctaacatctggaatgctcaccccaagaactacggccctggctcccgtacctgccgtgtctgtgggaatcctcatgcaattataaggaagtatggactcatgtgctgcaggcagtgcttccgcagcaacgccaaggaaattggcttcatcaagtaccgttaaatcttcaatacgagggcctctctctgagtagatgtctggaactagagttttttccattttcatctcccttgagctaaatgatgtaatgggataattttgattttatgttaccttctcaagtgactagtacctttattctgaatattgttttatacttttccatgtttaccttttcaaa

SEQ ID NO: 949 - DNA, 478 bp, Nicotiana benthamiana
agtgtagacattagggtttttccatacatttcagaagcgcagtctgcagccgaattcagaagatgggtcactccaacatctggaacgctcaccccaaaaactacggccctggctctcggacctgccgtgtatgtggcaatccccatgccatcattaggaagtatgggctcatgtgctgcaggcagtgcttccgcagcaatgcaaaggaaattggcttcattaagtaccgctgattgaaaccagtttccatggaggatctttctccggatggtgcgatgcgattattttgattatgttagcgtgtactagaagttaagacttaaaaaatctgtgtttagctttgtttcagttttctattttatttaccctcctacgcaactttgtttcgtgaagatatttttggaaaaatgagtaacttgtaatttcattggatgtgaaatgtagtcagaaatattgtcgagagatttattttttatac

SEQ ID NO: 950 - DNA, 780 bp, Nicotiana benthamiana
ggccttcttgtgaacaaagtgagtcctgcagttagggttttcatactacgcagcgccgcctctctcgcttacagcttctgaagaagaaagatgggtcactctaacatctggaatgctcaccctaagaactacggccctgggtctcgtacctgtcgtgtctgtgggaatcctcatgcaattataagaaagtatggactcatgtgctgcagacagtgcttccgcagcaatgctaaggaaattggctttatcaagtaccgttaaatcttcaatatgagcttctacaaggacctctttctgactgtggtgctggtagatatctggaattagagcctttttgattttcctctcccttcagctatatgatgtaatgggataattttggttttatgttagcttctgaaagtgaaccgccgtggttggacctaaattctactttaatctgaatatctgttgcaaacttttccatttttgcatttccatctactttttccttttcaagtttgtttcctcatcaccttccagcgatctctctcagtgacacatgtgggagactggttgtgtttgaacagttagcttggctatatcagcaagttagcttggctatatcaatctttgccatgatgcattaaaattcttctgactccaagtacatataacaccaaaaaatcatatacgaaggcgcttccagtcttctataggttagacattttactaatgttctttcttttgttctaaccaaagtatgtgtttgtcaactttgacgagacaagaatggtgttt

SEQ ID NO: 951 - DNA, 434 bp, Olea europaea
ttcacttacaaaccctagcggcatttggttcagcagaagaggaagatgggacactccaacatctggaattctcaccctaagacctatggccctggctcccgcacctgccgtgtgtgtgggaacccccacggtataattagaaagtatgggctcatatgctgcagacaatgctttcgcagcaatgccaaggaaataggcttcatcaagtatcgctaagcgggcaagccaagatttctactggaggaagatttttctcatgtgatgcttttaactatttcagagttaactttttaaatcatcttatcccgtcttcgttcagaaaatgggtgtattgagaatgattattccgagtttataatttaacttgaaattttatgtgaacaacaaattatatttgcgtattttattgtcgtgcccattgctgttatgcatcc

SEQ ID NO: 952 - DNA, 1065 bp, Capsicum annuum
cgcaaaaaaaattaaaattgaaagtgattgcttgaaatattttattaaagttgaggtgtgtggtaaaaatcttcacaaatttaagagaccgactatatattaatcagggcaaacctcactaatttatttaatgccccaataaatagggaaaaaaaaaaaaaatacagtagttaggtgaaagcggggtatttgtgcaaaattgcgttttagggggttaatttgcagcatatcggtatcttgttgggtgataaatgcacaaaatccttgttcaaattagggttttgagaatgcctatataaggtctcattcatcccaaaacaatccttcattgtgagttctgcagagaaagtagggtttactcaatagaaacagcgccgcgcagcctcagttttctgttgaagaagaagatgggtcactcaaacatctggaacgctcaccctaagaactatggccctggctctcgcacctgccgtgtgtgtggcaatcctcatgcaattattagaaagtatggtctcatgtgctgcagacagtgcttccgcagcaatgctaaggagattggatttatcaagtaccgttaagtcatccatcaagtgtgagtttctatgaggatccctcagagaggtgctggtggatatattcaattagagctttttgattctcgtcttctttccgtttaatgatgtaatgggatattttgatttatgaattgccatgtggacctaaagacagtttttagtctgaatcttttgctatactctcttcctatattaaatttttgtttactcttcttcttccaagtctagttacttgttatctttcagtgatccctctctgtggaagatattgaagttaagctatttctagagtttattccgaggttatcactggcctatgtggtgtatatcagtatattaggcatccagtgaacttcaatatccttgtctgtagggcaaagaagttttagaactcaatagtatactagtattttttgcttctgctgtttgctttatatttgcagttttgctggtgtttgttagtgctctggtgcaatctataatgtttggc

SEQ ID NO: 953 - DNA, 579 bp, Plantago ovata
agacttctttttctatagctcaaacctatcgctgctagctctcgtgccgccactctttcaaacgcatccaactttctgtgtgcagagaggaagaaaaaggagaagatgggtcacggcaacatctggaattctcaccccaagacttacggtcctggatctcgtacatgccgggtctgtggaaatccccatggcatcattagaaagtatgggttgatgtgctgcagacagtgcttccgcagcaacgccaaggaaattggtttcattaagtaccgttaaggtgttttcccagtattggagcaactttgcataggagtttctttgatgggaatgttttcgaagatcacttcagtttttttgagattttatcttgtctaggattgtcttgagatatcaatgtaatgacactttcttatcactctatgttgaaactcatttaaattatgaaaaacaagttatatttttaaactttcctagcactgttatcccttacattccccgtggccttcagttcttgaatcagtggctatttctacaagatacaatagacgtttaactttctgtgtgcagagaggaagaaaa

SEQ ID NO: 954 - DNA, 278 bp, Plantago ovata
gggtttcagtttcaccgagaacgaaagggtttagagaacttgagacgccattgtcagcggcaagaggagaattgaaaacatggggcactcaaacatctggaactctcatcccaaaacctacggccctggttcacgcacctgccgtgtgtgtggtaatccccatggaataattagaaagtatggactgatgtgctgcagaccgtgtttccgtagcaatgccaaggaaattggcttcatcaagtatcgctaaaaagtgttctacagtgctcacccggatt

SEQ ID NO: 955 - DNA, 370 bp, Papaver somniferum
tacaaacagtgggccactcgaatgtgtggaactctccaaccccaagaactacggccctggctctcgtgcctgccgtgtctgtgggaatccccatgccatcatcaggaagtatggtctcatgtgttgcagacagtgcttccgcagtaacgcaaaggaaatcggattcattaagtaccgttgaatgtgaaagactgggtttgttttgcgtggagagagatgtagttggcagaccattaaaatggtttagagaagtttttagtctaaatttgaattcagacccaagacattgttattgtttgttttgctttgagatgattttatgatataatgttaccgacttattaagtagacaagaatcatttgtgatgac

SEQ ID NO: 956 - DNA, 566 bp, Chenopodium quinoa
caaaattcagattgctagggttttcagaaacagaagcggcgctttactcttcttgttctagggtttatccgaaatcgtcaatcgaagaagaaaatgggtcactctaacatctggaatgctcaccctaagaactacggtcctggatctcgcgcctgccgagtttgcggcaaccctcacgcaatcatccgcaagtatggtttgatgtgctgcaggcaatgcttccgcagcaatgccaaggaaatcggtttcatcaagtaccgttgaagacctgaagtgtagcattggaatcacagcagaagctgttttaagttttcttaggctaggctttctatttcgtgacctttaaggtgtggactactcagcctgtacggttttgaaatgttaagactttgattttcagagaatataatcctattcacgcttcaatattggagtattacatacttttctgctgttttcaatttaagtcttttgtttttggttggaatcagatatcttgtaattttatactcgacatcatgttaaaatcattaaaatatttcgaactttatttagtttattatttt

SEQ ID NO: 957 - DNA, 444 bp, Chenopodium quinoa
ggttttccagaagaagagcagcgccgtattctctctcctctcaaaggtttctcagtcgaaccaaaaatgggacactctaacatctggaacgctcaccctaagaattatggtcctggatctcgtgcttgccgtgtttgtggcaaccctcacgcaattattcgcaagtatggattgatgtgctgcagacagtgcttccgtagcaacgctaaggaaatcggtttcatcaagtaccgttaaacagctgaagttgtgttatgcacttatggaagaagctgttccggagatctcatactgttatttttaagttttgacttgaaactctagaatgccgaacacattacttgtctttaaattttgttattgaatgtagttggtttagattcttgagtacttggcatttattatgcttctatggtaaatgtgttggttgctttattttaattc

SEQ ID NO: 958 - DNA, 603 bp, Chenopodium quinoa
cagcaattaaaaactcatcacctcactcgctcactcctcccccaacattcagattgctagggtttccagaaacacagcggcgctttactcttcttcttctagggtttatccaaaagcttgaatcggagaagaaaatgggtcactcaaacatctggaatgctcaccctaagaactacggtcctggatctcgcgcctgccgagtttgcggcaaccctcacgcaatcatccgtaagtatggcttgatgtgctgcaggcaatgcttccgtagcaatgccaaggaaatcggtttcatcaagtaccgttaaagacttgaagtgtagcatgggaatcactgcagaagatgttttaagttttcgtagactaggctttctattttgtgatctttaaaggtgtggactattcagcctgtatggttttgaaatgttaagactttgattttcagagaatataatcctattcatgcttcaatattggagtattgcatacttttctgctgtgttcaatttaagtcttttgtttttggttggaattaagatatcttgttattttatactcttaatgtgatgttaaaatctttaaaatatttaagtttactccattatt

SEQ ID NO: 959 - DNA, 320 bp, Scabiosa columbaria
cggtgattttggtggactagggttttgttatgtaaagcgcctcttgctgtaattcgactgaagaacactgcaaaagctagggttttcgatatctcaagttgtaagggaaagagaggatgggtcactcgaacatttggaattcgcatcccaagacctatggtcctggttctcgcacctgccgagtctgtggaaacccgcatgggataatcaggaagtatggaatcatgtgctgtaggcagtgcttccgcagcaatgccaaggagatcggattcatcaagtaccgttgattatgcgatggttttgaagttggttcaacgctg

SEQ ID NO: 960 - DNA, 374 bp, Scabiosa columbaria
tgaattgtctcttgcagaaaaactacttggattgatctagggtttctctgaggaagaaaacaaacatggggcattcaaacatatggaactctcatcctaagagctacggtcctggttctcgtacctgtcgagtgtgcggcaaccctcatgggattataaggaagtatgggattatgtgctgcagacagtgcttccgcagcaacgccaaggaaattggcttcattaagtaccgctgaagtgttggcactagtttgcctcgtctgaagaagaagatatgaagtagaagaagcttttaagcctgcagtttatattttctcgtagtggtttttgaattaagaggctatgactctaattttattcttttagtggtacta

SEQ ID NO: 961 - DNA, 438 bp, Scabiosa columbaria
tttttttcttaactatcagtaattagggtttgtgaggcagcagctgcataagcaaaagatgggacattcaaacatctggaactcgcacccaaagagctatggccctggttctcgtacctgtcgtgtgtgcggtaaccctcatgggatcatcagaaagtatggcattatgtgttgcagacagtgcttccgcagcaacgccaaggagatcggcttcatcaagtatcgctaagcagttaatatgtggtattagaggattccaccgaagtgtcatctagcttgtggttgctctttttgaagtttatcttttacatttcttgtaatgtattcttgaaaccaagaatacattttgaagtttgttaatgcagtaatgagttgaattagataatattaagcaagcagtaacttgttttgttaaattgaatttgtcttttaagttgg

SEQ ID NO: 962 - DNA, 364 bp, Scabiosa columbaria
tctgtgtgtgaaaaagttggtttgatctagggttttttctgaagaagaaagaaacatggggcattcgaacatttggaactctcatcccaagagctacggtcctggttctcgaacctgtcgagtgtgtggtaaccctcatgggataataaggaagtatgggatcatgtgctgcagacagtgcttccgcagcaatgccaaggaaattggcttcatcaagtatcgctgaagggttagcaccagtttgtctatcgcgaagaagaagatatgaagtagaagagtattttaagccctcagtttattatattttctagtagttgtttgttaatgaagagactacgactcttatttcttttggtggttcttg

SEQ ID NO: 963 - DNA, 563 bp, Scabiosa columbaria
gagtcatatttgattatttgtaaataccttaaaacatatcgactaaaaatgatttatgaaaaatcaaaagatagagttagggttctggtaactcatagtatatatactttcttcgcctacatttacaaaccctagcgaattgtctctgtgtgaaaaagttggtttgatctagggtttttctgaagaagaaagaaacatggggcattcgaacatttggaactctcatcctaagagctacggtcctggttctcgaacctgtcgagtgtgtggtaaccctcatgggataataaggaagtatgggatcatgtgctgcagacagtgcttccgcagcaatgccaaggaaattggcttcatcaagtatcgctgaagggttagcaccagtttgtctatcgtgaggaagaagatatgaagtagaagagtattttaagtcctcagtttattatattttctagtagtggttctttaatgaagagactacgactgttatttctttttcgtggttctgtttttctttgatgacggataaatggaatgatacttctactttcttgtgttaatgggag

SEQ ID NO: 964 - DNA, 683 bp, Sciadopitys verticillata
cgaaggcgccgcgcttaggagtcattcgagcttctgagcattcagattttgcagcagagaagggagtgttcgaatcaagttacaatcgaagatggggcatactgcggtttggaattcccaccccaaaacctacgggcctggttcccgcacctgtcgcgtgtgtggaaatccacatggtctaatcaggaagtatggtcttatgtgttgccggcaatgcttccgcagctatgccaaagacattggctttgttaagtatcgttagggagaacaacatattaaagctgctgtaagtttgcttgcagtacttagttctgtagcatggatagcagtaattcaatggaaatatataattctatttggaaagtgcttttcaagatagatttttttgcagatcaagtattgaatttggataacagcggacatgaattgaacacatttcaatttaacattttgattttataatttatggatattcttattttggaacggagaaattacctatttttgtaatttaaatgcatgctatgcgctgaactatgaacaagtaaaactcgtgaattcagaaccaagatagtgagtggattgtatttccttctatatcagttgggtggtcgtgttatttttgccagtttgttttcttgcctatgttcttctactaccgaataagaggtgcacatcccatg

SEQ ID NO: 965 - DNA, 589 bp, Sciadopitys verticillata
acccgtcgaaggaaaagagttgctcggaaagctgctttgtttctgtgtctgtcagaggtttgaatatatagtctcgtgcttgtcaaagatgggccactctgcagtctggaatgctcatcccaagacgtatggaccaggctcgcgtacctgtcgggtgtgtggaaatccacatggattgatcagaaaatatggtcttatgtgttgtcggcagtgctttcgcagctatgcgaaagacattggctttgttaagtatcgttgagtcaattgcagtatttgaatatatggagctggttgcatctttggaaagttctttccagatagctcatttctgtgttggattagatactcttgagttaacatgattcgaatttagtattattgcttttttaatggtggaaagaataatgagagatgttttctttggtatactcaaatgtattgtagaccatgaatatactcctttatggttgaaagatagttgtttgaaacatagaaatagcttcattggggtatttaagggtgtatccaaatagattttatatcctgaaaacattaattaattaatgaattgaaaaggttgctgtgattt

SEQ ID NO: 966 - DNA, 393 bp, Helianthus annuus
gtttcagagctcatcgcctccatacgcagcgaagaatgggtcactcaaacatctggaactcccaccccaaaacctacggccctggttctcgtacctgccgggtatgtggtaactcgcatgggctgatcaggaagtatgggcttatgtgctgcaggcagtgctttcacagcaatgcaaaggagattggtttcatcaagtatcgttaattttcaccgatgaaggagatgagttcttgttggcaattttcaattaaacgatgatttcaagattttgttagcattgttgaatcttttgacttttgagatactgtttatggtttatgtatgacagactgaaagtctttttctgtttttggtacttgattatgaacttcaaatctaaacatgttttggc

SEQ ID NO: 967 - DNA, 470 bp, Helianthus annuus
gtgcaaaatctagggttttgattttatcgagtttcagagctcatcgcctccatacgcagcgaagaatgggtcactcaaacatctggaactcccaccccaaaacctacggccctggttctcgtacctgccgggtatgtggtaactcacatgggctgatcaggaagtatgggcttatgtgctgcaggcagtgctttcacagcaatgcaaaggagattggtttcatcaagtatcgttaagtttcaccgatgaaggagatgagttcttgttggcgattttcaattaaacgatgatttcaagattttgttagcgttgttgaatgttgattccaaatgggttttcatcttttgacttttgagatactgtttatggtttatgtatggcagactgaaagtcttttttctgtttttggtacttgattatgaacttcaaatctaaacatgttttggcatctgatgatctcaattttcatg

SEQ ID NO: 968 - DNA, 485 bp, Helianthus annuus
gaactcgatccactgcggctatcagcttcttgctaacgatgggccactcaaacatctggaactctcaccctaagacctacggtcctggatcacgcacctgccgtgtgtgtgggaattcacatggattgatcagaaagtatggccttatgtgctgcaggcagtgcttccacagcaacgccaaggaaattggtttcatcaagtaccgttaaggcgctgtgaagataatgatgatgatgaattatgatgatgatgtggtaagaattaagatatgagattatttagtgagttgaaatggttttctagtatgtaattgacttcctttattgttctcttgttttggtacttaatggttcttgaatcttttatcttaatgggattttgaattgatcttggcttgatatatcatgagaaatgagaatcatgtgtaattttcttttgtgtgtcacttgatgcattcaagatattataaaactacagattttatt

SEQ ID NO: 969 - DNA, 538 bp, Helianthus annuus
acgcagagtacgcggggactctcaccgtgcaaaatctagggttttggttttatcgagtttcagagctcatcgcctccatacgcagcgaagaatgggtcactcaaacatctggaactcccaccccaaaacctacggccctggttctcgtacctgccgggtatgtggtaactcgcatgggctgatcaggaagtatgggcttatgtgctgcaggcagtgctttcacagcaatgcaaaggagattggtttcatcaagtatcgttaattttcatcgatgaaggagatgagtttttgttggcgattttcaattaaactatgatttcaagattttgttagcgttgttgaatgttgattccaaatgggttttcatcttttgacttttgagatactgtttatggtttatgtatgacagactgaaagtctttttctgtttttggtacttgattatgaacttcaaatctaaacatgttttggcatctgatgatctcaattttcatgatgtgttttggcatctgattgcatatactatcacattatcatc

SEQ ID NO: 970 - DNA, 461 bp, Helianthus annuus
tttaacagcccccgtataaataccacccatcttcattcattggcaaaccctcatcggcgctgaactcgatccactgcgactatcagcttcttgctaacgatgggccactcaaacatctggaactctcaccctaagacctacggtcctggatcacgcacctgccgtgtgtgtgggaattcacatggattgatcaggaagtatggccttatgtgctgcaggcagtgcttccacagcaacgccaaggaaattggtttcatcaagtaccgttaaggcgctggtaagataatgatgatgatgaattatgatgatgatgtggtaagaattaagatatgagattatatagttagttgaaatggttttctagtatctgtttttacttccagtatgtaaccgacttcctttattgttcttttgttttggtacttaatggttcttgaatcttttatcttaatgggattttg

SEQ ID NO: 971 - DNA, 406 bp, Helianthus annuus
gtttcagagctcatcgcctccatacgcagcgaaaaatgggtcactcaaacatctggaactcccaccccaaaacctacggccctggttctcgtacctgccgggtatgtggtaactcgcacgggctgatcaggaagtatgggcttatgtgctgcaggcagtgctttcacagcaatgcaaaggagattggtttcatcaagtatcgttaattttcatcgatgaaggagatgagttcttgttggcgattttcaattaaacgatgatttcaagattttgttagcgttgttgaatgttgattccaaatgggttttcatcttttgacttttgagatactgtttatggtttatgtatgacagactgaaagtgtttttctgtttttggtacttggttatgaacttcaaatctaaac

SEQ ID NO: 972 - DNA, 407 bp, Helianthus annuus
tcggcggggacacaacattagccgcggcattcacagcgatctcctctgcatctaaagttcgaagcatcagattcagatggggcactcaaacatctggaactctcaccccaagacctatggtcctggttcccgactctgccgtgtgtgtgggaactcccatggtttgatcaggaagtacggacttatgtgttgcagacaatgtttccacagcaatgccaaggaaattggtttcatcaagtaccgttaagcaagtttgaagggttatcactggacgaatatgcccaattgaaagcttgtggtgtttttttacaattatagtatctaaaatttgttttaactttcatctattttggataacaatgaatgtagttgaatctattatgcctctttaatatatttcaattgac

SEQ ID NO: 973 - DNA, 502 bp, Helianthus annuus
tttaacagcccccatataaataccacccatcttcattcattggcaaaccctcatcggcgctgaactcgatccactgcggctatcagcttcttgctaacgatgggccactcaaacatctggaactctcaccctaagacctacggtcctggatcacgcacctgccgtgtgtgtgggaattcacatggattgatcaggaagtatggccttatgtgctgcaggcagtgcttccacagcaacgccaaggaaattggtttcatcaagtaccgttaaggcgctgtgaagatgatgatgatgaattatgatgatgatgtggtaagaattaagatatgagattatatagtgagttgaaatggttttctagtatctgtttttacttccagtatgtaatcgacttcctttattgttcttttgttttggtactcaatggttcttgaatcttttatcttaatgggattttgaattgatcttggcttgatatatcatgagaaaagagaaacatgtg

SEQ ID NO: 974 - DNA, 416 bp, Helianthus annuus
gtttcagagctcatcgcctccatacgcacgcgaagaatgggtcactcaaacatctggaactcccaccccaaaacctacggccctggttctcgtacctgccgggtatgtggtaactcgcatgggctgatcaggaagtatgggcttatgtgctgcaggcagtgctttcacagcaatgcaaaggagattggtttcatcaagtatcgttaattttcaccgatgaaggagatgagttcttgttggcgattttcaattaaacgatgatttcaagattttgttagcgttgttgaatgttgattccaaataggttttcatcttttgacttttgagatactgtttatggtttatgtatgacagactgaaagtctttaccgtttttggtacttgattatgaacttcaaatctaaacatgttttggc

SEQ ID NO: 975 - DNA, 405 bp, Helianthus annuus
gtttcagagctcatcgcctccatacgcagcgaaaaatgggtcactcaaacatctggaactcccaccccaaaacctacggccctggttctcgtacctgccgggtatgtggtaactcacatgggctgatcaggaagtatgggcttatgtgctgcaggcagtgctttcacagcaatgcaaaggagattggtttcatcaagtatcgttaattttcatcgatgaaggagatgagttcttgttggcgattttcaattaaacgatgatttcaagattttgttagcattgttgaatgtcgattccaaatgggttttcatcttttgacttttgagatactgtttatggtttatgtatgacagactgaaagtctttactgtttttggtacttgattatgaacttaaaatctaaac

SEQ ID NO: 976 - DNA, 799 bp, Solanum lycopersicum
gaagatgcacaaaatgtttattaatatccttcgtcaaattagggttttgactgcctatataacctcgctttcgtcccaaaatcatccctcattgtgaacaaagggagttctgcaaaagtagggttttcttgcaaacacatcgcgcagcctcgcttttctgccttgtgaagatgggtcactctaacatctggaacgctcacccaaagaactacggccctggctctcgcacatgccgtgtatgtggtaatcctcatgcaattattagaaagtatggactcatgtgttgcagacagtgcttccgcagcaatgccaaggaaattggcttcatcaagtaccgttaaaaatcttgaatatgagtttctacgaggacctctacatttggtgctggtagaagacatatggcattagagctttttgatttgcatctcccttcagttaaatgatgtaatgggataattttgatttatgttttaacttttggaagtaactgctatgtgaacctaagaaagactagcttttaagattttatattttgttctatacattcctaatttttagattttcaagttcaacttacattgatatttctctgtatgtctgaatacctatcagtccctgccaatacatgagatttcataattaggtacccataaaaaaagtcggttagttaggcagtccgtatgttggggtgttataggcactgtattatgtgaaactaacgacaagtctttaaaacttatctgaaaatatgcaaaaaatcatatccaaaacttaatttgaagaagactaatataaacac

SEQ ID NO: 977 - DNA, 404 bp, Tragopogon dubius
gtcgggagggcaaaaactagggttttgagttcattgcgtttcagtgctcgtcgcctccgtacacgaagaatgggtcactcgaacgtctgaaactctcatcccaaaacttacggccctggttctcgtacctgccgtgtttgtggtaactcgcatgggttgatcagaaagtatgggctcatgtgctgcaggcaatgctttcacagcaacgccaaggaaattggtttcattaagtatcgttgattgacaacaatgatggagtaatggagcaacatctttgatgaaaagatgatcccatgatcttgttagttttgtcggcatcaatcagttttttttctactctaaagacgtgtttatgctttatgtaatgagacacccaaacatatatttgatttgtgttgtttggt

SEQ ID NO: 978 - DNA, 210 bp, Triphysaria pusilla
catcggcggctgtgcttgatttagcagaacgacaagaaaacatgggccactccaacgtctggaattcgcaccccaaaacctatggtcccggatctcggacctgccgggtgtgtggtaacccacatgccataatcaggaagtatggtctgatgtgctgcagacagtgtctccgcagcaatgccaaggagattggctttattaagtaccgtt

SEQ ID NO: 979 - DNA, 346 bp, Triphysaria pusilla
tggggcactccaacgtttggaactcgcatcctaaaacatacggccctggatctcgcacctgccgggtgtgtggtaacccgcatgccattatcaggaagtacggtctgatgtgctgcagacagtgtttccgcagcaatgccaaggagatcggctttattaagtaccgttgatcattgcctgttatgaaagctagaagatgagagatggcttgccctttgattcttctagtctagctttatgttttgattgtttttagcttttatccttcaatgaaagattaaactttcgtttgttttgtggaccattttgttacatttttaagtttgaatggatgaatttgaacatt

SEQ ID NO: 980 - DNA, 387 bp, Utricularia gibba
gcctccgcgaatgggtcactccaacatctggaacgcgcatcccaagacctatggcccaggctcgcgcacatgccgtgtctgcgggaatccccatggaattattcgaaaatacgggctgatgtgctgcaggcagtgcttccgcagcaacgccaaggagattggcttcattaagtaccgttgatccaggagcaagctgcttcccaaatttcgtgagagggatgtgtcatgcttctgaatctgggttcttttagttatcatttgacaaaagtctccatgttttccttctgaaactgcgtattagttgttttcgtttcatgaaacctgcactctcagtggccaattgttcactattactggtttccattccaaaagaattctccaaaaaaa

SEQ ID NO: 981 - DNA, 386 bp, Valeriana officinalis
tctcggagaagagtgaaaatgggacacgcaaacatctggaactctcatcctaagagttatggacctggttctcgcacctgccgggtgtgtggaaacccacatggtttgatcaggaagtacggcattatgtgctgcaggcagtgcttccgcagcaatgccaaggaaatcggattcatcaagtaccgttaatttggttggggattagtaggatggacatgaagaggcaaagcgaaggttcttgattatatgactagttttctttattcaagtatgaacacttcattttacttgttagtgccaagatattatggattttgtgtacgcttttctttttgatacttttctccatcttaaaacttgaattgcataagttttggtttatcgtc

SEQ ID NO: 982 - DNA, 488 bp, Valeriana officinalis
tagcagcgaggaagagatagaaaaatgggacatgcaaacatctggaactctcaccccaagagctacggccctggttctcgcacctgccgtgtgtgtggaaaccctcatggtttgatcagaaagtatggaataatgtgctgcaggcagtgctttcgcagcaatgccaaggaaattggattcatcaagtaccgttaaggtctctactctactggagatttgccggcttttcattttgttgaagaatgttataaactttattattagttctatagttctatattgaggcatgtatttggaatgagactaattgtcacctctttgattttcttgaattgaacacattctttcggttttgcacacattttcttgatttcttcaatcgaacacgtttctgtcggtacatgtaggtcgacattgtatggaattcttgatttgttcagttgatacatgtaagtcagacatttgtatggaagaatgttggtgttttc

SEQ ID NO: 983 - DNA, 373 bp, Vicia sativa
ctagggtttttatttttgagatcgctgctgcttctccgtttcccctaatcgcaaatcgaataagccatcatgggtcactccaatgtttggaattctcaccccaaaacctacggacctggttctcgcacctgccgtgtgtgtggaaactctcatggattgatcaggaagtacggactcaattgttgcaggcagtgcttccatagcaatgccaaggaaattggtttcattaagtatcgttgaagcgccctgtccatttatgctgttgcacttcctcctgccctactgttttacatcttttgttgtcatgttaatcatgccaggatgatttttattttgtggtttttagttaattatgtctgttatcaaacttgag

SEQ ID NO: 984 - DNA, 252 bp, Vicia sativa
atctgagatcaaacatcaaacccaaaaatgggacacagcaacgtctggaattctcatcccaaaacctacggtcccggttcccgcacttgccgtgtgtgtgggaattcgcatggattgatcaggaagtatggccttaactgctgtaggcagtgcttccatagcaacgccaaggaaattggtttcatcaagtaccgttgaagagccattgaaacctaccatgcccctctgccaagttaatgttctgtcataaag

SEQ ID NO: 985 - DNA, 473 bp, Cenchrus ciliaris
agacctcctccttccccgcctccgccgccatgggacactccaacgtctggaactcgcaccccaagaactacggccccggatccagggtttgccgcgtgtgcgccaacccccacggcttgatccggaagtacgggctcatgtgctgcaggcagtgcttccgcagcaacgccaaggacatcggcttcatcaagtaccgctgaaaacttgaggcggtccaaagcatcaccagaatgggagcactgatgcggagcatcttcttggaaccgtcctttgcttagttactatcataatcgcaccatgtaatgaattgtttgggtttaaaatggaccaagcattgtattctggctggcagactcctgcatgctagttgagaatgtagaacatcaatgatcagactaatgtcagtgttattgtgccacattaccgttgctatcgtccctgcacaggagttcctcatcgaaaggttcatgcca

SEQ ID NO: 986 - DNA, 503 bp, Amaranthus tuberculatus
ccctctcatcattttaaacaattgctagggttttccagcggcgttacaattttctgagttttaatctaaagcttcaatcgccgattttgtaatcaaatatggggcactctaacatctggaatgctcaccctaagacctacggccctggatctcgcgcttgccgtgtttgcggaaatcctcacgcaatcattcgcaagtatggtttgatgtgctgcaggcaatgcttccgtagcaatgctaaggaaattggtttcatcaagtaccgttgaagcatagaattggagcgtgcagtctactgcagaagctggttttcaatttttcttagactagactatgaattatttctgtggtgactgtttaaggtttggcattactgaaattatggttttgttattttgacaactattgaatgtagtcacttgaatgttcagagaccataaatctatttgaactgcatatgcttctcttccaattttcatttgttttggttaagcaaacaaggt

SEQ ID NO: 987 - DNA, 1319 bp, Amborella trichopoda
ggggttttcgcgctaccagcctgacaggactatactgttcttcaactcatatggactatattatacttttggccgacttataaatatttcaagttttcaactataaatacggcttttccttcttgagaattagggtttctgcgctagtgtttctcatcgtcatttggcaattagggtttgatattctgcttgtgtctacaaattagggttagggtttgcgttgaactttgaagccatggggcattcaaatgtttggaactcacatcccaagagctatggccctggatctcgaacctgccgagtatgtgggaactcccatgggttgatcaggaagtatggactcatgtgctgcaggcagtgcttccagagcaatgccaatgcaattggctttgtcaagtaccgttgaaggagcatgattcttgatggagaagagtctgctgttccttaaccaaatcggctctttcttttatttattttttcgtgttctctttggaattcggtcctgattttagtgtctcagaagtttttgccatgtactctttactttgaatcgaagagacctgtggttgtattgctgttggtgaattaattgagcaccaaaattttatttagttataagagtcactttaaattgttttgttttttttacctttgcaagggccttatgttatgtactttgggggggggaaaagtatacaatgagaccctttacctttgaaataaggttattatcaccccttgtcatcagatcaggcggcgggctgggctgtggtagtgactacatttttttcaatccagcaacttgatttcaattatgatttattgcaacgggatagtatactagagattatttacctttgttacgaggtttgggtcttttgggttagggaggcgaacatattacatgagaatgaaaaattttatacatggcatcaaccttgtcaaggtgtatcgcaaaaccccattggtaatggatgttatggtgaagcattgaattgatcatttggacacatgcatatgaaaagtaatgcattttaagtttcaaaaatagtatattttgtgacatattaatttagatcgttcatttcaagatttttaagtttttatagattgttttgatcttgtagtatttttttaatcttaaatttcataattaaggtgaggcatgattgggggcattgagcattggaattgtagtccatcaggatttgatggtattttatttctatttaaatttttttctatttagtcctaaagttgtggcctaaacagaatccccatgttcaaagtggcagcaggtgtggggagttttctcttct

SEQ ID NO: 988 - DNA, 246 bp, Ambrosia trifida
gtaaaatgggacactcaaatgtgtggaactctcatcctaagacctacggccctggatcccgcgcctgtcgtgtgtgtgggaattcccacggcttgatcaggaaatatggtcttatgtgctgcagacagtgcttccacagcaacgccaaagaaattggattcattaagcaggaacatacaagacagggtcgggtcgcgatggatacaatgtcaagattctatgaatacaagagaagattacgggaga

SEQ ID NO: 989 - DNA, 500 bp, Amsonia hubrichtii
ctcgagcacagctttggcaaaatttagcggttgacacctccaccaaaagcagaatgggtcactccaacatctggaatgctcaccccaaaacctatggccccggctctcgcgcctgccgtgtttgcgggaactctcatgggataattagaaagtatgggctcatgtgctgcagacagtgcttccgcagcaatgcaaaggagattggattcattaagtaccgctaaagggttgaattggctgctttctggagaaaggatgtttttgtttacaaatgaaactttgttagttacctggagttggaattattgtctttgaagaacaattttgcatgttctgatatgttagtgaacctggagttattaaggatttaacaactttctgctattgaaagtaattaaaggattttatttgcctgaagtattgcatattattcatcgattgcatgatagaaaagcatgcttttgcaaacaataatttacttttggaggttttagactccc

SEQ ID NO: 990 - DNA, 495 bp, Arabidopsis thaliana
attggggttttcaattttatttcgagtgttcgctgttggtcctcgtcttctagcttcgagctctgagaaatcgaaaatcatgggtcactccaacgtctggaattctcatcctaaaaaaatacggacctggatcttgcacctgccgtgtgtgtggaaactcccatggattaatcaggaagtatagtcttaattgctgtagacagtgcttccgtagcaacgccaaggaaatcggattcattaagtaccgttaaagaccaatggtgttatgaggagcaatcatgtgaaactttcaagctttaaaattgtaatggatttatttcgataaggcttttgagctgttgaatcttttagcttctttgttttgaacccaatctttgttttacaaatgattatcatatagatttgagtttctactatttgagatttgtgttgctattatctattactctgttgatagttgcttaagaaccatataacaactgttaaatccttcca

SEQ ID NO: 991 - DNA, 320 bp, Artemisia annua
gggagggtattgcattttcagcactttcttgtcatcaaacggcgcatcttctgcagaaacaaagaaataatcatgggtcactcaaacatatggaactctcaccctaagctctacggccctggttctcgtacctgccgtgtgtgcggtaactcacatggactcatcaggaagtatggactcatgtgctgcaggcaatgctttcacagcaacgccaaggaaattggttcatcaagtatcgttgatcaatcgatggccggaccttttgaagattgcagatttcattttggagtattatgtctaggaactgttggtaatggctg

SEQ ID NO: 992 - DNA, 207 bp, Ocimum basilicum
cggctcatcaattgtaattccgagaggtggtgaagaagaggcgaagatgggtcattctaacatctggaactcgcatcccaagaactatggccctggctcacgcacttgccgggtctgcggaaaccctcacggaatcattcggaaatacggcctcatgtgctgcaggcagtgcttccgcagcaatgccaaggagattggcttcatcaa

SEQ ID NO: 993 - DNA, 574 bp, Catharanthus roseus
cgagacgccgaccacccctctagtgcttgcaggcaagtgcttcctcgatgatcccgtgagagttaccacaaacacggcaaactcgagcggccgctgatactttcttcaccttgagaatcaacaatgggtcactccaacatctggaacgctcaccctaagctttatggccccggttcccgagcctgccgtgtttgtggtaactctcacgggatcatcaggaagtatggactcatgtgctgcaggcagtgcttccgcagcaatgcaaaggagattggattcattaagtaccgctaaggagtttaatggctgcattttggaggatggacgattttaattaccagtgaaatgctgttaaattcttgtttttaagaacaattttgcatgttcaatgtgttagtggacctgagttattatatcactaaacaaattatgctattaacagttaattaaaagattttgttggctatgttgtctgttatgcaaagatttgcatctaagcttatgcaaacgataatttgcttctagcagtcctacactagagtgattgctctcttaagcaactgcaatctacaaa

SEQ ID NO: 994 - DNA, 708 bp, Catharanthus roseus
gcccgaaggcatcagcagcagcagtcaagagctagggtttcatcagagactaccgcggagaagaagaagaagaaggaaacatgggtcactctaacatttggaacgcacatcccaagctttacggtcctggctctcgcgcctgccgcgtttgtggaaactcgcatggaataatcaggaagtacggattgatgtgctgcagacaatgcttccgcagcaacgccaaggaaatcggcttcatcaagtaccgttgagttgatgctggttgcagccacgttcatcatatctcgtaaggatgtcttactccattattagcaggaactgttgttaattcaatggcgaactgtgtaaacatctccttaattcagcaaatctagtactgggattgtccaattagtttttatttcatattatatgcatcttctatggtttacaattattattttcttttgctatcactcaatgcccattttcttctttgacctcgaccagtagttgaaaggttgcaatttgtcatgattcatgagatgtagtgatagcttttcctgatttgactaatttatctcggctggaattgtttaatacatctgttaataaactctctatacatttcttttataataatttgtacgagagagtgtactagaagatatattatactatagtactgctagagaatcaataattgcagtgagaaagtattcttaagta

SEQ ID NO: 995 - DNA, 484 bp, Chrysanthemum coronarium
ttttgaaagaacttgagcctccattttcaaagaagaagaagacgaaaagatgggacacggaaacatctggaactctcaccccaaaacctacggccctggttctcgcacctgccgtgtgtgtggtaactcacatggattgatcaggaagtatggcctcatgtgctgcaggcaatgctttcacagcaacgccaaggagattggtttcattaagtaccgttgatttgcaccaatgagatcagttcgagttgaagtctttaatgaaagatggttttaagtttttgttagcactgttgatggcaatcaatattatgttttgaattttaagatagcgtttatggttcgtgtatgagacagtgagaatgcaactctttgttacttgatcttgcgcttcaaatccagaccatcttttgataccgttattgtctgtttgtattttttgacacacttatcttgtgatttgccgtgtttgcaactctttagcttg

SEQ ID NO: 996 - DNA, 508 bp, Citrus clementina
ataaccaatcttcatagggttcacctcttaagtgagaacgcggcagctctttgctttctgagagaagcaagaatcaatcatgggtcacaccaacgtttggaactctcaccctaagacttacgggcccggttctcgtgcttgccgggtatgtgggaaccctcatgcaataatcaggaagtatggaatcatgtgttgcagacagtgctttcggagcaatgccaaggagattggtttcattaagtaccgctgaaaccgttaaaatttagtctctgacggaggagtggtggctaatcagatgatccaagtggatgcctgtagagatttctttgtgttgaagaacttttgacggatgttactgttttagctgtttttgtgaagtgattgttgggcaaagaaaaatatttacttattactctgaagtttaatttttggtgttcaagttcttttgctgctgctatcaaccactctcaaaagattaatgccatctcttgacattgagccttacttc

SEQ ID NO: 997 - DNA, 800 bp, Conyza canadensis
aaaccctcatctaagcggctgtctattaacaaaccaacaaccagcagctaaagaaagaagaagaagatggggcactcaaacatttggaattctcatcctaaaacctacggtcctggttctcgctcctgccgtgtgtgtggtaactcacacggaataatcaggaagtatggtctcatgtgctgccgacagtgtttccacagcaacgctaaggaaattggtttcattaagtaccgttaagcagttatgaagatcttatggaaaagagacatgctaatatgtgagaggaaatggcttctagttatttttcttaatcacattacagtattgtctatgacttctttatttgcatgtttgttatgctattaaatgtatttctgagtaagctaagaccatatgcttattacaatatttgggaagactactatgttttgagaattatatttagtgtgataccatgtttaatccagttatcttacttatgccgtatgcgggtatagaagttgtctactgtcttgtttgactttattatatttagaaatctaaatcaaatttacaagaaataagcaaaatccttacttattttatagtgcttcgtttataataaattcgaatactgaattggtgtttactgtttagtgttacttcaattttagcagagtcgattaacttggaatagtatttagtgcacaaatcacattttgggtagtgcaatattcaagtagcccttaaatttattatctagttttatatgtacattattgaagatgaaactaaattggcatatccgatgctagttgtgt

SEQ ID NO: 998 - DNA, 487 bp, Conyza canadensis
aaaccctcatctaagcggctgtctattttaacaaacaaacaagcagcagctaaaagaagaagaagaagatggggcactcaaacatttggaattctcatcctaaaacctacggtcctggttctcgctcctgccgtgtgtgtggtaactcacacggaataatcaggaagtatggtctcatgtgctgcagacagtgtttccacagcaacgctaaggaaattggtttcattaagtaccgttaagcagtcatgaagatctgatggaaaagagacatgctaatatgtgaggaaatgggcttctagttattatttttaattacattacagtattgtctatgacttcttcatttgcatgtttgttatgctattaaatgtatttctgaggaacctaagaccaattgcttattttaatatttgggaagactagtatgtttgagaattatatatggtaccatgtttattcaagttatgcataggtatataagttgtcg

SEQ ID NO: 999 - DNA, 756 bp, Cycas rumphii
cggctgagaggagggacttgcgtttgtcgatcactgcatttacagaattggtgattttcgatcatccacttctgcatttacagagcgtgtaggcgttgaatcgagaagatgggtcattcggcggtgtggaattctcatcctaagacctacgggcttggctcccgcacctgccgggtttgtggaaatcctcatggcttggtcaggaagtatggcctgatgtgctgtcgacagtgcttccgtagttacgccaaggatattggatttgttaagtatcgttaagcaaatgaagctatcaactatgggtaaccaggaataagttaccatggtatctgtggcaacttacgaaaatgacacttgtatttggaaaattatttccttacggatagacatttttttggatagacagtttgtggttgagcttatcttacaaaccattggatgaaataatgtgatacattaaattgaattttggatttaagatttttttttccaaaatttgattaagcaggagtcattaatatgtatgtattctctaagcagctttggtttattcatgtgtgttgtcaacatcatcctgcctgttttgtttttaactatattaacaaagtctcatccatatactggatttaataaatagcatttttacattaatgttgaatattgaatgtatctccacattctttaagttcatgtttgaaaacctctcatacttttgggaggtgttattttttaagtggctgaaaataaaatgacggg

SEQ ID NO: 1000 - DNA, 526 bp, Fagopyrum esculentum
ttacaagtgagatctggattgttaatcgccgccgcggaaagagaaaaagatggggcattcaaacgtgtggaattcgcaccccaaaacctatggccctggatctcgcctttgccgggtgtgtggtaactctcacgccataatccgtaagtacggtctcaattgctgcaggcagtgtttccgcagcaacgctaaggagattggcttcatcaagtaccgctgaagagtacacgattcacaaatgagctgatcgacattgagaggggtgtgtacgaagcctgtggccaattacacttgctcttaattgctgtgatagttatcatttgggaatatagattagtttatagaatgcaatgttttctagcgtttatatcaactgtttgatacaattgggtgtttgatcaaatgaatgttgacaacttggttgtttctgaagaggaactaagtgtctgctcgttctgtttcaagtatttgcttccgatttatagttgtctgccaaattttgcattgattcagctatttttgagta

SEQ ID NO: 1001 - DNA, 503 bp, Fagopyrum esculentum
acgtcgggggaggcgaacggcgcgaggttagaaggaagaactcgagagctttcgaacgaccggccattaacatcaaggatgggacactccaacgtatggaactcgcaccccaagacctatggtcctggctctcgtctttgccgtgtgtgcggtaactctcacgctataatccgcaagtacggactcaactgttgcaggcagtgcttccgtagcaatgccaaggagatcggtttcatcaagtaccgttaagctacttcacgagagcagtatcattgccggacaatgctacaagattatgatgaatgttttcagtcgaaattctgttaggttttagttttcttaaagatacaatatttttgtcgatcaaaatgttattttcctgaaacctcttatgttttgaatgttgttaattttgatgaattagtcccaagaactgtttgttgcttgatgaactctattcctctcgtcttctttgaatctgtcatgaatcatttgcaaattac

SEQ ID NO: 1002 - DNA, 454 bp, Fagopyrum esculentum
aaacttgagagcttttcgatcgcctccagaaaaagatgggacattccaacgtttggaattcgcaccccaagacctatggccccggctcccgcctttgccgggtatgcggtaactctcatgctataatccgcaagtacggcctcaattgttgcaggcagtgctttcgtagcaacgccaaggagattggcttcatcaagtaccgttgaagagttatacatgtgagctggttggcgtggagaaagattgacgcatttttaagcttatagtgaactatgtcagctctttttgaattttttagttttgatgagatagtttgattaggttaccaaatctcatgcttatttcttttgaaattttcataaaagacttggtaacttatacatttgctattttcattgtttaagtgaaacaccacgatgctttttgttgcctaagataaatgagtccattttgt

SEQ ID NO: 1003 - DNA, 373 bp, Fagopyrum esculentum
ttgaagaaacttgagagctttcgatcaacagccatcaacctacaggatgggacactcgaacgtctggaactctcaccccaagacatatggtcctggctctcgtctttgccgtgtgtgcggtaactctcacgctataatccgcaagtatgggctcaactgttgcaggcagtgcttccgtagcaatgccaaggagatcggtttcattaagtaccgttaagctattgcaagggagcgatgttattgctggacagtgcttcaagattatgatgaatgatatcagtcaaatttctgttaggttttagttttcaaagatacaatatttttgtcaagtcttaatgttattttcctgaatgtgaacctcttgtgttgattg

SEQ ID NO: 1004 - DNA, 534 bp, Fagopyrum esculentum
ttacaggtgagatctgaattgttaatcgccgccggaaagaggataagatgggacactcaaacgtctggaattcgcaccccaaaacctatggccctggatctcgactttgccgggtgtgtggtaactctcacgcgataatccgtaagtacggtctcaattgctgcagacagtgtttccgcagcaacgccaaagagattggcttcatcaagtaccgctgaagaatacacgattcacaaatgagctgatggacattgagagggtgtacgaagcttgtggccagttacaatagctcttaatggctgtgatagttttcatttgggaatatagaatagtttacagaatccaatgtttattttcctttcgagtttgggactttgttattgatataattggtattcgatcaaatgaatgttgacaacttgcttgtttctgaagggaacgtgtttacttgtctgctcgttctgtttcaagtatttgctgccgatttatagttgtctgccaaattttgcattgattcagctgttttcgagtatg

SEQ ID NO: 1005 - DNA, 422 bp, Linum usitatissimum
gccccttgtcattaacagaagagcaggagcggagccggcaagcagatcagccatgggacatcagaacgtatggaactctcacccgaaaacttacggtccaggctccagggcctgccgtgtctgcgggaaccctcatgccatcatcaggaagtacgggctgatgtgctgcaggcagtgcttccgtagcaatgctaaggagattggtttcatcaaggtataagcctgcaaaatgcaatctgttttcttctaattgagagcttacaataccatggtttcctctgttttcttctaccagtaccgctaagtgtgctaggagctcctcgtagctggaaggccatggagatgctgataacggtgttgaacgtttgtttgatgtgatgtaatccgaagattgcttgagcttaatgaagtatcagtttgat

SEQ ID NO: 1006 - DNA, 489 bp, Panax ginseng
gtggtatcaacgcagagtacatggggcttctaaattcctctgcgacttcaatccgcggcagctctagatcgagaaagcaaggaggagagagagagagatgggacactcaaatgtatggaacgcgcatcctaagacctacggccctggttcacgtgcctgccgtgtttgtgggaaccctcatggattgatacgaaaatacgggattatgtgctgcagacagtgcttcaaaaccaatgccaaggaaatcggcttcatcaagtatcgttagaaggatgtatgccttttcctctacaagaggattttgcccaagcacagtgatggtagtggtttttaatattgattttgcttcatgaatttattgttctgctgtatgtttggagacaatgggttaattggaatgatgtagctcactctagtttattatcgaggatgaagaaatttgtggacacttattatctgcacttgtcatgagttgtctactttataccc

SEQ ID NO: 1007 - DNA, 426 bp, Guizotia abyssinica
cggaatatgccacggaaattccgccattactgccggaggaatttctgcaattttgtgagctcggcgcatccgtaagaagaagaatgggtcactcaaacatctggaattcgcatccaaatttatacggacctggttctcgttcctgccgtgtgtgtggtaactcacatggactgatcagaaagtatgggctcatgtgctgcagacagtgcttccacagcaatgccaaggaaattggcttcattaagtatcgttgattaatttatggtggaaccttcagaggctaaaatcatcaatgcaaggtatgatacctatgaaactgttggagatgtttgtgtatggagaatcatcgtgtttagttttaaactaatgcaagtgtaaacgactttttgttgctattaatatcatttctttggggaaattgttata

SEQ ID NO: 1008 - DNA, 532 bp, Lactuca sativa
ctaagattacgatctcatataaatagaatcacatttcttgcttttgcgaaccctcgcctgcgctaaaactcgatcgactgcggctttgaaattgatctgctgatggggcactctaacatatggaattctcaccctaagacctacggccctggttcgcgcacctgccgtgtgtgtgggaactctcatggtataatcaggaaatatggtctcatgtgttgcagacagtgtttccatagcaatgctaaggaaattggtttcattaagtatcgttaaggggttttgaaggtttgagtaaagaagagatgaaaatttactaaagtggaagggttttatgagcttttttatatttagtatgtttgtgacttcttgattgctctcttcaatttaaggcatttttgttttgatattgaatgtatttggtggacatgaaaaccatttgtttttttaaagtaatgggaagcttagtttgagaatttttatatgtgattggtaatttttctaccttgttaatacttgtatccatgagtctaca

SEQ ID NO: 1009 - DNA, 562 bp, Nicotiana benthamiana
gcagtgattagggtttttccatacattcagaaagcgcagtctgcagccgacttcagaagatgggtcactcaaacatatggaacgctcaccccaaaagctacggccctggctctcgggcctgccgtgtatgtggcaatccacatgccattattaggaagtatgggctcatgtgctgcaggcagtgcttccgcagcaatgccaaggaaattggcttcattaagtaccgctgattgaaaccagtttccatggaggatctttctccagatggtgcgatgcgattattttgattatgttagtgtgtactagaagataattgctagacttgaaagatctgtgtttagctttgtttcagttttctgttttatataccctcctacgcgactgtttcgtgaagatatttttggaaaattgagtagcttattgtagacatagaattactttaatggtcctagtatttttaggtacttatttgggtttattccaatagaatttcactgtattattaattttaattctatttttaaggcacaaaaaattgaaaaatacaaaaatagtttcatta

SEQ ID NO: 1010 - DNA, 448 bp, Orobanche aegyptiaca
ggcggcgttagatcgagcagaaagaggaaagatggggcactccaacgtctggaattctcaccctaaaactacggtcctggatcccgcgcttgccgggtttgcggcaacgtccatgctatcatcagaaagtatggtatcatgtgctgcagacagtgcttccgtagcaatgccaaggaaattggctttattaagtaccgttgaggcatgattgccgtcatatttcaacttggaagctgaaaagatgagagatagtttgccttttgatcatcttgttttagctttcagtttgatgatatggatgtcatgagaatgattgttctacttttaagattgttctagagtctctcttttgttttgtgaaccagcttgttatattttatgattctatggatgaacatgcttaaaaattaatattttgcaggaaatgcaaattttattctgatattaa

SEQ ID NO: 1011 - DNA, 281 bp, Orobanche aegyptiaca
gggttttttccatatatttcagaagcgcagtctgcagccgacttcagaagatgggtcactccaacatctggaacgctcaccccaaaactacggccctggctctcggacctgccgcgtatgtggcaatccacatgccattattaggaagtatgggcttatgtgctgcaggcagtgcttccgcagcaatgcaaaggaaattggcttcattaagtaccgttaatggaattcagtttccatggaggatctttctccagatggtgtgatgcgattattttgattta

SEQ ID NO: 1012 - DNA, 615 bp, Pinus taeda
cagtgttgcatacaacggagcgaagtagaaggagcggcagggcgaggaaggagcgaagtcataccagttaatacgagtttgcgaggtcgaatttggtggtttttttgatcgaagatgcctcactctgcagtctggaattctcatcccaagaaatatgggcccggttcccgcacctgtcgggtgtgtggcaatccacatggcttgattaggaaatatggtcttaattgttgccgacagtgctttcgctcttatgccaaagacatcggatttgtaagtatcgctaggagagatggaattcgttggtgaaggcggtgcaatgttggcagtgatctttcccattatcgagtcaattgaaataattcaattagaaatcggggttttggtttattgtttattattatgttcaaatttcattcttatttcagaacttaccgatgaaaagattgaagtacttcataatttatcaaattttgtcaaggctgattcaagctgatttataactctacataaaggttatatatgtagagctttagtagacaaattttctgaagttccttgaggaatggaatcataatctgtagttgatttaaatccttggttaattggacaacgaaa

SEQ ID NO: 1013 - DNA, 399 bp, Pinus taeda
tataatagttggttatcatcgcaatggggtgagtgttgcatacaacggagcgaagtagaaggagcggcagggcgaggaaggagcgaagtcataccagttaatacgagtttgcgaggtcgaatttggtggtttttttgatcgaagatgcctcactctgcagtctggaattctcatcccaagaaatatgggcccggttcccgcacctgtcgggtgtgtggcaatccacatggcttgattaggaaatatggtcttaattgttgccgacagtgctttcgctcttatgccaaagacatcggatttgttaagtatcgttaggagagatggaattcgttggtgaaggcggtgcaatgttggcagtgatctttcccattatcgagtcaatggaaagaattcgtaggg

SEQ ID NO: 1014 - DNA, 365 bp, Populus trichocarpa
aggcatttccccgttgatcacaagaacgaaatgggtcactcaaatatttggaactcgcatcccaagaactacggtcctggatcccgcacctgccgagtgtgtggaaaccctcatgggataatcaggaagtatggactgctgtgctgtaggcggtgcttcagcagcaatgccaaggaaataggcttcatcaagtaccgctaaatggagagcttgatatctgtttttcgaggcgctgtcagaaatatggtgcgagggagtttctattttcctttctttcatcctcctcagtgatgtaatctgctgaattctgaagtctaactgatctattgtctgttgtcatttttgcgatggaatttgtttagaat

SEQ ID NO: 1015 - DNA, 478 bp, Papaver somniferum
ggtcacgctaatgtctggaattctcatcctaagaactacggtcctggtatctcgtacttgccgtgtgtgtgggaacccacatgctatcatcagaaagtatggactgatgtgctgcaggcagtgcttccgtagcaatgccaaggagattggttcatcaagtaccgttaaggagggataagtaccttacgatggaggaggataaagggaaaagctgaagttatgttttcatggaggatgggttactgaaatgagtctatacctagtaaagtagtattagttagatctgtttgattggtattttgtaagttgaggtgttattgacatcattattccatgttttgatccgaatgttatactggctatcaacatcagattcttatattttaattttgctcaatcagatcttctatgtcagctacattttcaacttgttaagtacttttgtcaccaatttaagatgtcatggcggaatttttta

SEQ ID NO: 1016 - DNA, 550 bp, Sequoia sempervirens
aagttcggtttaaaaaaaggtcatttgtgaatttggggtttcattttgcgctgcaagtcgcgaggtcgagtcacgagcggttataatcgaagatgggtcactctgctgtctggaattcacaccccaagacctacgggccaggctcacgcacgtgtcgggtgtgtggaaatccacatgggctcatccgtaagtacggtattatgtgctgcaggcagtgcttccgcagctattccaaagagattggctttattaagtaccgttaagagtcggaagatgtaaagctgccggaacttattactatagcattaatggcagtaatttaatagagagttcttgttgggaagtatagaaagttattgttgggaggtaactcccaagtaggcttctatttttgcagatgaattaggctttgtacgtgatactgttatgtgtcaaacatgatttggacaagcggtctttttatactggacaaactttattattttgaaacatagaaatgtcctgttggtggatgcaattgcattacatgttccaaacagttaattattaa

SEQ ID NO: 1017 - DNA, 471 bp, Silene vulgaris
aaaatcattccacctcaaaatctagggtttcccaaacaacaaaccgccgcaattcaattgctagggttcatcatcatcaatcagtaaaacacaatcatgggtcacacaaacatctggaattctcaccccaaactctatggtcctggatctcgcacttgccgtgtttgcggaaaccctcatgctattattcgcaagtatggattgatgtgttgcaggcaatgtttccgtagcaatgctaaggagattggtttcatcaagtatcgttgaagagttgtgctgtgattcacaagcctggaaaaaaatggacctttaagctatggatcatccttatcttctgaactttattttgagggtgtagcatactagaactttttggattctggacttggtttaatgtagttttggattttgcaatcggaatgtaactgataacttgcgatattacttttattttgaatgaagctggctttt

SEQ ID NO: 1018 - DNA, 489 bp, Silene vulgaris
catttgcagcagctgctttgagagcaaacaaatccttcaaaccaaatcaagctccttgtgaaaatgggtcacaccaacatctggaactctcaccccaagctttacggccctggttctcgtacctgccgtgtttgtggaaatccccatgccatcatcaggaagtatggtctcatgtgctgcaggcaatgcttccgcagcaacgccaaggaaatcggtttcatcaagtaccgttaattggatggagcttattcatggtgactgggagctctggctgaagtagaagattttctctcttgatgttgtttaaaggacaaagtagtagtatgcagtgttttttttgttagctctatacatttcttggtgctataatgtcaccatgtcatgactttatcgttaaaatctgcgagcactttgttgggacggatccttattgttcctttgattgaaggttgatctttattgttttcgacttcttggttagaggacgat

SEQ ID NO: 1019 - DNA, 688 bp, Spinacia oleracea
agcgaataaaaacccagtcgacacctctgttttctcctcctcttcaataacaagcgacaccgtttctagggtttatattggaagctttcagagcgccggaaaagcagtaagaaaatggggcactctaacatctggaacgctcaccctaagagctatggtcctggatctcgcgcttgccgagtttgcggaaaccctcacgcaatcattcgcaagtatggtttgatgtgttgcaggcaatgcttccgtagcaatgcgaaggagattggtttcattaagtatcgctaaacatggcatgggaatccactccagaagctgtttgaagttttcttaggctaggcaatgaattttattttctatgttgtgacctttatgtaaaggtctggactactgaacctgtgcggttttgaatttccagacattgctgaatgtagtagacttagattttcagataatataatctatttgtgcttcaatattggagtagtagtacctactcttgtgctgttttacaatatgcaacttttgtattgaagcagggagttttatcaagtagattatgtattttaatttgaatagaagcaaccattttgcatctttcaacttatcttccggagctttctgagaaaacatgttgtactctatatcatcactaaagccaatctctatccctattacaagttttcttaaa

SEQ ID NO: 1020 - DNA, 643 bp, Spinacia oleracea
aaccagtattatctttgtcaatcggcataactttttagggttttccagagaaaagagtagcgccgtattttcgttctcctccatctctgaagaaccaaaaacatgggacactctaacatctggaacgctcatcctaagagctatggtcctggatctcgcgcatgccgagtatgcggtaaccctcacgccatcatccgcaagtatggtttgatgtgctgcaggcagtgcttccgaagcaacgccaaggagattggtttcatcaagtaccgttaaacagatgaagttacagtgaagattcaatgcagaggctgttcttctgaaaatcttatgactttgctttggatcaattaaattttgacctacaatctctagactgctgaagcgaacattaagtatttaaatttcattgttgaaattagttggtgtggatttcagaaatgttattttaatcttgtgttattgttctgggtgttcaatttttgcatatttacgtgaaaatgtcttgtcagtttatatcgaatgcatattaacgtgaaaatgtcttcttgcatatttaagttaaaatgtaaagtgtcctggctgctaacccggggttggttgacccacgtgggttctgacccggtagggactttatcttaccttc

SEQ ID NO: 1021 - DNA, 3340 bp, Spinacia oleracea
cagaagcttctattgaaattgatcagagtgatgataagttagagcaaataaaaatatctaatagacaagaaatttcagatgcagatccgtctataatgaaagaatctgaggttccttcttcaaaagattcagttgcacaagcgtttccttcttctaagcaccggcagaaaaattcctggggttactggggagatcagccaagtgtgtcagatgaaagttccataatttgccgaatatgtgaggaagaggttctaactttacacgtagaagatcattcaaaagtatgtgcagttgctgatagatgtgatcagaaaggcttgagtgtcaatgaacgccttttaagaattgctgacactttagaaaaaatgattgaatgtccttcccagaaggattttcaaccagcagttgggagccctgatgctgcaaaagtatcaaattcaagtgttactgaagagtctgatgctttttctcccaaacttagtgactggtctcgcagaggatcagaggatatgctagactcttttcctgacactgataatgctgtatttatggacgatttgaaaggtttatcatctatgtcttgtaagactcgatttggcccgaagtctgatcagggaatgacaaattcatctgctggaagcatgactcctaggtctcctttgttgacaccaagaaccagtcaaattgatttgcttctatctagtaaaggtggttattcggaacatgaagatcatcctcagatggctgaacttgcagacatcgctcgatgttcagcaaatgccctgtctgaagatgatcgttcaatgaattatttgctcacatgtctagaggatttgagtgttgttgttggccgtcggaaatttgacgcgcttactgtagagacctttggagcccgaattgagaagttgattagggaaaaatatctacaactagttgagttgcttgataatgagaagattgatcttgtgagtactgtaattgatgaagatgctcctttggaagatgatgttgtaagtagtttaagaaccagccctattcattctaccaaggaccgcacgtccattgatgactttgagattatgaaacctataagccgtggtgcatttggtcgggttttcttggctaagaagcgaacaacgggagatctttttgctataaaggtgttggcaaaggctgatatgatccgcaagaatgctgtggaaagtattttagcagaacgcaatattttgatttctgtccgcaacccttttgtggttcgattcttttattcgtttacttgccgtgaaaacttgtatttggtaatggaatatcttaacgggggagatctatattcactgttaagaaatttgggctgcttagatgaagatgttgcccttgtctatatagcagaagtagtacttgctttggaatatttgcactctcttcatgtaattcatcgtgatctgaagccagacaatctattaattgcccatgatggtcatatcaagttgacagacttcgggctatcaaaagttggtctcatcaacagcactgatgatttatctggccccgcagttagtgcgacatccatctttgaagatgatcaaccccaattatctgcttcagagaagcagcaagaacgaaggaagaaacgttctgcggttggaacacctgactatttggcacctgagattttgttgggaacaggacatggagctacggcggattggtggtctgtgggggttattttgttcgaactcattgttggaatccctcccttcaacgctgaacacccccagataatatttgacaatatcctcaatcgtaatattccttggcctcgggtaccggaagaaatgagttgtgaagcacaggatcttattgacaaattattgacggaagatcctaatcagagacttggagctaaaggagcatcagaggtgaaggcacatcctttcttcagagatattaactgggacactctggcaaggcagaaggcagcatttgttcctgcttcagagagtgcagatgatacgagttacttcactagtcgttactcttggaatcattcagatgaccatgtcaatgcagctagtgaatttgaagacaccagtgatgatggcactgctagtgggagcagcggctgtctgagtgacaaacaagatgaattgggagatgaatgcaggggactgactgagtttgaatcgggctcagctgttaattattccttcagtaatttctcttttaagaatctctctcagcttgcttcaatcaacattgatttacttagcaaaggttggaaggatgatccgtccccaatgtgacaaccatattttcctcgagtaaaaaaccccgggattccctgttgattgtacaacctgtaaataaatagaagcagctcttagagaacatacgaccggatgtggtcttacctcatgctctgcaacaagtttcacatttaggggttgccgatgtcgttgaggttttttgttcaattccggaacttagcaaaatgtaaaccattggtaacctttctttggggaagatttgggttggatagaggggcatgagggtataatggtgtatgtatactgttcgattagcccgcataatgtgttacttttgtttgtaatatcaatgaaaagcccatccccgttatttgtctcatctcatacgttttacttctaagatctgcaaaacaaaataatactctggattgaagtattaaatcaaggcattttacttccaagcaaacataaagaggcttagtgaaataatccacttgataaacaccctgtgacataatagtgtaaagtagcagaagagcatgaactactacaatattgaagcacaaataggattatatcatctgaaaatccaaatctactacattcagcaatgtatggtatttcaaaacagaacaggtttggtagtccagaccttttaaggtcacaacatagaaaataaattcattgcctagtctaagaaaacttcaagcagcttctgcaattcccatgctacacttaacgatacttgatgaaaccgatttccttagcattgctgcggaagcactgcctgcagcacatcaaaccatacttgcggatgattgcgtgtgggtttccgcaaactcggcaagcgcgagatccaggaccatagctcttagggtgagcgttccagatgttagagtgccccattttcttatgctttactgcttttccggcgctctgaaagcttctaatataaaccctagaaaaagtgtcgcttgttattgaagaagaggaagaaattagaggtgtcgactgggtttttattcgctagattttagagtttggacccaacacttacccgcccaaacgcagcg

SEQ ID NO: 1022 - DNA, 388 bp, Helianthus annuus
cgaatttctgcaaatttgctcgctctacgcctccgtaagaagaagaagaagaatgggtcactcaaacatctggaacgcgcatccaaagctatacggacctggttctcgttcctgtcgcgtgtgtggtaactcgcatggattgatcagaaagtatgggctcatgtgctgcagacaatgcttccacagcaatgctaaggaaattgggttcattaagtatcgttgaattatatatgatgggatcttcagaggttgcaagtgatcaataaagcgtataattattagaaaacggttgaaaatgttatggtatggagaatccgagaatgtatgtttttagtattaaattaatgcttgtgtaaacgactatcatttgcttattgatattagtatc

SEQ ID NO: 1023 - DNA, 640 bp, Tabernaemontana elegans
aaggcatcagcggacatcagctagggtttcgccagaagactagagcggcggagaagaaagcgatgggtcactccaacatttggaacgcacaccccaagacttacggacctggctctcgcgcctgccgggtgtgtggtaactcgcacggaataatcagaaagtacgggttgatgtgctgcagacagtgcttccgtagcaatgcgaaggaaatcggtttcatcaagtaccgttgaggtgatgctggttgtgggtgtcttcattggaagatatgtgttgcattttaattaatatataagggcagtagcagtggttgtgaaatgtagaaacagtcaatctagtactcgactgatccaattcattttcattccataaatgcgtgttgtatggtgtatgggattttcttctgcccggtgtcttcctttctctgtcaccaagtctccaatttcttctgcatgatgtgattacccaaagggtgaaaagtccccattgtgatgagacggggcgatagctttcctaaaaattgacaaaattgtttccacatgtcaaataattgcagtaagcgtacgagttgggtctgtttgtggtgcatgctttcctgggatccctttctaatcaaaatattattgtgccctggccaggg

SEQ ID NO: 1024 - DNA, 654 bp, Taxus baccata
atccagcattctaatacccagtcgcaataacctcaccgcctattcatgcactacatgcacgaacattaacgcaggtacaacctaaaaccctctccgcgacctagcggcttctcttctttgagaaggcgcattgcttgggtgatactcggatttgggatttcaatttgttcatcagagctgtcaagagttcgattcgaagatgggtcacactgctgtatggaattctcaccccaagacctacgggccaggctcccgcacctgtcgtgtgtgtgggaaccctcatggccttatccggaagtatgggcttatgtgttgcagacagtgcttccgcagctattccaaagatattggctttgtcaagtaccgttaagagatgatgggttgataaagctgctggagattttcagctagtacttaatactttagcattaatggcaatgcttcaacagagaaatagttctaattccagagttacctaccaagaaagattgttactttttgagatgaattttgtttagtttgggatactgtttagtgatgaacatgatttggatcaacactttttttaattttaaataagggatgaattatgtcatttgaaagatattaatgacttttttgttgcattcaattggattttatgctccagacagt

SEQ ID NO: 1025 - DNA, 495 bp, Eutrema halophilum
ctcgccgttcgtccttgtcctctctatcttttttcgctcccgagagttctaaaatcatgggattttccaatatttggaattctcatcccaaaaagtacggtcctggttcccgcacatgccgtgtgtgcggaaactcccatgggttaatcaggaagtatggtcttaactgctgtagacagtgcttccgcagcaacgccaaggaaatcggatttattaagtaccgttgaagaagatcagtgtctcgcttgattgcgtggggggcatcatgtctttttcgtttaaaaactttaagcccaaaatattgtaatggatttattgtcaatgatctatttcgttaagccgttgaatcttttagttgctttgttattttcataaatatatggttgcctgattgatcagaagcattctctatagattgtaatgaaataatgttggaactggtccagaggctttaggttaactatacaaagacaattctctatatcgtctttctct

SEQ ID NO: 1026 - DNA, 384 bp, Utricularia gibba
tgaatctgaacatggggcacgcaaacatctggaatgctcaccctaagacttacgggcctggttcacgcacatgccgcgtatgcggaaatcctcatgggattatccgaaagtacgggttgatgtgctgcaggcagtgcttccgaagcaacgccaaggaaattggcttcattaagtatcgctgaaacgtggcttgcagtagattgatttcctggagaatcattgacgattcaaagcgtctccttttttgtgttttgtcgttgttcttcttagtaaaggatattgctccattgttacaagcttgttccatgatctgaattcatattactgctaccgcattcatggtttggtaatctgtttttcggttgtcaataaaaaaaaaaaaaa

SEQ ID NO: 1027 - DNA, 442 bp, Artemisia annua
ggttttgaaagaactagagcctccattttcagaaggaagaagaggaaaaaagaagaagaagatgggacacggaaacatctggaactcgcaccccaaaacctacggccctggttctcgtacctgccgtgtgtgtggtaactcgcatgggttgatcaggaagtatgggctcatgtgctgcaggcaatgctttcacagcaatgccaaggagattggtttcatcaagtaccgttgatttgcaccaatgaggagttcagttcgagttgaagtcttcagtgaaggatggttttaagtttttgttagcgttgttgatgacaatcagaattatgtctttaattttaagatagtgtttatgattcgtgtatgagactgagaatgcaactctttgttaattgattttgcgcttcaaatccagaccatcttttgataccgaaaacgcactcgt

SEQ ID NO: 1028 - DNA, 458 bp, Artemisia annua
gaagtgagagtttgcagcctccattttgaaagaagaggaagaagaggaaaaaggaagaaaaagaagaagaagaagaaagaagatgggacacggaaacatctggaactcgcaccccaaaacctacggccctggttctcgtacctgccgtgtgtgtggtaactcgcatgggttgatcaggaagtatggcctcatgtgctgcaggcaatgctttcacagcaatgctaaggagattggtttcattaagtaccgttgatctgcaccaatgaggaggttcaagttgaagtcttcagtgaaggatggttttaagtttttgttagcgttgttgatgacaatcagaattatgtctttaattttaagatggtgtttatgagtgtatgagactgagaatgcaactctttgttacttgattttgcgcttcaaatccagaccatcgtttgatacaaaaaaaaaaaaaaaaa

SEQ ID NO: 1029 - DNA, 610 bp, Artemisia annua
tcaacgcagtactccgacggggatactacattgcatttttagggttttgaaagaactagagcctccattttcagaaggaagaagaggaaaaaagaagaagaagatgggacacggaaacatctggaactcgcaccccaaaacctacggccctggttctcgtacctgccgtgtgtgtggtaactcgcatgggttgatcaggaagtatgggctcatgtgctgcaggcaatgctttcacagcaatgccaaggagattggtttcatcaagtaccgttgatttgcaccaatgaggagttcagttcgagttgaagtcttcagtgaaggatggttttaagtttttgttagcgttgttgatgacaatcagaattatgtctttaattttaagatagtgtttatgattcgtgtatgagactgagaatgcaactctttgttaattgattttgcgcttcaaatccaaaacatgaaataacaaaagtacttaaacataaccttaaaagacaataataataaaacttaaaacctcaacttggaaaaaaccaaacggttcttgccagtcttaaacctctcctccaacctcttcttagtctccttacaagcagtcaccttcttgtca

SEQ ID NO: 1030 - DNA, 446 bp, Artemisia annua
agcactgtaggtgtagagctgaaataaaagaaatgaaatggataaagaagagagaaaagaagaagaagaagaagaagaagaagatgggacacggaaacatctggaactcgcaccccaaaacctacggccctggttctcgtacctgccgtgtgtgtggtaactcgcatgggttgatcaggaagtatgggctcatgtgctgcaggcaatgctttcacagcaatgctaaggagattggtttcattaagtaccgttgatttgcaccaatgaggagatcagttcgagttgaagtcttcagttatggatggttttaagtttttgttagcgttgttgatgacaatcagaattatgtctttaattttaagatagtgtttatgattcgtgtatgagactgagaatgcaactctttgttacttgattttgcgcttcaaatccagaccatcttttga

SEQ ID NO: 1031 - DNA, 585 bp, Cryptomeria japonica
ggagaagttagtgcaaactaaatcttctgaaatttgggcgtttcattttgcactgcaagaagtcgcgaggtcgaggggcgagcggataatcgaagatgggtcactctgctgtttggaattcacaccctaagacctacgggccaggctcacgcacgtgtcgggtgtgtggaaatccacatgggctcatccgcaagtatggtattatgtgctgcagacagtgcttccgcagctattccaaagagattggctttattaagtatcgttaagagccgaaagatgctgtaaagctactggaacttcttactatagcattaatggcagtaattcaatagagagtttttgttgacaagtatagaaagttatcgttgggaggtaactcccaagataggtttctatttttgaaggtgaatattaggctttgtacgggatactgttgtcttgaacatgatttgaacgagtggtctttttgtaatggacgaactttattattttgaaacatagaaatgccctgttggtggatgtaattgcattgcatgttccaaacagctaattaattaattaagagcaattttgtggtctcgtgcc

SEQ ID NO: 1032 - DNA, 460 bp, Ipomoea batatas
cccagattcttaaagcgttagggttttctcgcagctgctctgtggtcgaagcctcaacgaggaagagagaacaatgggacactctaacatctggaacgctcaccccaagacctacgggcctggctcgcgcgcatgccgtgtctgtggtaactctcatgggattatcagaaagtatgggcttatgtgctgcagacagtgcttccgaagcaacgcaaaggaaatcggattcatcaagtaccgctaaagaatccagataccgttgcaatcaagaacaagagtaatttgatatttgatcaatatgtagttgccttaagaacagattataatatctgatatttaatggttttgttttgttactcgtggacaagagattgatgtcttaatcttgtttaaagattgttgaactttgttatatgttttctcccatcctttaaattcttgattgccattttctaaaaaa

SEQ ID NO: 1033 - DNA, 507 bp, Ipomoea batatas
gggcattcaatctggtcacgcgcgcctgcagctccgcactagtgactccaaagaattcggcacgaggggcagctgaaatccatagaagacatgggtcactcaaacatctggaacgctcaccctaagacctacggacctggatcacgcgcatgccgtgtgtgtgggaattctcatggaattatcagaaagtacggccttatgtgctgcagacagtgcttccgcagcaacgccaaagaaatcgggttcataaagtaccgctaatggattgaaggcctgcttgttgcttgttagtgaaaggagtattttgatctagagacgatttaatgggcatgttgttctttatttagttctgttaaacctggattgatctttggaacaatgctttttgttatgtcttaaaaaatttgccctatattttgctttgattaaatgtctatttgtatttgtagtatttattacagtgttactttagatataaagttctttacctgcattgtagtttaaaaa

SEQ ID NO: 1034 - DNA, 456 bp, Ipomoea batatas
tacggccgggggtcgattacttctcagtctcttacattgatcgaaagctacgcagtaacgcagagcagaagagcatgggtcactccaacatctggaacgcacaccccaagacctatggtcctggttcacgggcttgccgcgtgtgcgggaattcgcatgggataattaggaagtatggattgatgtgctgcagacaatgcttccgcagtaatgctaaggagattggatttatcaagtatcgttaagggcaggctcatttgtggttcactgatgcaatggaggtgaaattggatggcaaaggaattggggtagatgcaaaattcatgtagtactgttctagttgtgaactagtagttttgactggttacctctttatttagcgaattttaaagactcagagtttaaacatgtgaaaacactgtttgttttctttaaacaatttaactggttgatttc

SEQ ID NO: 1035 - DNA, 464 bp, Ipomoea nil
ccgttttcattgtttcagaactcagaagcggcagctgaatccaaggtagtcatgggtcactcaaacatctggaacgctcaccctaagacctatggacctggatcacgcgcatgccgtgtgtgtgggaattctcatggaattatcagaaagtatggccttatgtgctgcagacagtgcttccgcagcaatgccaaagaaatcgggttcataaagtaccgctaatggattgaaggccttcttgttgtttgttagtgaagggagtattttgatctagagacgatttgatgggcatgatgttctttatttagttctgttaaacctggattgatctttggaacaatgctttttgttgtgtctttgaaaatttgccctatattttgctttgattaaatgtttatttgtatttgtagtatttattacagtgttttttgagagatattacggtgttattttagaaaaaaaca

SEQ ID NO: 1036 - DNA, 602 bp, Nuphar advena
tcggcacgaggcctcgtgccgaattcggcacgagggtttgccgaagtccttccttctctccctccctctctctctccttgtggtaaccgaagcttgggttttctcggaagaagagggaaaaaaatggggcactcagccgtctggaactctcaccctaagaactacggcccgggatctcgggcttgccgtgtatgtggtaactcacatgctataatccggaaatatgggctgatgtgctgtaggcaatgctttcacagcaatgcgaaagcaattggctttattaagtatcgttgaggattggacttgactgtcatgcatggtgtgcgaagtcgtttagcagcgtatctccactgagcagcactcttgccaccaactcatccacactacgttccaatcaatttcatgtttcgagaaactgaaaatttgtttttattctgtctgaaaatgaaccgaattttgtttcattgacatgattctccgttggttcattactatgcttttgttctaatcaaagtttgatgatttagatttcatgtttattggtgaatgctggacatttctctatttctgaagttaggttaccactgtttttgagattctct

SEQ ID NO: 1037 - DNA, 1339 bp, Petunia hybrida
atgctaatgaaattttaatcatggctcaacaattgcaaggtaaaacacattatgaaaggttaacatatattcatgctactaaagaaaagaagcaaaagatatatattggaggtagcacattaaaagatcaaacaccattatctggtgttcctttattccaaatctgtggttacaagattaatcatcgccaaatcttttcatgatttcaacccaatatatttatatcataccaacttaactgctttggccagtgattttagcaaggcagtcgctagcaatcccttgtgcccaattctcaaatttcgtgaatacaggatcatctccatatatagaagtggcacattcattgcaagtatcaatatttgtggacatagcactaacatccacattagctttgtaataatttcctgctttaacatcttcttcagtcctcttcatggcatctactgcatcttcaaatacatacttgcatgtttcaagacaatctttggcgtaaatgtccaactttggttcagccaaacgtttgtcaatgactttggttatgaattcatcggtcttggccattgttgcatccatggtagctttgacaaatattgagacatcacctgttgaggcgatggcgatgttttttggaatttcaaaggttgtcgaggagactgcagtggttaggggtgttgacaatgacgaggacattgaggaagaggaggaggccgaggccgaggccgtgtcagattcctctaaggatagggcaggtgaaggggattgtgagtatgggttagggtagttgtatgatgcttcagaggaaagggttgtaaggaagaaagaaatggcgaagacaagtaaaatttgagtataaaatgccattgccttttattttatttaataaaagaaagaagataaaaggtccattgagcactagggttttctccatacaaacaacaaagcgcagccttgagttacagagaaagaaatgggtcactctaacatttggaatgctcaccctaagagctacggccctggttcccgcacttgccgtgtctgtgggaatcctcatgctattataagaaagtatggactcatgtgctgcagacagtgcttccgcagcaatgctaaggaaattggattcatcaagtaccgttaaatcttcagtatgagtttctgcgaggacctctacagtggtgctggtagaatatctgaaattagagctttttggtttgctcctcccttcagttaaatgatgtaatgggataattttgatttatgttagcatctgaaagtgaacttccgtgtggacctaaagactagtatttaatctgagtatttgttctatacttgttcc

SEQ ID NO: 1038 - DNA, 471 bp, Petunia hybrida
gaattcggcacgaagaagtgtgccgccacattcatagggttgttgttcattagcatcaagcgcagcagcagcctctgaaaaagaaaaaatgggacactccaacatctggaacgctcaccccaagagctatggccctggctctcgcacttgccgcgtgtgtggaaatccacacgcaattattagaaagtatggactcatgtgctgcagacagtgcttccgcagcaatgccaaggaaatcggattcattaagtaccgctgaatattcaatgagcttctacacaaggtcgacattgctcagagtgtcataccagtagatttatggaattagagcgttttgattattgtctcctttcagcaaatgatatgatcggatcattttgattttttgttagctaactattgaaagtgaattgttatgtagacctcgatgttaatgtgttttttcgttatatattgtgctttctaaatttt

SEQ ID NO: 1039 - DNA, 496 bp, Petunia hybrida
ttttattatcaaacatcaccaaagcgcagccttttgttgttgagaaaatgggtcactccaacatttggaacgctcaccccaagagctatggtcctggttctcgtacctgccgcgtgtgtggcaatccccatgcaattattaggaagtatggactcatgtgctgcaggcagtgctttcgcagcaatgcaaaggaaattggcttcattaagtaccgctgatcacaaccagttccaagagaggatctttcttcatgtgatacaatggaggattcttaggtcctatgccaacaaactaaaagtggatagctccgtatttttatctttgttttgttctactgccatttacaactttatttcctcgtggcatttggtagttttttgtctgcggatgttataattatgaatctttggccactaccacctcatagtttctggaacgacgtccttatgatgtggtttggatgtcaatgaagttagaaatatattttctggaggat

SEQ ID NO: 1040 - DNA, 455 bp, Raphanus sativus
agggttcacgcagacgccgcttgttctttcctctgtgagcaaccgacgaaatgggtcatgacaacgtgtggaactctcatccgaagaagtacggtcctggatcacgcacctgccgtgtgtgtggaaactcccacgggctgatcaggaagtatggtctcaactgctgcagacactgtttccgcagcaatgccaaggagattggattcatcaagtatcgttaatgaaagcaccagttcttgattgatgcttatgatacacaaacatgatggcgtcaatcaattggctctgaagcttttttagtttttttttactgcatttcattttttgtatcgaataagttggtggacaagacctatgtattttgtcttaaacgcttatgtttcaatggaacgatgctctatatgaccaaaatatctatatgatttttgcaattgaatgacataatcttggttgta

SEQ ID NO: 1041 - DNA, 442 bp, Raphanus sativus
agggttcacgcagacgccgcttgttctttcctctgtgagcagcaaccgacgaaatgggtcatgacaacgtgtggaactctcatccgaagaagtacggtcctggctcacgcccctgccgtgtgtgtggaaactcccacgggctgatcagcaagtatggtctcaactgctgcagacagtgtttccgtagcaatgccaaggagattggattcatcaagtatcgttaaggaaagcaccagttcttgattgatgtttacgatacacaaacatgatggcgtcaatcaattggctctgaagcttttttagttttttttaatgcatttcatttttgtatcgaataagttggtggacaagacctatgtatttgtcttaaaagcttatgtttcaatggaactatgctctatatgatcaaaatatctatatgatttttgcaattgaatgacat

SEQ ID NO: 1042 - DNA, 447 bp, Amaranthus tuberculatus
gctagggtttttatacgagagcagcgccgtattttctctgtgtctgaaagatttctcagaagaagaatgggtcacgctaacatctggaatgctcaccccaagaactatggtcctggatctcgcgcctgccgagtgtgtggcaaccctcacgcaatcattcgcaagtatggtttgatgtgctgcaggcagtgcttccgcagcaacgccaaagaaattggattccttaagtaccgttgatgtgtgacgaaggatccaatgcggaagctgtattgaagatctcttagatgcaatccatggtctatgtttgttttaagattttgcattttaaagatgtagacagctgaacctatgttcgttttgaactttgcttttttgagtgaaataggccttcttattttgtaggaattcgccatttttgttttgccataagatggtttattttattac

SEQ ID NO: 1043 - DNA, 631 bp, Amorphophallus konjac
cggccggggcaccaacgggctaacgtacacaaaactagggttttcttgggtggccgccgccgtgtagctgcgagattcttcggaatcggggaggggacaaggatggggcactccgccgtgtggcactctcaccccaagacctacggccccggatctagggcttgccgtgtatgtggcaatgttcatgccttgatacggaagtatgggcttatgtgctgcaggcagtgcttccgtagcaatgccaaggagatcggttttgtcaagtaccgctaatagcagaacttggcgatgggaagcagcagacgtaggagaaatagtcaccgtggtggccttgtgctcgaaactttgcttccccccgacatgttgttgaagtcgtcggtcttttatgtctcctatctatgttataagaacctcttttttgttgacaaaacatgcctttgattcccaatctggtttgacatcatgaactccatcttgtggatgtattgtgagaagcatggttgaatttgaggttgtcttcgatttgttgtgtgatcgtgattgttaattacaactgaagtaattgttatcttgtggcgtggagtcaactctaggcatgtggttcctttaattttgcaattgacaggaagaa

SEQ ID NO: 1044 - DNA, 588 bp, Artemisia annua
tactccaacggggtagtagtaggtgagagtgaatggagaaatacggcggcgaacaaataccaacaacaacaactgcccagcaacaacaacaagaagaaaaagaaaaagaccttgttactaatcatgaaacagctgaacaacaagaagacttagacgatgacgatgatgatgaatctgaagaagaagaagaagaagaaaataataatataaaaagaagaaggaaaaagaagatgggacacggaaacatctggaactcgcaccccaaacctacgccctggttctcgtacctgccgtgtgtgtggtaactcgcatgggttgatcaggaagtatgggctcatgtgctgcaggcaatgctttcacagcaatgctaaggagattggtttcattaagtaccgttgatttgcaccaatgaggagatcagttcgagttgaagtcttcagttatggatggttttaagtttttgttagcgttgttgatgacaatcagaattatgtctttaattttaagatagtgtttatgattcgtgtatgagactgagaatgcaactctttgttacttgattttgcgcttcaaatccagaccatcttt

SEQ ID NO: 1045 - DNA, 1130 bp, Musa acuminata
catccccagcatgcatgcttggggaatcaaaacgcgcaggattggtggcaactcgtgttctttaatcggagcgaagttaccaggaatcagcaccgtgcaagctaatggcattttgtacggactcgggatgtatcccgagcttgagagaagatgcatcacgtgatcgtgcagagagcatgccgcatgttatttctgtagtccagcagcgagttttagggcaggagaacagaccagaagcgattattgtagagggggaagaagacaacagattagcttcaagcagcggaaacgaagtcgatactgccatgaacacagagagattagcttcaagaagcagaggatcatcgttctcttattctcacaacgagtgaccaaattttactaggcgatatcagccgtccgatcaagaaaggacagtcgagattgatgagttgagcaacggacggtggataggttgctcccgcgttggggccggtcgagattaaggttcttagtggtgctacaaaagcttagcgctgctcctcgccggccgagcggcgagggattatggattcgtgcgatcgagcttgagaggggcgagcacggagagatggggcactcgaacgtgtggaactcgcatcccaagaattacggccctgggtctcggtgttgcggagtttgtgggaatcctcatggaccgataaggaagcatggacttatgtgttgcagacagtgcttctgcagtaatgccaaagaaattggattcattaagcttcatccacctggaacagtatgtgcatcagactcatcaagtcattattggcattcttgtccaagcctcggatgtgatggtttgcgtcacaacttatttttttaccaattcagcttcatccatctgcccaattaatgattgattagagtattgattcttgataatttgatatttgatgatattctgtatatgttttaaatgagtttacaaagttgcactggacgatatgacatgttatataagatgatatgagcagaagaggactattcttgaccttaccaagggcactaaaagattaatatattggtaggtgatttcctttgcaaatgattataagttatggtaattagattttttttttttcgtttgtttgttgttg

SEQ ID NO: 1046 - DNA, 293 bp, Theobroma cacao
caaagccttaaagggccacactaaattaaccaaaaacagaacatcatattaagttcattaaaattcaaaaaccaaactaaaatggctcatgatggacgaattccttcctacttcacaccatttaaattcttcagcgatacttgataaatccaatttccttggcattgctacggaagcactgtctgcaacacataagtccgtacttcctgatgatggcatgggggtttccgcacacacggcaggcacgagagccagggccgtaggttttggggtgagagttccagacgttagag

SEQ ID NO: 1047 - DNA, 401 bp, Epimedium sagittatum
aacgggccggggggtctctgtgaacttgcaagtttgtttgtgcggaagcagaggcgaggagcgagcgaagaaagcaaaaagatgggtcacgcaaatgtctggaactctcaccccaagacctacggcgctggatctcgcacttgccgtgtgtgtggaaactctcacgggatcatcaggaagtacgcgctgatgtgttgtaggcagtgcttccgcagcaacgccaaggaaatcggattcatcaagtaccgcgtagggggcgaaagcaaagcaacttgctgttggcatggaagtagggtttttgccctatttgtatttgatggaggagactagtttgtttaattttagttgattacattggttaactttaatttcgaattagtaattagtttaagtttcttttg

SEQ ID NO: 1048 - DNA, 362 bp, Euphorbia peplus
attcaaatgtgtggaactctcatcctaaaaacttcggccccggttctcgtgcttgccgggtgtgtggaaatcctcatgggattataaggaagtatgccctcatgtgctgcaggcagtgcttccgaagcaatgctaaggaaattggatttattaagtatcgttaaatatgactcttcaagtgttggggaagaggagaagagaaagaagaaaagcatgtagtttgttttgttattggatttatcagttattatgattattatatagctaggctgtttatcttttgagtaaaacaattgatggttacatgaattttgagtaagaatttcaattttattggttcctatctacttaatatttttgat

SEQ ID NO: 1049 - DNA, 671 bp, Panax ginseng
aaagcagtggtatcaacgcagagtacatggggcttctaaactcctctgcgacttcaatccgcggcagctctagatcgagaaagctaggaggggagagagagagagagagagatgggacactcaaatatatggaacgcgcatcctaagacctacggccctggttcacgtgcctgtcgtgtttgtgggaaccctcatggattgatacgaaaatacgggattatgtgctgcagacagtgcttcaaaaccaatgccaaggaaatcggcttcatcaagtatcgttagaaggatgtatgccttttcctctacgagaggattttacccaagcacagtgatggtagtgggttttaatattgattttgcttcatgaatttattattctgctgtatgtttggagacaatgggttaattggaatgatgtagctcactctagtttattattgaggacatgagttgtctactttataccctttggttttcaagtgcatggtatttcatatcattaacactgtatgcatggtaactgagttttatgtttgtgcgatgtgtaaactttggggttgacaatctaccggaatctgttcatctgatagaggaaaattaattgcatttaccatcatttaactaggaaaattacctctggcttgagtagtggctctgtctgttttgtcgtc

SEQ ID NO: 1050 - DNA, 744 bp, Panax ginseng
tgcaagcttgggtgtcatccggggactcacgaatattttctcatacacttgacgaagcagtggtatcaacgcagagtacatggggctcttcaatctgcggcaaccctagtagagaaagcaagagagagagagaggaagtgtgaaagatggggcactcaaacatttggaatgcacatcctaagacctatggccctggttctcgtgcctgtcgtgtgtgtgggaacccccatgggttgatacgaaaatatgggatcatgtgctgcagacagtgcttcaaaaccaatgcaaaggaaatcggcttcatcaagtatcgttaaaataaggttacgccatttcctatacaaaggaagaggagtttgtgagagcacaacgatggtagtagttttgagaattggtttggcttcacggatttgtaattctgtatgtccacagacaatggatataactggaatcatgtagcttgctctagtttatcatttaacttgaagtgatgtttggacctaaatatatcgtcacattttgttataagttgatctggtatctttccttgtgatacttccagtcttgcatcagcagcagcattctttcctcttctcactagatcaaactttatagggctttatgtcataaatggatgttaaaagaaatgttaataaaaatttttaaaaaaaaaaaacaaaaaaaataaaaaaaataagtaaggaaggaagaagaagacaacgaaggaaggagagaccacccccc

SEQ ID NO: 1051 - DNA, 455 bp, Panax ginseng
acatcttcaatcttcggcaaccctagtagagaaagcaagagagagaggaagtgtgaaagatggggcactcaaacatttggaatgcacatcctaagacctatggccctggttctcgtgcctgtcgtgtgtgtgggaacccccatgggttgatacgaaaatatgggatcatgtgctgcagacagtgcttcaaaaccaatgcaaaggaaatcggcttcatcaagtatcgttaaaataaggcacaccatttcctatacaaaggaagaggagtttgacgatggtagtagttttgagaattgttttggcttcacggatttgtaattctgtatgtccacagacaatggatataactggaatcatgtagcttgctctagtttatcatttaacttgaagtgatgtttggacctaaatatattgttcacattttgttataagttgatctggtatcttccttgtga

SEQ ID NO: 1052 - DNA, 840 bp, Pinus pinaster
atggaaacacaacataatactacacggctctaccacagcgtcaatcgctgcaacatatccttgaattaccgaacctagggcaacaagttagggcttttgcggacgtgaaagtggaataaaacgcgttctaatagttggagcatccttcatatacttacattagggtttgaagacaatccagtgttgcatacaacggagcgaagtagaaggagcggcagggcgaggaaggagcgaagtcataccagttaatacgtgccttaaatctttacaattacagaatttgcgaggtcgaatttggtgattttttgatcgaagatgcctcactctacagtctggaattctcatcccaagaaatatgggcccggttcccgcacctgtcgggtgtgtggcaatccacatggcttgattaggaaatatggtctcaattgttgccgacagtgctttcgctcttattccaaagacatcggatttgttaagtatcgttaggagagatggaattcgttggtgaaggcggtgcaatgttggcagtgatctttcccattatcgagtcaatggaaataattcaattagaaatcgggttttggtttattgtttattattatgttgttcaaatttcattcttatttcagaacttaccgatgaaaagattgaagtacttcataatttatcaaattttgtcaaggctgattcaagctgatttataactctacataaaggttatatatgtagagctttagtagacaaattttctgaagttccttgaggaatggaatcataatctgtagttgatttaaatccttggttaattggacaacgaaattattgagtttctattccaaa

SEQ ID NO: 1053 - DNA, 403 bp, Allium cepa
ttcattttctattgccatttaaagctagggttttgttctttcctcatcattcaactatcggacgatgggtcacgccaacgtttggaacagccatcccaagacttatggtcccggatctagggcttgtcgtgtatgtggaaacgtacatggattgattaggaagtatgggatcatgtgctgcaggcaatgcttcagggaaaatgccaaagagattggcttcgtcaagtatcgttaagagagtctgctacgagaagcgtggagtggatctcaggacgtgttcttgaaatattttcttggctatgtttgcttattggggtttatattccatgattctgatattttgtatttcaatttcagtgattctgtaatgaacttgttaattgcttcttaaagttcgccagga

SEQ ID NO: 1054 - DNA, 418 bp, Allium cepa
ggggcttttgttatttcatattttatcgcgattcaaagctagggttttgttccttcctcatctctttaccagcgaaagatgggtcacgctaacgtctggaacagtcatcccaagacctatggtcccggatctagggcttgccgtgtatgtggaaaccaacatgggttgattaggaagtatgggatcatgtgctgcaggcaatgcttcagagaaaatgccaaagagattggttttgtcaagtatcgttaggaaagcctgctattagaagcatggagatggatccctggatgtattctcagcaatgttgcatattggggtttatattctgtgaatctaatcttgttttgcttttcaatttccgtgtgtgttacttgatattgtattgaactttttatttgcttcttagaatatgctgtga

SEQ ID NO: 1055 - DNA, 447 bp, Allium cepa
tcgcgattcaaagctaggtttgttcctcctcatctctttaccagcgaaagatgggtcacgctaacgtctggaacagtcatcccaagacctatggtcccggatctagggcttgccgtgtatgtggaaaccaacatgggttgattaggaagtatgggatcatgtgctgcaggcaatgcttcagagaaaatgccaaagagattggtttcgtcaagtatcgttaggaaagcttgctattagaagcatggagatggatccctggatgtattctgagcaatgttgcatattggggtttatattctgtgaatctaatcttgttttgcttttcaatttccgtgtgtgtttcttgattttgtattgaactttttattagcttcttagaatgtaccgtgagaaagtgttgaaattttatatcattttacatggattatattatttttgctttttagg

SEQ ID NO: 1056 - DNA, 473 bp, Allium cepa
tgttatttcatattttatcgcgattcaaagctagggttttgttccttcctcatctctttaccagcgaaagatgggtcacgctaacgtctggaacagtcatcccaagacctatggtcccggatctagggcttgccgtgtatgtggaaaccaacatgggttgattaggaagtatgggatcatgtgctgcaggcaatgcttcagagaaaatgccaaagagattggtttcgtcaagtatcgttaggaaagcttgctattagaagcatggagatggatccctggatgtattctgagcaatgttgcatattggggtttatattctgtgaatctaatcttgttttgcttttcaatttccgtgtgtgtttcttgattttgtattgaactttttattagcttcttagaatgtaccgtgagaaagtgttgaaattttatatcattttttacaattaggtaattatattatttttagaactttt

SEQ ID NO: 1057 - DNA, 442 bp, Allium cepa
tcgcgattcaaagctagggttttgttccttcctcatctctttaccagcgaaagatgggtcacgctaacgtctggaacagtcatcccaagacctatggtcccggatctagggcttgccgtgtatgtggaaaccaacatgggttgattaggaagtatgggatcatgtgctgcaggcaatgcttcagagaaaatgccaaagagattggtttcgtcaagtatcgttaggaaagcttgctattagaagcatggagatggatccctggatgtattctgagcaatgttgcatattggggtttatattctgtgaatctaatcttgttttgcttttcaatttccgtgtgtgtttcttgattttgtattgaactttttattagcttcttagaatgtaccgtgagaaagtgttgaaattttatatcattttacatggattatattattttttg

SEQ ID NO: 1058 - DNA, 410 bp, Allium cepa
gtgggccattaccggcctagttacgggggattttatcgcgattcaaagctagggttttgttccttcctcatctctttaccagcgaaagatgggtcacgctaacgtctggaacagtcatcccaagacctatggtcccggatctagggcttgccgtgtatgtggaaaccaacatgggttgattaggaagtatgggatcatgtgctgcaggcaatgcttcagagaaaatgccaaagagattggtttcgtcaagtatcgttaggaaagcttgctattagaagcatggagatggatccctggatgtattctgagcaatgttgcatattggggtttatattctgtgaatctaatcttgtttgcttttcaatttccgtgtgtgtttcttgattttgtattgaactttttatagtctt

SEQ ID NO: 1059 - DNA, 352 bp, Allium cepa
gtctggaactcgcatcctaaaaactatggtcctggatctcgtgcgtgccgtgtttgtggaaatccccatggattgatcagaaaatacgggcttatgtgctgcaggcagtgctttagggaaaacgctaagcagattggcttcattaagtaccgctgagtattgggttgtgaagtgatgcttcaatttttcacttgcttttgggaattttcgattagttgctattgaacttgaactctatgttatgtatttcttattttctgaaccctatgttctcaaattaattatgtacaagtgattgcttttgtttgtcacagatttaactgttcattttttctgaaatcgtggttatctt

SEQ ID NO: 1060 - DNA, 441 bp, Allium cepa
tcgcgattcaaagctagggttttgttccttcctcatctctttaccagcgaaagatgggtcacgctaacgtctggaacagtcatcccaagacctatggtcccggatctagggcttgccgtgtatgtggaaaccaacatgggttgattaggaagtatgggatcatgtgctgcaggcaatgcttcagagaaaatgccaaagagattggtttcgtcaagtatcgttaggaaagcttgctattagaagcatggagatggatccctggatgtattctgagcaatgttgcatattggggtttatattctgtgaatctaatcttgtttgcttttcaatttccgtgtgtgtttcttgattttgtattgaactttttattagcttcttagaatgtaccgtgagaaagtgttgaaattttatatcattttacatggattatattattttttg

SEQ ID NO: 1061 - DNA, 579 bp, Petroselinum crispum
agatagaagagagagagatagatggggcactcaaacatctggaatgcgcatcccaagacctacggccctggctctcgagcctgccgtgtttgtggaaatcctcatgggttgattagaaagtatggtataatgtgctgcagacaatgcttcaaaaccaacgccaaggaaattggtttcattaagtatcgttaagctgaggcttcttgtttgcacctacggtccttcacccccactgaagactgttttctcatcaatttagttttgtgaggatgtaggtttgttttttggagacaatgaatttatccaaatgatgtaatagatcgagtaatttgtagactgttgatgcagtgacaaattttaagctaatgctgttttcattaagctggtaacattctatattcctcaaatcataaacaaactttcatatgttttagctctttgttgaaattgcaatctaatatacctatatgtttgacataaaaggaaaattagagaataatggaaaatataataattttgtttgaacgtatttggtgataatactatttaaaaaatatatacgttttagctctacttggc

SEQ ID NO: 1062 - DNA, 590 bp, Podocarpus macrophillus
atccacggagctttctgcaggacctacgttctctctgaagttgaggttgaatctggtgttgtgcttgttgaagatgggtcaccaaacagtttggaattctcatcccaagacatatggaccaggctcacgtgcctgtcgggtatgtggaaatgttcatggtctgattagaaaatacagtattatgtgttgtcggcagtgctttcgcagttatgccaaagatattggttttattaagtatcggtgagtgagcagtgatagatctccaggaagcattagcatcaatgcaagtaacttaatgcatgttgttagttgggtatagttcgaagaatggagtgaacttggttgactacaactcttgattctataatgtttaaattttgttgttttcaaacatagagaaattgtgtttttgtcgttggttgtcggtttgggatggtactataagtggagtgaacttgattgactgcaactcttgagtctgcaatggttaaattttactgttttcaaacacagagaaatcgtgtttggagcattcaaatgctccgtatgcaaatcttattagggaatctaatgaaacttttatgattacc

SEQ ID NO: 1063 - DNA, 368 bp, Chenopodium quinoa
cactctaacatctggaacgctcaccctaagaactatggtcctggatctcgtgcttgccgagtttgcggcaatcctcatgcaattattcgcaagtatggactgatgtgctgcagacagtgcttccgtagcaacgctaaggaaatcggtttcatcaagtaccgttaaacagctgaagttgtgttatggattcatggcagaagctgttccggagatctcatactattgatgaaatttttaaaattttgacttgaaactctagactgccgaacacattacttgtctttaaattttgttattgaatgtagtttgtttagattctcgagtacttggcatttattatgcttctatagtaaatgtgttggttgctt

SEQ ID NO: 1064 - DNA, 608 bp, Helianthus annuus
aactcagattacgctgggggtttataatcaaaccaagcacgagcttacctgactctgctgtgctcatcaacaaccctgtatccacccatacagataattgggttttttgctctttatcattgatgaaaatggacctatattgggctagatattgggccgtaagcaccaaataaagggcatccaccaattcccatcaacaatttctagggtttcgaatttctgcaaacttgctcgctctacgcctccgtaagaagaagaagaatgggtcactcaaacatctggaacgcgcatccaaagctgtacggacctggttctcgttcctgtcgtgtgtgtggtaactcgcatggattgatcagaaagtatgggctcatgtgctgcagacaatgcttccacaacaatgctaaggaaattgggttcattaagtatcgttgaattatatatggtgggatcttcagaggtcgcaagagatcaataaagggtatgattattaggaaacttttggaaatgttttggtaactatggaggatccgagaatgtatgtttttagttttaaattaatgcttgtgtaaacgactattatttgcttattgatattagtatcatcactt

SEQ ID NO: 1065 - DNA, 370 bp, Helianthus annuus
ttgctcgctctacgcctccgtaagaagaagaagaatgggtcactcaaacatctggaacgcgcatccaaagctatacggacctggttctcgttcctgtcgtgtgtgtggtaactcgcatggattgatcagaaagtatgggctcatgtgctgcagacaatgcttccacaacaatgctaaggaaattgggttcattaagtaccgttgaattatatatggtgggatcttcagaggttgcaagtgatcaataaagcgtataattattagaaaactgttgaaaatgttatggtatggagaatccgagaatgtatgtttttagttttaaattaatgcttgtgtaaacgactattatttgcttatcgatattagtatc

SEQ ID NO: 1066 - DNA, 676 bp, Tabernaemontana elegans
cacacagcttaggcaaactctagcggctgatctcttcttcaccgagagaacaatgggtcactcgaacatctggaacgctcaccccaaacctaatggtcctggctcccgcgcctgccgtgtttgtgggaactctcatgggataattagaaagtatgggctcatgtgctgcagacagtgtttccgcagcaatgcgaaggagattggattcattaagtaccgctgaagggttgaattggctgctttatggagagaggatgattttgtttacaagtgaacaatgttagttactgcagttggaagttattaaattcttgtctttgagaacaatttagtcatgttagtgattagttcgagcgggggaggttcctactatagtagacgatttagtattggaccaacttaacgttcgtaaggacggaaaaggaaggggaacggaagtaagtaggtaggtatacgtacggtaacaacgtaactactactactttactagtacgtaatccgttacgtttacggtttacgggtttaacgggtttaccggtaacgttaggtaaaggtaacttaaacgtaaactaaactaaacggaacgtaacgtactaacctaactaaacgaagaacgaaagaaccgaataaaccgaagttaacgtactacttccgtaacggttacgtacggttaacg

SEQ ID NO: 1067 - DNA, 412 bp, Thalictrum flavum
tgtgtggaactcccatcccaagacttatggtcctggttctcgcacttgccgagtttgtggaaatccccatggtttgattaggaagtatggtctcatgtgctgcaggcagtgctttcggagcaatgccaaggaaattggtttcatcaagtaccgttaaaggctagaacctgctctctgcttcgggagtatgttttgtggggttgatttgatttatgggggcatgagatattgacttttatgattttgttgagttaattatatgtttagagttgtgggagtaaaaactattttgcgatatcagatctgttgaagagtgcagttattgtagtttatcatgactgttattccatgttaatgtctcatgcttcatgccttttgtgtttctctatgggggttgatggaattatagtgg

SEQ ID NO: 1068 - DNA, 403 bp, Thalictrum flavum
tgtgtggaattctcatcccaagacctatggtcctggttctcgcacttgccgagtttgtggaaatccccatggcttgattagaaagtatggtctcatgtgctgcaggcagtgctttcggagcaatgccaaggaaattggtttcatcaagtaccgctaaaggataaaacctgctctctctgctgggggagtgatatgaggaattgatttaaattctgggggcataatgacttattgacacttatatttttgtttcaagttaattactatgtttagagttgtggattaaaaactattttgcaacatcagttctgttgaagagtgcagttattctagtttatcataattgttatttgcatctttaattgccctgtactttgtgcttttcgtgtatgaatcccttttt

SEQ ID NO: 1069 - DNA, 541 bp, Eutrema halophilum
gacaagtattttattttctcgttacaacgaaacaaatttttagggttttgaagagtctccctctcgtcgccgttcttcttccaatcaacggaaatgggtttctccgcgatatggaattctcatccaaagaagtacggacctggatctcgcacctgccgtgtttgcgggaactcccacgggttgattaggaagtatggtctgaactgctgcagacagtgcttccgcagcaatgccaaggagattggcttcatcaagtaccgttgatgtagcaccaaccagtccatgttggatgcttataatatacacatgatggcatcgatggattttcctttggtcgtctttctagttttgatattatgaattgagaatgtttgttttacttatttatatttaagttgttgaacctttcccaaagatagttgttgccttgtcttataaagctttatgtctttgttttgaaggttgaatgatgatgtttgtcttagtattttattgcttgttttattagtctattacaatatattgtgattcttgtttttca

SEQ ID NO: 1070 - DNA, 405 bp, Eutrema halophilum
ggtttccaaagtttagagtgcttcctcgccgttggtctttctcctctagcttctttcgctaaatcatgggattcgccaatatctggaattctcatcccaagaaatacggtcctggttcccgcacatgccgtgtgtgcggaaactcccatggattaatcaggaagtatggtcttaactgttgtagacagtgcttccgcagcaacgccaaggaaatcggattcattaagtaccgttgaagatcattgccccttgcgtgggagccggagcatcatcatgtctttttttttggttaaactcaaagcccaagttattgtaatggatttgtgacattgagctatttcgttaaggctgtttagctgttgaatcttatactccctcagttttattaaatttgattttctgagt

SEQ ID NO: 1071 - DNA, 394 bp, Eutrema parvulum
gaaatttagggttttccaaaattttcgagtgttttgacgccgttcgtcctcgtcttctagcttttcacgcctgaagcattcgaaaaatcatgggtttttctgcgatttggaactctcatcccaagaagtacggacctggttcccgcacctgccgtgtgtgcggaaactcccatgggctaatcaggaagtatggtcttaactgctgtagacagtgcttccgcagcaacgccaaggaaatcggattcattaagtaccgttaagagccaatgttgtttatccaggagcagacatttggtttttaaggttttgaggctttagattgtactggatcttataaatcttttacaattttgaaaaggaatttgagttgttaaacattttagcttccttgttt

SEQ ID NO: 1072 - DNA, 507 bp, Utricularia gibba
tgggtcacgccaacatctggaacgcgcatcccaaaacctatggccctggatcaaggacatgccgtgtttgcggcaacccccatggcattattcggaaatacgggctgatgtgctgtaggcagtgcttccgcagcaacgccaaggaaatcggcttcatcaagtaccgctgatgatcgatccaagagcaacgtccttcccaagtctcgtgtcagcagtatggagacgggacttgtcctgcttctaaatctaaatctgagtgtttctagcttctgagatttgagtcatatgattctacgaagtcaactgaacagcatgccttgttacgcactgctttctctgttactagtttccaattttactgagcacaacagaattatatggttttgcgtgctttcatatctcgaacatgggaaatgtgctcacaattattagcatcctggcagaattgttgcggatgcaatgagaacaaatcctggaatttaactaaaaaaaaaaaaacacgcgaaa

SEQ ID NO: 1073 - DNA, 414 bp, Utricularia gibba
ggggcgacagttggtggtaaaatactgaagatgggacactcaaacatctggaatgctcatcctaaaacttacgggcctggttcgcgaacatgccgtgtttgtggaaatccgcatgggatcatccgaaagtacggcttaatgtgctgcaggcaatgcttccgtagcaacgccaaggaaatcggcttcatcaagggatcaaaagatgaagaatcaacagagctgttaggttaaaatgatgtcaattccttggtggctgcttaagaaaagcatctcaaactagcccatgtttccaatcaatacaaaatgtgaaaaggtatgatggtgaaatggaaatggttggtccacattagcatcaacgcagcaccatcatatccttttcttatgggagttgatggaatcatgagatgactaatg

SEQ ID NO: 1074 - DNA, 285 bp, Lotus japonicus
gcgagtgtctagggttttgcgttttgtgtgttctttgcggcgcgcagcaaaagagaaagagaaagagatagagatagagatagagatagagatagagatggggcactccaatgtctggaactctcaccccaagacctatggacctggttcccgcgcctgccgtgtgtgtgggaaccctcatgcaattatccacaagtatgggcttatgtgttgcaggcagtgcttccgcagcaatgccaaggaaattggattcattaaggtaaattaacaaaacaccttacttcc

SEQ ID NO: 1075 - DNA, 444 bp, Senecio madagascariensis
agtggtatcaacgcagagtggccattacggccggggctgcaaaaattagggtttccaattctccattttcgagctccagccgctaacgccgtaacagcaaaaagcatcaatcatgggtcactcaaacatctggaacgctcatcccaagctttacggtcctggatctcgctcatgccgtgtgtgcggtaactcccatggaatcatcaggaagtacggtctcatgtgctgcaggcaatgcttccacagcaacgccaaggaaatcggtttcatcaagtaccgttgatcaattgaagatgggatgttcagaagttgcaattttcttttcttagtatgaatctaaaaaacggttggtaatgtttgagtagggaaaatgttttgtcgtcatttttgaaccaatatgctatgtaaacgactctttgtttattaaagtttcgacttcgtttg

SEQ ID NO: 1076 - DNA, 389 bp, Chelidonium majus
gtctgtctgcaatcaagatgggtcactcgaacgtttggaactctcatcccaagaactacggccctggatctcgcgcatgccgtgtttgtggcaacccgcatgccatcatcaggaagtatggcctcatgtgttgcaggcagtgcttccgcagcaatgccaaggagattggcttcatcaagtatcgttaaggaggatctttcttgatgccggcatatgtgatgtagtggaggcaaagctgtgaaggatttgttactgaaattagattaaatacctagttgagttgttttagtagatctgttagattggtactttaaattgacaaggtgcatttgtcttttgttgagatacactatcaatgtttaaatgtactaccgttttttttaagttcg

SEQ ID NO: 1077 - DNA, 1332 bp, Zea mays
ggagagacttggactaaaccgcagacacatatggcccatgtggcccagaaggttcatttcagcccaattacaggactatggaactacgggccatttggcccaatcgggtctgctcctggcttagggtttcgctcgctgcgtcagctatatattccgcttctcccaacggcgccgctactcagtgctcaccgaactccatctatctcttccccacgaacgcttgcggcggcggcggaattaggaggcgatggggcactccaacgtctggaactcgcaccccaagaactacgggcccggatcccgcgtctgccgtgtctgtgcgaaccctcatggactgatcaggaagtacgggctgatgtgctgcaggcagtgcttccgcagcaatgccaaggacattggcttcatcaaggtatgcaatataagcttcaaactgctgtgtgaatgatgcttagcatcattaatgctttatgattttgtattggatatttagtctgaaaagttgctatcaaaaaacacgacaagaaaaaagtgtaagaccgataaatccattagttaatatttgtgaaatagctccatttagacactattctgcttttagttagcctccatcgtaaacatggaaaaggctccaagattctatgatgtaaagtgtctgatacttatctgttgttttatcatctttaattctttaatgaattagttactgccagcttttaggcgacatcttgcagtttagggcattcctatgtatttagactgtttctttggcactttgttccctttcttgcaagtgcagctgtggtattttgttgaaacatgccctacactttgctggtagtctttttttattcaaagaatgaattgtggttacatgtttttcatgttgacatgaaaacattaatgtatggctatggcacataaagtgcctacaattattttgctgcccatggcaatatttttgaaatttctccaatttggttgacttactattgctctttaaccaatgcaatgcctatatttttgttgcagtaccgctgaaatcaggtgggaatggaccatgtggtagaggcgaggttgtagttttatttccagtaatttagatgttttgttcagaagtctgctagtaaagactgctacgtttatgatggagaacttagccatgttggtcatattgatcatgagttacctatgttgagcttaaactatcatgtgtccaaccatcgctgggtagtatgattactgtaatgtaggatggttaaggtcgcaaactaatacttatattgcatgtgtggaagatctattccaattgtactcctagcgcactatttgtga

SEQ ID NO: 1078 - DNA, 329 bp, Allium cepa
gggggctcagcacagaaacaatggggcacgccaatgtctggaactcgcatcctaaaaactatggtcctggatctcgtgcgtgccgtgtttgtggaaatccccatggattgatcagaaaatacgggcttatgtgctgcaggcagtgctttagggaaaacgctaagcagattggcttcattaagtaccgctgagtattgggttgtgaagtgatgcttcaatttttcacttgcttttgggaattttcgattagttgctattgaacttgaactctatgttatgtatttcttattttctgaaccctatgttctcaaattaattatgtacaagtg

SEQ ID NO: 1079 - DNA, 405 bp, Brassica juncea
tagataatcgtagttgttttttaaacgttccgtttctttccttcgttcttctatctatccacgactgatcattcaaaaaaatcatggggtttgctgcgatttggaactctcatcccaagaagtacggtcctggttcccgcacctgccgtgtgtgcggaaactcgcatgggctaatcaggaagtatggtcttaactgctgtagacagtgcttccgcagcaacgccaaggaaatcggattcatcaagtaccgttaaagatctggtgttgttgatgcagttgcagtcattttgtttttcttttaagcttttgagactttaatattgtaatgcatcttataaatgttctatggtttatgcaagacatttgaattgttgaacattttagcttctttcatccaaatttttt

SEQ ID NO: 1080 - DNA, 372 bp, Brassica juncea
ctcgagtattttcacgccgttcatcttcgtcctctagcttctcacgcctgagagcattcgaaagccatgggtttcgctgcgatctggaactctcaccccaagaagtatgggcctggttcccgcacctgccgtgtgtgcggaaactcacatgggctgatcaggaagtatggacttaactgctgtagacagtgcttccgcagcaacgccaaggaaatcggattcatcaagtaccgttaaggatccggtgttgctgatgaagttgctgtcatctggatgtctttaaagcttttgaatgttgtgttggatcttaatcttataaatgctttatgatttcgtcttgaacatttgagctttccttgttttatttaaaaa

SEQ ID NO: 1081 - DNA, 526 bp, Brassica juncea
agggttttcgattgtttttcacgccgttcatcttcgtctgctagcttctcgcgcctgagcattcgaaaaccatgggtttcgctgcgatctggaactctcaccccaagaagtatgggcctggttcccgcacctgccgtgtgtgcggaaactcgcatgggctgatcaggaagtatggactaaactgctgtagacagtgcttccgcagcaacgccaaggaaatcggattcatcaagtaccgttaaagaagatccgtggttgtttgagcaggaagagtcatttgcggttttaagttttactttaatcttgtaatggatcttataaatgttttgttagtttcaacaaggcatttaagctgttgaacattttagcttccttgttttatcaaacatcctgattctactaccatttgattatcatagtttcttttggatgtgtgtggtggctgttgctctgttatcgagctctaaccataaaacatgggcagacctcaacactagcaacaacgagaatcactacatggcaaaac

SEQ ID NO: 1082 - DNA, 499 bp, Brassica juncea
gacgaaatttagggttttcgagtgttttcacgccgttcatcttcgtctcctagcttctaacgccttgagcattcgaaaaccatgggtttcgctgcgatctggaactctcaccctaagaagtacgggcctggttcccgcacctgccgtgtgtgcggaaactcgcacgggctaatcaggaagtatggacttaactgctgtagacagtgcttccgtagcaacgccaaggaaatcggattcatcaagtaccgttaaagaatctggagttgcttatgcagttgaagtcgtttgtttttcttctaaaagattttgagatttttatgttgtactggatcgtataaatgttttatgattctgtcgtttgacatctgagcttttatcaaaaatcttggttctacttcaatttggttaagatttaatcttgcagtttactctttattttgtctcagtcttggttgattattaaatgatagtattagcaacgagaacccgttagtgagag

SEQ ID NO: 1083 - DNA, 288 bp, Brassica juncea
gaatctagggttttcgagtgtaatcacgccgttcatcttcgtctcttctagctttctaacgcctgagcattcgaaaaccatgggtttcgctgcgatctggaactctcatcccaagaagtacgggcctggttcccgcacctgccgtgtgtgcggaaactcgcatgggctaatcaggaagtatggacttaactgctgtagacagtgcttccgcagcaacgccaaggagatcggattcatcaagtaccgttaaagatccggtgtgttgcttatgcagttgctgtcatttgg

SEQ ID NO: 1084 - DNA, 480 bp, Brassica juncea
gtgtcgcgcctcctacgaaatttagggttttgacgccgcacctcctagcttttgacaatcgaaaacaatgggttttgctgcgatttggaactctcatccaaagaagtatgggcctggttcccgcacctgccgtgtgtgcggaaactcgcatgggctaataaggaagtatggacttaactgctgtagacagtgcttccgcagtaacgccaaggaaattggattcattaagtaccgttaaagaagatccggtgttgttagcagtctcttttgtttttttttgagcgtttgagactatattgtaatggatgatttcatttgagttatacaatttgattatcatatttatctcgagtctcttagcgttttgagtggctattgctctgtttattaatgtgcctctatgaaccataaacactaaatgttaaccagggatagacaaatttcgtcaacagtggtgtctttggtgatgtactagttaat

SEQ ID NO: 1085 - DNA, 513 bp, Brassica juncea
cgggggagggttttccaaactttctgagtgttatcacgccgtccgtcttcgtcttcgtcttctagattcgcattagaagatcatgggtttcgctgcgatttggaactctcatcccaagaagtacgggcctggttcccgcacctgccgtgtgtgcggaaactcgcatgggctaatcaggaagtatggtcttaactgctgtagacagtgcttccgcagcaacgccaaggaaatcggattcatcaagtaccgttaaagatctggggttgttgatgcagttgcagtcattttgtttttcttttaagcttttgagactttaatattgtattggatcttataaatgttttatggttaatgcaagacatttgagttgttcaacgttttagcttccttgttttagtgcaatttgatcatctggtagattggagtttctctttactttttgatgtgtgttttaccttgtttatcgttctttctttaagaactataatctctgtctaaccaagcagagtttac

SEQ ID NO: 1086 - DNA, 385 bp, Brassica juncea
attagggttttccaaactttctgagtgttatcacgccgtccgtcttcgtcttcgtcttctagattcgcattagaagatcatgggtttcgctgcgatttggaactctcatcccaagaagtacgggcctggttcccgcacctgccgtgtgtgcggaaattcgcatgggttgatcaggaagtatggtcttaactgctgtagacagtgcttccgcagcaacgccaaggaaattggattcattaagtaccgttaaagaagatccgtggttgtttgagcaggaagagtcatttgcggttttaagttttactttaatcttgtaatggatcttataaatgtttttttagtttcaacaaggcatttaagctgttgaacattttagcttccttga

SEQ ID NO: 1087 - DNA, 237 bp, Brassica juncea
gtgttaacatcacgccgttcgtctacgtcttcgagcttcgcattcgaaagatcatcatgggtttcgctgcgatctggaactctcatcccaagaagtacgggcctggttcccgcacctgccgtgtgtgcggaaactcgcatgggctaatcaggaagtatggccttaactgctgtagacagtgtttccgtagcaacgccaaggaaattggattcattaagtaccgttaaagaagatccg

SEQ ID NO: 1088 - DNA, 678 bp, Brassica oleracea
ttttaacctaaatgggggaattgaggtccattcgcacttatataagtcgattatgtgtgttgcgtcgcctacgaaatttagggttttcgagtgttttcacgccgttcatcttcgtcttctagcttctcaagcctgagcattcgaaaaccatgggtttcgctgcgatctggaactctcaccccaagaagtacgggcctggttcccgcacctgccgtgtgtgcggaaactcgcatgggctaatcaggaagtatggacttaactgctgtagacagtgcttccgtagcaacgccaaggaaatcggattcatcaagtaccgttaaagatctggagttgcttatgctgttgaagtcgtttgttttctctaaaagattttgatattttatgttgtactggatcttataaatgttttatgattctgtcgtttaacatctaagcttttatcaaaaatcttggttctctacttcaatttggttatgatttaatcttgcagtttactctttattttgtctcagtattggttgattattagatgatagtagcagcaacgagaaacccgtaaatgagacgcatgaagcatagccaacagctaatcatacaagtaaattatttggaagaaaaattggaaatatagaccaaaagtttaaccatatttgtcgataatcaaaccgatctttcagt

SEQ ID NO: 1089 - DNA, 714 bp, Brassica oleracea
acatatataggttttcaaatttcatattgggcttgtataacaaggcccatcttctaatcaacctttttcattttgggtccgctataactaaataaattgatcatgtgcgtcgtcattacctattagggttttccgaaattttgagtgttatcacgccgttcgtcttcgtcttcgtcttcgtcttctagcttcgcattagaagatcatgggtttcgctgcgatttggaactctcatcccaagaagtacgggcctggttcccgcacctgccgtgtttgcggaaactcgcatgggctgatcaggaagtatggtcttaactgctgtagacagtgcttccgcagcaacgctaaagaaattggattcattaagtaccgttaaagaagattcggtgttgtttgagcaggaagagtcatttggtttttttaagctttacttcaatcttgtaatggatcttataaatgctttagagtttcaacaaggcatttaagttgttgaacattttagcttccttgttttatcaaacatcttaattctactaccatttgattatcatagtttctcttacttttttgaatgtgtggggtggctgttgctcttttatcgagctcccttcatcaaaccataaaacatgggcagacctcaacactagcaacaacgagaatcactacatggcaaaactcactctcactttggttaatctagaactactgttaaac

SEQ ID NO: 1090 - DNA, 660 bp, Brassica oleracea
ctcaatattgtcgccgacaaaagctagggttttccaatatttcgactgtttataacgccgttcgtccatctacgtcttcgtcttctagcttttcacgcctgagcattcgataaatcatggggttcgctgcgatttggaactctcatcccaagaagtacgggcctggttcccgcacctgccgtgtgtgtggaaactcgcatgggctaatcagaaagtatggtcttaactgctgtagacagtgcttccgcagcaacgccaaggaaatcggattcatcaagtaccgttaaagatctggtggtgttgatgcagttgcagtcattttgtttttttttttaaagcttttgagactttaatattgtaatggatcttataaatgttctatggtttatgcaagacatttgagttgttttaatccaaaatctttgttctgcaatttgatcatattatagatttggaggttttttacttttttggggtctgtgggtggcgctattgctctgcttatttggagctgtcttttatcataatctctgtctaaccagggaaaggtcaaaatatttttacaacattggatgagtaaatgacactactagacaatagtgagaccaatgaagcaattcattcaccatcatcatcaattatcatacgcatacgtctgat

SEQ ID NO: 1091 - DNA, 548 bp, Brassica rapa
gaaaagttctagggttttccaatatttcgagtgtttataacgccgttcgtctagctattcacgactgagcattcgaaaaaaatcatggggtttgctgcgatttggaactctcatcccaagaagtacggtcctggttcccgcacctgccgtgtgtgcggaaactcgcatgggctaatcaggaagtatggtcttaactgttgtagacagtgcttccgcagcaacgccaaggaaatcggattcatcaagtaccgttaaagatctggggttgttgatgcagttgcagtcattttgtttttcttttaagcttttgagactttaatattgtaatgcatcttataaatgttctatggtttatgcaagacatttgaattgttgaacattttagcttctttcatccaaatttttttttttggcaatttgatcgtcgggtggattggagtttctctttactttttgatgtgtgttttaccttgtttatcgttctttctttaagaactataatctctgtctaaccaagcagagtttacaatattggttgatcgctaaaa

SEQ ID NO: 1092 - DNA, 543 bp, Brassica rapa
tcattacctattagggttttccaaactttctgagtgttatcacgccgtccgtcttcgtcttcgtcttctagattcgcattagaagatcatgggtttcgctgcgatttggaactctcatcccaagaagtacgggcctggttcccgcacctgccgtgtgtgcggaaactcgcatgggctgattaggaagtatggtcttaactgctgtagacagtgcttccgcagcaacgcgaaagaaattggattcatcaagtaccgttaaagaagatccgtggttgtttgagcaggaagagtcatttgcggttttaagttttactttaatcttgtaatggatcttataaatgtttttttagtttcaacaaggcatttaagctgttgaacattttagcttccttgttttatcaaacatcctgattctactaccatttgattatcatagtttcttttggatgtgtgtggtggctgttgctctgttatcgagctctaaccataaaacatgggcagacctcaacactagcaacaacgagaatcactacatggcaaaac

SEQ ID NO: 1093 - DNA, 521 bp, Brassica rapa
tataagtcgattatgtgtgttccgtcgcctacgaaatttagggttttcgagtgttttcacgccgttcatcttcgtctcctagcttctaacgccttgagcattcgaaaaccatgggtttcgctgcgatctggaactctcaccctaagaagtacgggcctggttcccgcacctgccgtgtgtgcggaaactcgcacgggctaatcaggaagtatggacttaactgctgtagacagtgcttccgtagcaacgccaaggaaatcggattcatcaagtaccgttaaagaatctggagttgcttatgcagttgaagtcgtttgttttttttttctaaaagattttgagatttttatgttgtactggatcttataaatgttttatgattctgtcgtttgacatctgaacttttatcaaaaatcttggttctacttcaatttggttatgatttaatcttgcagtttactccttattttgtctcagtattggttgattattagatgatagtagcagcaacgagaaaccgt

SEQ ID NO: 1094 - DNA, 203 bp, Bupleurum chinense
gagaaagatgggtcattcaaacatatggaacgctcatccaaagacatacggtcctggttctcgtgcctgccgtgtttgtggaaatcctcatggattgattagaaagtatggtataatgtgttgcagacaatgcttcaaaactaatgccaaggagattggctttgttaagtatcgataaatgcatatcacttagctctatattg

SEQ ID NO: 1095 - DNA, 476 bp, Bupleurum chinense
cagttctttctctgttaattgaatcagccgcggcagaaaataaagcgatcgaagaaaaatgggacactccaatatttggaatgctcatccaaagacatatgggcctggttctcgcgcatgccgtgtgtgtggtaaccctcatggtttgatccgaaagtatggaatcatgtgttgccgacaatgcttcaagaccaatgcaaaggaaattggctttgttaagtatcgataaaaagttgtatgctctttggggtgcatggagaagagttcatgagagcatagttttattttgttttgccagaactaatatacttcatggaattatcgttttgtatctccatagtaatgacatagtttgaatgaaactctggtttctccctcattacctggatctactctgaattcatctggtttattttattttgttcttataactactttttcatatcacatgtggtacttgtgaagctgtttgctgt

SEQ ID NO: 1096 - DNA, 278 bp, Bupleurum chinense
agaaagatggggcattcaaacatttggaacgctcatcctaagacatacggtcctggttctcgcgcctgccgtgtttgtggaaatcctcatggattgattagaaagtatggtataatgtgttgcagacaatgcttcaaaactaatgccaaggagattggctttgttaagtatcgataaatgcatgtcacttagctctatattgaagatgatcgatcacttggaagcagattatggtagctagctgattctagatcaatgtaccttcatgcagtactgct

SEQ ID NO: 1097 - DNA, 372 bp, Bupleurum chinense
cacgcagttctttctctgttaattgaatcagccgcggcagaaaataaagcgatcgaagaaaaatgggacactccaatatttggaatgctcatccaaagacatatgggcctggttctcgagcatgccgtgtgtgtggtaaccctcatggtttgatccgaaagtatggaatcatgtgttgccgacaatgcttcaagaccaatgcaaaggaaattggctttgttaagtatcgataaaaggttttatgctctttggtgtgcatggagattggagaagagttcatgagagcatagttttattttgttttgccagaactaatgtacttcatggaattattgttttgaatctccatagtaatgacatagtttgaatgaa

SEQ ID NO: 1098 - DNA, 443 bp, Bupleurum chinense
gcagcagcggccgagagtagatcattcaattgagaaagatggggcattcaaacatttggaacgctcatcctaagacatacggtcctggttctcgcgcctgccgtgtttgtggaaatcctcatggattgattagaaagtatggtataatgtgttgcagacaatgcttcaaaactaatgccaaggagattggctttgttaagtatcgataaatgcatgtcacttagctctatattgaagatgatcgatcattaggaagcagattctggtagctttcttcttagatcaattgtaccttcatgcatagtgctctgtttctttagtttttcttcttcgacaaaagtttgattctaaattatgttaagtctaacttgctaaagcaattgtaaacactaatgtaatgttgcttctttttcttctggttcggctaacattacctactattc

SEQ ID NO: 1099 - DNA, 335 bp, Bupleurum chinense
atgggacactcaaacatatggaacgcgcatcccaagacctacggtcctggctctcgcgcctgccgtgtttgtggaaatcctcatgggttgattagaaagtatgggataatgtgttgcagacaatgcttcaaaactaatgccaaggaaattggcttcgttaagtatcgttaagtggaggcttgtcatctgcctatgcagtgaagatgatcccgctgaaaccgacccgattttatatcaatttagtttcattaatttagagtgatgtttttttgttaattacaatggatttatcctaatgatgtaagagatcaattgagacttataaatgttttatc

SEQ ID NO: 1100 - DNA, 1035 bp, Brassica napus
accaagatttttgataaaagcttagatgttaaacgacagaatcataaaacatttataagatccagaacaacataaaatatcaaaatcttttagagaaaacaaacgacttcaacagcataagcaactccagatctttaacggtacttaatgaatccgatttccttggcgttgctacggaagcactgtctacagcagttaagtccatacttcctgattagcccatgcgagtttccgcacacacggcaggtgcgggaaccaggcccgtacttcttggggtgagagttccagatcgcagcgaaacccatggttttcgaatgctcaggcttgagaagcgagaagacgaagatgaacggcgtgaaaacactcgaaaaccagatcgcgagcggccgcccgcgatctagagactagttctagatcgcgagcggccgctcacgatctagaactagtcggacgcgtgggcggacgcgtgggcggacgcgtgggccaaaaaaaattcctccaacaatggcaactatagctgctactagtcttaacattggaatccaactagcagtcatcaccagcgaggctcgaccagttagtctcgcaggtccagtccgtttgaacaatccttggaatcttggttcaagaacaacgaaccggatggcggcagttaggccggttaaagcgacgccagaaggagtgatatcggataaagtggagaagagcatcaaggacgcagaggagacttgtgctggcgaccccgtgagcggagagtgtgtagctgcgtgggacgaggtcgaggagctaagcgcagcagctagccacgctagagacaagaagaaagactccgaccctttggaggaatactgcaaagacaatcctgagactagcgagtgtcgtacttacgactgatccatcatgttccaggattatattatattacacttttgttccggtcaatttggtgatatgatatgaatgctgtctttgagactcacgcaggttatatactttgtaatttggcaagatttataatcgaaaatcgaattaaat

SEQ ID NO: 1101 - DNA, 389 bp, Brassica napus
gtgttttcacgccgttcatcttcgtctcctagcttctaacgccttgagcattcgaaaaccatgggtttcgctgcgatctggaactctcaccctaagaagtacgggcctggttcccgcacctgccgtgtgtgcggaaactcgcacgggctaatcaggaagtatggacttaactgctgtagacagtgcttccgtagcaacgccaaggaaatcggattcatcaagtaccgttaaagaatctggagttgcttatgcagttgaagtcgtttgtttttttttctgaaagattttgagatttttatgttgtactggatcttataaatgttttatgattctgtcgtttgacatctgagcttttatcaaaaatcttggttctacttaaatttggttaa

SEQ ID NO: 1102 - DNA, 461 bp, Brassica napus
gattcgaaaaaaatcatggggtttgctgcgatttggaactctcatcccaagaagtacggtcctggttcccgcacctgccgtgtgtgcggaaactcgcatgggctaatcaggaagtatggtcttaactgttgtagacagtgcttccgcagcaacgccaaggaaatcggattcatcaagtaccgttaaagatctggggttgttgatgcagttgcagtcattttgtttttcttttaagcttttgagactttaatattgtaatgcatcttataaatgttctatggtttatgcaagacatttgaattgttgaacattttagcttctttcatccaaatttttttttttggcaatttgatcatcgggtggattggagtttctctttactttttgatgtgtgttttaccttgtttatcgttctttctttaagaactataatctctgtctaaccaagcagagtttacaat

SEQ ID NO: 1103 - DNA, 439 bp, Brassica napus
gagggttttccaaactttctgagtgttatcacgccgttcgtcttcgtcttcgtcttcgtcttctagcttcgcattagaagatcatgggtttcgcttcgatttggaactctcatcccaagaagtacgggcctggttcccgcacctgccgtgtttgcggaaactcgcatgggctgatcaggaagtatggtcttaactgctgtagacagtgcttccgcagcaacgctaaagaaattggattcattaagtaccgttaaagaagattcggtgttgtttgagcaggaagagtcatttgggttttttaagctttacttcaatcttgtaatggatcttataaatgctttagagtttcaactaggcatttaagttgttgaacattttagcttccttgttttatcaaacatcttaattctactaccatttgattatcataaaaaaaaaa

SEQ ID NO: 1104 - DNA, 428 bp, Brassica napus
aaaaatcatggggtttgctgcgatttggaactctcatcccaagaagtacgggcctggttcccgcacctgccgtgtgtgcggaaactcgcatgggctaatcaggaagtatggtcttaactgttgtagacagtgcttccgcagcaacgccaaggaaatcggattcatcaagtaccgttaaagatctggggttgttgatgccgttgcagtcattttgttttcttttaagcttttgagactttaatattgtaatgcatcttataaatgttctatggtttatgcaatacatttgaattgttgaacattttagctttcttgcattcatccaaaatctttggttctgcaatttgatcatcgggtggattggagtctctttactttttgatgtgtgttttaccttgtttatcgttctttctttaagactataatct

SEQ ID NO: 1105 - DNA, 528 bp, Daucus carota
gaccgcagctgccttgttataattccagatcaatctcaacgagggagagggagagagacggagagagattgagagagagatatggggcactcaaacatctggaacgcgcatcccaagacctacggccctggctctcgcgcctgccgtgtttgtggaaatcctcatgggataattagaaagtatgggataatgtgctgcagacagtgctttaaaaccaatgccaaggaaatcggtttcatcaagtatcgttaagttgggacttgtcatctacccccacagtccttcaccctgccgaagaagacttgtggtacctgttttattgtcaatttagtttcatgaagatgtagttttgtttttctggagacaatggatccatcctgatgatgtaatagattgagtaatttgtagactattaaagcattggcaaatttgaagctgctattgttctttttgtttagctaacaacattttcatattctgcaaatctcactctttaatttgttaaagttgacatgccctctcttagag

SEQ ID NO: 1106 - DNA, 578 bp, Cedrus atlantica
acgaggtggaatttgttgattttgtaccgaagatgcctcactctgcagtttggaattcccaccccaagaaatatgggcctggttcccgtgcctgtcgagtgtgtgggaacccacatggtttgattaggaaatatggtcttaattgctgccgacagtgctttcgtacttattccaaagacattggatttgttaagtatcgataagagatggggttattgtgaaggagctgcagaaccattccatctctacaattgagctacacttgggcttttggtggttggttttatatgatgctgctcaagttctattcagtcattccagatctcaatgatggaatgatagaaatagttgatgaattgtcaagttttgtaacttgttattagctattatgctgatttatagttatatactccagagtctacgttatatatgtggaacttcaggagggattaattgcattcaataatttttatagattgcattgaggaatagatcatgttgtgtagttcatttaaaccttcggtttattggatgaaaagcttagttcttaaaatctgagacactatcaatgattttct

SEQ ID NO: 1107 - DNA, 840 bp, Cedrus atlantica
ggtgcaaaatagcatagaaggccactgccaacaagaagaacactgtaatagccacaacctgaaaagtgtgagcgggcagctgccagccatggcggcgaaccatcacgccttcacgaaaatggcgtgcaaaacttgcacacctccgtagcactaacagcatgcgcttccagaatcaacgtccttttgcttcgaacaaaagaaaaagccgaagcgtgctcctcactgctccacaaatagaccaaccaaaataccaaacacgaatttggcgctcctagcctgcagccctacatctgtcagtacaccctccgcactatcagccgagccggccaacggcccccgagcttaaagaaaccgcttttcgccgggtcaggagcgaaatcttaccagttaaaacgaggttgcgaggtcgaattaggtgatcgtgttctgaagatgcctcactctgcagtctggaattctcaccccaagaaatatgggcctggttctcgcgcctgtcgggtgtgtggcaacccacatggcttgatcaggaaatatggtcttaactgttgtcgacagtgctttcgcacttattccaaagatattggatttgttaagtatcgctaagagatggattcgatggtgaaggcgctgtagggttggcagtagatcctttccattataaaatcaatggaaacaattcaacatgggaaattcatgttctatttgaactatttagggtttttggtctgttatttttataatgttgatccagttccgttcagtcattctagaacgaactcatggaaagattgaagtacttgataatttgtcaagttttgttgaggctgatttataattttc

SEQ ID NO: 1108 - DNA, 581 bp, Chrysanthemum coronarium
gctttggtggttccggtggttttttgctgattttggtggttgcgtgtgtttttgttgtgtactcgaaagagtggttgctgcttcgagtatatcacgtccccaaatcaatttaattgatggagaagtgaggaaataccggatgaattgatcggatgcgtaataattgcaaatgaactttgaagatatagatggcgcagatctcaaacgtcagcagcagcaggttttcttaagaacaagttcgccttgcaataccatgggtcatatctggaactctcatcccaaaactcacggtcctggttcacgcacttgccgtgtgtgtggaaattctcatgggttgatcaggaagtatggccttatgtgctgcagacagtgcttccacagcaatgctaaggaaattggtttcattaagtatcgttaaggactttggagatctgatggacaagaagagatgctataatattccatcagaaggattttgaatgtgttgttttacgtttaagtatgactaagacttgttgattgttctctttttcattagacatgtttgttttgccgttctggtaaaatcaaaaaccaaatgc

SEQ ID NO: 1109 - DNA, 247 bp, Cirsium arvense
caaacgtatggaattctcatcctaagacctatgggcctggctcacgcacctgccgtgtgtgtgggaattcccatggtttgatcaggaaatacggccttatgtgctgcaggcagtgtttccacagcaatgccaaggaaattggtttcattaagtaccgttaaggaggtctgattggaagaaagctggttatatactcgattgaaagagcttctagtgtgtcttttacatttcagtatgttcatgactt

SEQ ID NO: 1110 - DNA, 279 bp, Cleome spinosa
gggggggttttcgaggggttcttcgccgctcgtcttcgtcagttagctttccctgttcaagcaccttacgaccatgggtcacgccaatgtctggaattctcacccgaagaagtacggtcctggatctcgcctctgccgtgtgtgtgggaactctcacgggatgatcaggaagtatggtctgaactgctgcaggcaatgcttccgcagcaatgccaaggaaatcggattcatcaaggtaattccttttctcaatcgatgtccttctaggctgtgtttttc

SEQ ID NO: 1111 - DNA, 397 bp, Euphorbia peplus
cattcaaatgtgtggaactctcatcctaaaaccttcggtcccggttctcgtgcttgccgggtgtgtggaaatcctcatgggattataaggaagtatgctctcatgtgctgtaggcagtgcttccgaagcaatgttaaggaaattggatttattaagtatcgttaaatatgactcttcaagtgttggggaagaggagaagagaaagaagaaaagcatgtagtttgttttgttgttggatttatcagttattttgattatatagctaggctgtttaccttttgagtaaaacaattgatggttacatgaattttgagtaagaatttcaattttattggttcctatctacttaatatttttgatacaaattgactcagtaatgaaaggtaacctttgcacc

SEQ ID NO: 1112 - DNA, 442 bp, Panax ginseng
ggtatcaacgcagagtacatggggaaactcctctgcgacttcaatccgcggcagctctagatcgagaaagctaggaggggagagagagagagagagagatgggacactcaaatatatggaacgcgcatcctaagacctacggccctggttcacgtgcctgccgtgtttgtgggaaccctcatggattgatacgaaaatacgggattatgtgctgcagacagtgcttcaaaaccatgccaaggaaatcggcttcatcaagtatcgttagaaggatgtatgccttttctctacgagaggatttttacccaagcacagtgatggtagtgggtttttaatattgattttgcttcatgaatttattattctgctgtatgtttggagacaatgggttaattggaatgatgtagctcactctagtttattattgaggacatgagttgtc

SEQ ID NO: 1113 - DNA, 757 bp, Panax ginseng
aacacactatacgtccgctgaacagagcactttggatgcataatagatctggaccaagtgttattctctaaattaacccctggcgctgcagatcagtatatgtcttcttgttataaatgttaccctctcggtcttcatattcttcttcaaggtctggccgccacttgatcactccttgtcgttcttgtattctggggggcactcaaacatttggaatgcacatcctaagacctatggccctggttctcgtgcctgccgtgtgtgtgggaacccccatgggttgatacgaaaatatgggatcatgtgctgcagacagtgcttcaaaaccaatgcaaaggaaatcggcttcatcaagtatcgttaaaataaggttacgccatttcctatacaaaggaagaggagtttgtgagagcacaacgatggtagtagttttgagaattggtttggcttcacggatttgtaattctgtatgtccacagacaatggatataactggaatcatgtagcttgctctagtttatcatttaacttgaagtgatgtttggacctaaatataatacgtacaacattttagtaaaaataaaaaaaaaaaaaaaaaaaaaaaaaaaaaaaaaaaaaaaaaaaaaaaaaaaaaaaaaaaaaaaaaaaaaaaaaaaaaaaaaaaagaaagaagaaaaagaagaacaagaagaagaagagagacacacacacatacacacacaacacacacacacacacacacacacacacacacaca

SEQ ID NO: 1114 - DNA, 661 bp, Pinus pinaster
gggctttgcggacgtgaaagtggaataaaacgcgtcgttaaagtcataacatcctctatttactgacattagggttcgtaggcaacctatttggatacagaagcgtggagaaagagcagccgggtgagaagggggaaaattatacagttaaaacgcgaagatgcctcactctgcagtttggaattctcaccccaagaaatatgggcctggttcccgaacctgtcgggtgtgtgggaacccacatggcttgattaggaaatatggtcttaattgttgtcgacagtgctttcgtacttattccaaggacattggatttgtcaagtatcgttaagagacggagtctaggtgaacgagctgcagatcattccatctttgcgattgatctaccctttcgtttttgttcggttgcttttttgtgatgttgctcgagtttcgttcagtcattctagaacccagtgatggagagagagaaatattcgatgaactgtcaagttttattcttagctattacaacgatttataattatagactgaagtttaggttatatttgttgagatttaggagggattaattgaatacggttgaggaacggaatcatgtttttgtagtccatttaaacctgcggtcaattttatgcgaaagtacttatcttgatcttga

SEQ ID NO: 1115 - DNA, 1356 bp, Pinus taeda
agtatgatcaaagcttcgtaaccttaaattgacggacttaaagtagttatcattttagggctttgcggacgtgaaagtggaataaaacgcgtccttaaagtcataacatcctctatttactgacattagggttcttaggcaacatagttggatacagaagcgtggagaaagagcagccgggtgagaaaggggaaaattatacagttaaaacggtttggttgatttaccactggaccggaaacttgttgccgttgtttctttttgatttgtatgtatttgagtttgtctccactctctgagctatcttgggtgcctttattatttataattacagaggtcacgaagtcgaatttatacgataatggattaggccctttacatttttttatttttggttttcacttttctattggtttgacgtttaatctgatgagccggactggtgtgaaccttcaataaaaggataattacagtagggttttgattcacaagtgtttggtgggattttagagatttcgatgcattaaaatgggatttcttgtgtttcaattgttgcaaggtttggttgatttaccactggaccgaaacacggttgccgttgtttcttcttgttttcgaagatgcctcactctgcagtttggaattctcaccccaagaaatatgggcctggttcccgaacctgtcgggtgtgtgggaacccacatggcttgattaggaaatatggtcttaattgttgtcgacagtgctttcgtacttattccaaggacattggatttgtcaagtatcgttaagagatggagtctaggtgaacgagctgcagaatcattccatcttttttgcgattgatctacccttgcgtttttggtcggttgcttttttgtgatgttgctcgagtttcgttcagtcattccagaacccagtgatggagagatagaaatattcgatgaactgtcaagttttattctttagctattacaacgatttataattatagactgaagtttaggttatatttgttgagatttaggagggattaattgaatacggttgaggaacggaatcatgtttttgtagttcatttaaacctgcggttaattttatgcaaaagtacttatcttgattcctaaaatctgaaacgccatctatattttttttatgcattccaaatctctgagtggttttggtgtttaaaaggaagatgtaatgtgttagattttatgattttgtgctaactttccagaagccctctttctatttgctgtagttaattacaaaacatttgtttgttccttcgcttaaaaaccttttaaagtttggagacttattcatcctgtaatgctccagggtaattttttg

SEQ ID NO: 1116 - DNA, 883 bp, Pseudotsuga menziesii
aattagcggcctctatttattgtcattagggttcaagagcgttgttgttggatacagaagcgaggagaaggagcggccggcagagttaggagcgaaatcacaccagatcaaaacgaggtcacgaggtcgaatttagtgattttgtatcgaagatgcctcactctgcagtttggaattctcaccccaagaaatatgggcctggttcccgtgcttgtcgagtgtgtgggaacccacatggcttgattaggaaatatggtcttaattgttgtcgacagtgctttcgtacttactccaaagacattggatttgttaagtaccgataagagatggagtctttagtgaaggagctgcagaattatcccatttcgattgagatattccttggtttttggtcagatggttttttatgatgctgctcaagttcaattctgtcattccagaactcaatgatggatagatagaaatattcgatgaattgtgaagttttgttattttctattacaccaatttataattattcactctaaattctaggttatatatgtagagattcaggagggattaattcaggagggattaattgaatatgataatttttcctagagtgcatagatgaatggagtcttgttttgttgcttatttaatcctttggttaattggatgcaaaagtacttaatcttgatttccaaaatctgagatgccatctataatttttgttatggttccctaaactgcgaatgggtttggtgtttgaaaatggaggtgtattgtgttagatttttatgcgtgctatctttacaatagtcaccttacaaagcatttatcttgttcttttgctggagaaacattttcgggtgctgcactttatttgcatcgatagttt

SEQ ID NO: 1117 - DNA, 817 bp, Pseudotsuga menziesii
aagtagaatgaaatacgtcctaatgcttatggcgcctctatttacttccattagggtttgaatccagtaatctgttggatacacggaagcgtaagggaaggagcaagggggcgaggaaggagatacgttttaccagttaaaacgaggttgcgaggttgaatttggtgatcttgtatcgaagatgcctcactctgcagtctggaattctcaccccaagaaatatggacccggctctcgcgcctgtcgggtgtgtggcaatccacatggcatgattaggaaatatggtcttaactgttgtagacagtgctttcgcacttatgccaaagacataggatttgttaagtatcgctaagagatggattcgatggtgaaggcactgcaagattggcagtagaccctttccattatagaatcaatggaaatgatttataatgggaaattcatgttcaatttgatttactttttgtttgtgtccgttgttttgtattatgttgctcaagtttcattccgtcattccagaactcacagatggaaagattgaagtacttgataaactgtccagttttgttaagggctgatttacgctgatttataattctacatccaggctatatctgtagagcttttggagacaattattctaaaatgctttgaggaatagaatcatgtttcttagttcatttatatctttggttaattgaacaacgaaagaacttcgtttttattccaaattccaggacaccatgtagggttattgttgatcccttcatgattggccatcgttctctaatatcctttctctatttgcaatattcac

SEQ ID NO: 1118 - DNA, 436 bp, Raphanus sativus
gggttttcacgccgtttctcttcgtcttcgtcttcgtcttctagcttcgcatttgaagataataatatgggtttcgctgcgatttggaactctcatcccaagaaatacgggcctggttcccgcacctgccgtgtgtgcggaaactcccatgggttgatcaggaagtatggtctcaactgctgtagacagtgcttccgcagcaacgccaaggaaatcggattcatcaagtaccgttaaaagaagatccggcgttgttttatgcacgagtcgtttgggttcttgagtttttggagacttttatttactgtaatgcatcttatttaatgtttttattgatttcgataaaaaaggcttttgagccgttgttgaacctgttagcttccttttgtcttaatccgatattttggttctaccttatagtattgggttgttgagt

SEQ ID NO: 1119 - DNA, 280 bp, Senecio madagascariensis
aagcagtggtatcaacgcaggtacgcgggggaccaccggcgctttagattatcaattgcggctgctgcttttatataagaatctggtgaagaaagatgggacactcaaacatatggaacgctcaccctaagacttatggtcctggctcacgcgcctgccgtgtgtgtggaaattcccatggaataatcaggaagtatggtcttatgtgctgcagacagtgcttccacagcaatgccaaggaaatcggtttcatcaagtacctgcccgggcggccgctcga

SEQ ID NO: 1120 - DNA, 511 bp, Sequoia sempervirens
aggagatcggctgttgtctcaactgcggtttttcaggaagatctgtattctgggcaaggttgaagctttggtgttaacgataagttgaagatgggtcatactgcagtatggaattctcatcccaagacatacggttcaggctcacgggcctgtcgtgtgtgtggaaacccacatgccatcatccgcaaatatggtcttatgtgctgtcgtcagtgctttcgcagttatgccaaagacattggctttgttaaatatcgttaagttatcaatggaagatttaagctgcttgagatttatagcaagcatttatgtcatcaatggcagttattcaattgggtttggggtgttctggacgtcttttccagagacaattaaacgctcttgttcttagatacaatgttagttttgcattgaacacaattcaaattactatctgtaatgattgaggatctgctaatttgaaagataaattctgttggatttcgtaaatgtgtttcatgcttgaaatgac

SEQ ID NO: 1121 - DNA, 355 bp, Selaginella moellendorffii
tttagggcttgtcagtagggtttggaggagaaatctcggcgccatggggcacaccgctgtgtggaactcgcatccgaagaagtatggacctggatctaggcagtgccgggtctgtgggaatggccacggcctcattcgcaaatacgggataatgtgctgcagacagtgcttcaagacttacgccaaggacattggcttcatcaagtaccggtagagtgaaatcgagctccaggaagttctcaatctaggaaaaatggatccgcgagagaggcgatcgaaattttgacaagaaaaaaaaaccatgtagcttgagttcttcctggaatgaaaattgttctctgtttttccttgatcg

SEQ ID NO: 1122 - DNA, 354 bp, Selaginella moellendorffii
agggcttgtcagtagggtttttgaggcggaggagaaatctcggcgccatggggcacaccgctgtgtggaactcgcatccgaagaagtatggacctggatctaggcagtgccgggtctgtgggaatggccacggcctcattcgcaaatacgggataatgtgctgcagacagtgcttcaagacttacgccaaggacattggcttcatcaagtaccggtagagtgaaatcgagctccaggaagttctcaatctaggaaaaatggatccgcgagagaggcgatcgaaattttgacaagaaaaaaaaaaccatgtagcttgagttcttcccggaatgaaattgttctctgtttttcctt

SEQ ID NO: 1123 - DNA, 660 bp, Picea glauca
agtccgaagcgtaggtgaaggagcagcagcagcagggcgaggaaggagcgaaatcttatcagttaaaacgaggttgcgaagtcgaatttggtgattttgtatcgaagatgcctcactctgcagtctggaattctcaccccaagaaatatgggcccggttctcgcgcctgtcgggtgtgtggcaatccacacggcttgataaggaaatacggtcttaattgttgtcgacagtgctttcgcacttattccaaagacattggatttgttaagtatcgctaggagatggattttttcgatggtgaaggcgctgcagggttggcagtagatcctttccattgtagaatcaatggaaataattcgttaggggaaattcatgttcaatttgaactactctctggtttttggtctgttgtttattattatgttgctcaagttccattcagtcattctagaattcactgatggaaagattgaagtatttgataatttgtcaacttttgttaaggcttatttaagctgattgataattctacatctaggctatatatgtagatcttctggagacaattttgctaaagtgcattgagcaatagaatcgtgttttgtagtacaaaaaaaaaaaaaaaaaactcgagactagttctctcctcgtgccgaattc

SEQ ID NO: 1124 - DNA, 669 bp, Picea glauca
taatcggccgctattagattcatctttgcaatcacagaagtggcgtcgtcgattctggtgtgcttgtatcgaagatgggtcactctacagtgtacaattctcaccccaagagctatgggcctggctcacgcacctgtcgggtgtgtgggaactcgcatggtctgatcaggaaatatggcattaattgttgtcgacagtgcttccgcagttatgccaaagacattggctttgttaagtatcggtaaaagctagattccataatcagctcctggggattcgctatagtaccctgtgactatagagttaggattaatgacagtaatttattacggggaattcatgttctaattggaacattcttttaatatgggtagatctcatttttggcagcttattttagagagaatgggttactagttttgagtggatatgttgatgggtttgtcgccaagataatggttaaatttctcaattttgaagcatataaatgacattttcattcagtatctctgttaaattgcggttttgctctgcatagctaattattggtctttgttaaagttggagtatgtactttaattgtcttaaccagattttgaagcatataagtggcattttcatttaacatctctattaaattgtggttttgttctaaaaaaaaaaaaaaaa

SEQ ID NO: 1125 - DNA, 756 bp, Picea glauca
ggaacgcacctaaagcaattatcacgttagggcttcgcggacgtgaaggtggaataaaacgcgtgccaaagtaatttctatttaatgacattagggtttgagggcagagtagttggatacacagaagcgtggtgaaggagcatcggggtgaggaaggagggaaattataccagttaaagcgagatcacgaggctgaatttggtgattttgtatcgaagatgcctcactctgcagtctggaattctcaccccaagaaatatgggcctggttcccgcgcctgtcgagtgtgtgggaacccacatggcttgattaggaaatatggtcttaattgttgccgacagtgctttcgtacctattccaaagacattggttttgttaagtatcgataaaatatggagtctaagtgaaggagctgcagaatcattccatctctacgattgattgatgtttttggtcgtttggttttttatgttgttgctcaagttccgatcagtcattccagaactcaaagatggaaagatagaaatacttgacgaactgtcaagttttattatttgctactgcaccgatatataattacacactctagagtcgaggttatatatgtagagctttaggagggattaattgaatgcgataattttttctaaagtgtattgaggaatggaatcatgttttgtggttcatttagacttttggttaatttgatgcaatagtacttaacttgattctcaaaatctgaaacactgtctataa

SEQ ID NO: 1126 - DNA, 876 bp, Picea glauca
taatctctttccttgctgtgtagacacccacaacattaatactacacggctcccccccaatctcaatcggtgtaacttaaaaatgtgataaacatttatatcattgaactaccgaacctaaagcaatatattaggtctttgcggacgtgaaagtggaataaaacgcgtcctaatagttatggcgtcctctatttaccaacattagggtttgaaaccattatagtgttggatagtccgaagcgtaggtgaaggagcagcagggcgaggaaggagcgaaatcttatcagttaaaacgaggttgcgaagtcgaatttggtgattttgtatcgaagatgcctcactctgcagtctggaattctcaccccaagaaatatgggcccggttctcgcgcctgtcgggtgtgtggcaatccacacggcttgataaggaaatacggtcttaattgttgtcgacagtgctttcgcacttattccaaagacattggatttgttaagtatcgctaggagatggattttttcgatggtgaaggcgctgcagggttggcagtagatcctttccattgtagaaacaatggaaataattcgttaggggaaattcatgttcaatttgaactactctctggtttttggtctgttgtttattattatgttgctcaagttccattcagtcattctagaattcactgatggaaagattgaagtatttgataatttgtcaacttttgttaaggcttatttaagctgattgataattctacatctaggctatatatgtagatcttctggagacaattttgctaaagtgcattgagcaatagaatcgtgttttgtagtacatctaaatttttggttaattgaacaacgaaattatttagtt

SEQ ID NO: 1127 - DNA, 863 bp, Picea glauca
cgcacctaaagcaattatcacgttagggcttcgcggacgtgaaagtggaataaaacgcgtgccaaagtcatttctatttagtgacattagggtttgagggcagagtagttggatacacagaagcgtggtgaaggagcatcggggtgaggaaggagggaaattataccagttaaagcgagatcacgaggctgaatttggtgattttgtatcgaagatgcctcactctgcagtctggaattctcatcccaagaaatatgggcctggttcccgcgcctgtcgagtgtgtgggaacccacatggcttgattaggaaatatggtcttaattgttgccgacagtgctttcgtacctattccaaagacattggttttgttaagtatcgataaaatatggagtctaagtgaaggagctgcagaatcattctatctctacgattgattgatgtttttggtcgtttggttttttatgttgttgctcaagttccgatcagtcattccagaactcaaagatggaaagatagaaatacttgacgaactgtcaagttttattatttgctactgcaccgatatataattacacactctagagtcgaggttatatatgtagagctttaggagggattaattgaatgcgataattttttctaaagtgtattgaggaatggaatcatgttttgtggttcatttaggcttttggttaatttgatgcaatagtacttaacttgattctcaaaatctgaaacactgtctataattttgttatggattccaaaattttgcatggttttggtggtttaaaaatgaaagtgtactgtgtcagtttttatacttttatagttgtgctatttttctggctatagccacc

SEQ ID NO: 1128 - DNA, 725 bp, Picea glauca
gtggaataaaacgcgtgccaaagtcatttctatttactgacattagggtttgagggcagagtagttggatacacagaagcgtggtgaaggagcatcggggtgaggaaggagggaaattataccagttaaagcgagatcacgaggctgaatttggtgattttgtatcgaagatgcctcactctgcagtctggaattctcaccccaagaaatatgggcctggttcccgcgcctgtcgagtgtgtgggaacccacatggcttgattaggaaatatggtcttaattgttgccgacagtgctttcgtacctattccaaagacattggttttgttaagtatcgataaaatatggagtataagtgaaggagctgcagaatcattctatatctacgaaggattgatgttttggtcgtttggttttttatgttgttgctcaagttccgatcagtcattccagaactcaaagatggaaagataaatacttgacgaactgtcaagttttattatttgctactgcaccgatatataattacacactctagagtcgaggttatatatgtagagctttaggagggattaattgaatgcgataattttttctaaagtgtattgaggaatggaatcatgttttgtggttcatttaggcttttggttaatttgatgcaatagtacttaacttgattctcaaaatctgaaacactgtctataattttgttatggattccaaaa

SEQ ID NO: 1129 - DNA, 803 bp, Picea glauca
attaggtctttgcggacgtgaaagtggaataaaacgcgtcctaatagttatggcgtcctctatttaccaacattagggtttgaaaccattatagtgttggatagtccgaagcgtaggtgaaggagcagcagcagcagggcgaggaaggagcgaaatcttatcagttaaaacgaggttgcgaagtcgaatttggtgattttgtatcgaagatgcctcactctgcagtctggaattctcaccccaagaaatatgggcccggttctcgcgcctgtcgggtgtgtggcaatccacacggcttgattaggaaatacggtcttaattgttgtcgacagtgctttcgcacctattccaaagacattggatttgttaagtatcgctaggagatggattcgatggtgaaggtgctgcagggttggcagtagagcctttccattgtagaatcaatggaaataattcattaggggaaatttatgttcaatttgaactactctctggtttttggtctgtcttttattattatgttgctcaaattccattcagtcattgtagaactcactgatggaaagattgaagtatttgataatttgtcaacttttgttaaggcttattaaagctgattgataattctacatctaggctatatatgtagagcttcaggagacaattttgctaaagtgcattgaggaatagaatcatgttttgtagtacatctaaatttttggttaaatggacaacataattacttagtttttattccaaaatccaagacactgtagaattactgttgatgcttttgtgattgg

SEQ ID NO: 1130 - DNA, 672 bp, Picea glauca
ggatatagtgttggatagtccgaagcgtaggtgaaggagcagcagggcgaggaaggagcgaaatctcatcagttaaaacgaggttgcgaagtcgaatttggtgattttgtatcgaagatgcctcactctgcagtctggaattctcaccccaagaaatatgggcccggttctcgcgcctgtcgggtgtgtggcaatccacacggcttgataaggaaatacggtcttaattgttgtcgacagtgctttcgcacttattccaaagacattggatttgttaagtatcgctaggagatggattcgatggtgaaggtgctgcagggttggcagtagagcctttccattgtagaatcaatggaaataattcattaggggaaatttatgttcaatttgaactactctctggtttttggtctgtcttttattattatgttgctcaaattccattcagtcattgtagaactcactgatggaaagattgaagtatttgataatttgtcaaacttttgttaaggcttattaaagctgattgataattctacatctaggctatatatgtagagcttcaggagacaattttgctaaagtgcattgaggaatagaatcatgttttgtagtacatctaaatttttggttaaatggacaacataattacttagtttttattccaaaaaa

SEQ ID NO: 1131 - DNA, 718 bp, Picea glauca
acgactgaagaggagttggccatgacttggtggcgaaggaggggaagggccttgtgaactggcgtaggcttagcgtaaggagcatcggggtgaggaaggagggaaattataccagttaaagcgagatcaggaggctgaatttggtaattttgtatcgaagatgcctcactctgcagtctggaattctcatcccaagaaatatgggcctggttcccgcgcctgtcgagtgtgtgggaacccacatggcttgattaggaaatatggtcttaattgttgccgacagtgttttcgtacctattccaaagacattggttttgttaagtatcgataaaatatggagtctaagtgaaggagctgcagaatcattctatctctacgattgattgatgtttttggtcgtttggtttttatgttgttgctcaagttccgatcagtcattccagaactcaaagatggaaagatagaaatacttgacgaactgtcaagttttattatttgctactgcaccgatatataattacacactctagagtcgaggttatatatgtagagctttaggagggattaattgaatgcgataatttttctaaagtgtattgaggaatggaatcatgttttgtggttcatttaggcttttggttaatttgatgcaatagtacttaacttgattctcaaaatctgaaacactgtctataattttgttataggaaaaaaaaaa

SEQ ID NO: 1132 - DNA, 659 bp, Picea glauca
tatagtgttggatagtccgaagcgtaggtgaaggagcagcagcagggcgaggaaggagcgaaatcttatcagttaaaacgaggttgcgaagtcgaatttggtgattttgtatcgaagatgcctcactctgcagtctggaattctcaccccaagaaatatgggcccggttctcgcgcctgtcgggtgtgtggcaatccacacggcttgattaggaaatacggtcttaattgttgtcgacagtgctttcgcacctattccaaagacattggatttgttaagtatcgctaggagatggattcgatggtgaaggtgatgcagggttggcagtagagcctttccattgtagaatcaatggaaataattcattaggggaaatttatgttcaatttgaactactctttggttttggtttgtcttttattattatgttgctcaaattccattcagtcattgtagaactcactgatggaaagattgaagtatttgataatttgtcaacttttgttaaggcttattaaagctgattgataattctacatctaggctatatatgtagagcttcaggagacaattttgctaaagtgcattgagcaatagaatcgtgttttgtagtacatctaaatttttggttaaatggcaacataattacttagttttta

SEQ ID NO: 1133 - DNA, 678 bp, Picea glauca
atggcgtcctctatttaccaacattagggtttgaaaccattatagtgttggatagtccgaagcgtcggtgaaggagcagcagcagggcgaggaaggagcgaaatcttatcagttaaaacgaggttgcgaagtcgaatttggtgattttgtatcgaagatgcctcactctgcagtctggaattctcaccccaagaaatatgggcccggttctcgcgcctgtcgggtgtgtggcaatccacacggcttgataaggaaatacggtcttaattgttgtcgacagtgctttcgcacttattccaaagacattggatttgttaagtatcgctaggagatggatttttcgatggtgaaggcgctgcagggttggcagtagatcctttccattgtagaaacaatggaaataattcattaggggaaatttatgttcaatttgatctactctctggtttttggtctgtcttttattattatgttgctcaaattccattcagtcattatagaactcactgatggaaagattgaagtatttgataatttgtcaacttttgttaaggcttattaaagctgattgataattctacatctaggctatatatgtagagcttcaggagacaattttgctaaagtgcattgaggaatagaatcatgttttgtagtacatctaaatttttggttaaa

SEQ ID NO: 1134 - DNA, 611 bp, Picea glauca
agcagggcgaggaaggagcgaaatcttatcagttaaaacgaggttgcgaagtcgaatttggtgattttgtatcgaagatgcctcactctgcagtctggaattctcaccccaagaaatatgggcccggttctcgcgcctgtcgggtgtgtggcaatccacacggcttgataaggaaatacggtcttaattgttgtcgacagtgctttcgcacttattccaaagacattggatttgttaagtatcgctaggagatggattttttcgatggtgaaggcgctgcagggttggcagtagatccttttcattgtagaatcaatggaaataattcattaggggaaattcatgttcaatttgaactactctctggtttttggtctgttgtttattattatgttgctcaagttccattcagtcattctagaattcactgatggaaagattgaagtatttgataatttgtcaacttttgttaaggcttatttaagctgattgataattctacatctaggctatatatgtagatcttctggagacaattttgctaaagtgcattgagcaatagaatcatgttttgtagtacatctaaatttttggttaattggacaacgaaa

SEQ ID NO: 1135 - DNA, 689 bp, Picea glauca
cggggtacttgtactatttagggttttgtagggtctagtagttagttggatacacagaagcgtggtgaaggagcatcggggtgaggaaggagggaaattataccagttaaagcgagatcacgaggctgaatttggtgattttgtatcgaagatgcctcactctgcagtctggaattctcaccccaagaaatatgggcctggttcccgcgcctgtcgagtgtgtgggaacccacatggcttgattaggaaatatggtcttaattgttgccgacagtgctttcgcacttattccaaagacattggatttgttaagtatcgctaggagatggatttttcgatggtgaaggcgctgcagggttggcagtagatccttccattgtagaatcaatggaaataattcgttagggggaaattcattttcaatttgaactactctctggtttttggtctgttgtttattattatgttgctcaagttccattcagtcattctagaattcactgatggaaagattgaagtatttgataatttgtcaacttttgttaaggcttatttaagctgattgataattctacatctaggctatatatgtagatcttctggagacaattttgctaaagtgcattgagcaatagaatcgtgttttgagtacatctaaattttggtaattggacaacgaaattatttag

SEQ ID NO: 1136 - DNA, 606 bp, Picea glauca
gggcttcgcggactgaaggtggataaaacgcgtgccgaagtcatttctatttagtgacattagggtttgagggcagagtagttggatacacagaagcgtggtgaaggagcatcggggtgaggaaggagggaaattataccagttaaagcgagatcacgaggctgaatttggtgattttgtatcgaagatgcctcactctgcagtctggaattctcatcccaagaaatatgggcctggttcccgcgcctgtcgagtgtgtgggaacccacatggcttgattaggaaatatggtcttaattgttgccgacagtgctttcgtacctattccaaagacattggatttgttaagtatcgctaggagatggattttttcgatgtgaaggcgctgcagggttggcagtagatcctttccattggagaatcaatggaaataattcgttaggggaaattcatttcaatttgaactactctctggtttttgctgctgttatatatgttgctgaagttccattcagtcattctagaattcactagaataggaaaaagaattgaagtattgataattgtcaactttgttaaggcttatttaagccgattgataattcc

SEQ ID NO: 1137 - DNA, 540 bp, Picea glauca
agttaaaacgaggttgcgaagtcgaatttggtgattttgtatcgaagatgcctcactctgcagtctggaattctcaccccaagaaatatgggcccggttctcgcgcctgtcgggtgtgtggcaatccacacggcttgataaggaaatacggtcttaattgttgtcgacagtgctttcgcacttattccaaagacattggatttgttaagtatcgctaggagatggatttttcgatggtgaaggcgctgcagggttggcagtagatcctttccattgtagaaacaatggaaataattcgttaggggaaattcatgttcaatttgaactactctctggtttttggtctgttgtttattattatgttgctcaagttccattcagtcattgtagaactcactgatggaaagattgaagtatttgataatttgtcaacttttgttaaggcttattaaagctgattgataattctacatctaggctatatatgtagagcttcaggagacaattttgctaaagtgcattgaggaatagaatcatgtt

SEQ ID NO: 1138 - DNA, 402 bp, Helianthus annuus
atttctgcaaatttgctcgctctacgcctccgttagaagaagaagaagaatgggtcactcaaacatctggaacgcgcatccaaagctgtacggacctggttctcgttcctgtcgtgtgtgtggtaactcgcatgcattgatcagaaagtatgggctcatgtgctgcagacaatgcttccacaacaatgctaaggaaattgggttcattaagtatcgttgaattatatatggtgggatcttcagaggttgcgagtgatcaataaagggtatgattgttagaaaactgttggaaatgttttggtatgagaatccgagaatgtatgttattagttttaaactaatgtttgtgtaaacgacttttttgttgattggaaatggaaccattatttgcttattgatatt

SEQ ID NO: 1139 - DNA, 289 bp, Taxus baccata
aacaaagttgaaagtgtgtcccgggggttgtgttaaagatgggtcacactgcagtttggaattctcatccaaagacatacggattaggctcacgtgcctgtcgtgtgtgtggaaaccctcatgcaatcatcaggaaatatggtcttatgtgttgtcgtcagtgctttcgcagctatgccaaagacattggatttgtaaagtatcgttaagtgtctagtaaaatattcttaagatgtacaagtattgtcatcatcaatgacggtgattcttaatatatttaatactattc

SEQ ID NO: 1140 - DNA, 313 bp, Vinca minor
cttcaccatgggacactccaacatctggaacgctcaccccaaaacctacggccctggctcccgggcctgccgtgtttgtggaaattctcatgggatcatcagaaagtacggaattatgtgctgcaggcagtgcttccgcagcaatgcaaaggagattggattcattaagtacaagtaattcttgcagtacaaggagctctatgtctgctttctggagaaagaatgattttgattacaaatgaactgctgttagattcttgttttttagaacaatttgtaatgttttaatgtattagcgaacctgaaatattat

SEQ ID NO: 1141 - DNA, 440 bp, Raphanus sativus
ggaaacgaaatttagggttttcgagtgttttcacgccgttcatcttcgtcttctagcttctcgcacttgagcactcgaaaaccatgggtttcgctgcgatctggaactctcatcccaagaagtacgggcctggttcccgcacctgccgtgtgtgcggaaactcgcacgggctaatcaggaagtatggacttaactgctgtagacagtgcttccgcagcaacgccaaggaaatcggattcatcaagtaccgttaaagagccggtgttgcttatgcagtcagttgctgtcgtttggattttttttcttaaagcttttgaatgttgtactggatcttataaatgctttatgatttcctcgttgaacaattgagctttccttgttttatcaacaatttttggttctactacaatatgattatcgtttaaatttggagtttctct

SEQ ID NO: 1142 - DNA, 467 bp, Raphanus sativus
gggaaatctagggttttcaagaatctgtgagtgtttataacgccgctcgtcctcgtcttttagctcctcacgccagagcaatcgaaaaatcatgggtttcgctgcgatctggaactctcatcctaagaagtacggccctggctcccgcacctgccgtgtgtgcggaaactcgcatgggctaatcaggaagtatggacttaactgttgcagacagtgcttccgcagcaacgccaaggaaatcggattcatcaagtaccgttaagagatccggtgtctatgcaagggcagctgtttggtttttaagcttttgaaactttcattttatattgtaatggatcttataaatgttctatgatttctataagacaattgagttgttgagcatttttagcttctatattttaatccaaaatcttggctttacaatttgaccatcctatagagattttgagttccaaaaaaaaaaa

SEQ ID NO: 1143 - DNA, 392 bp, Raphanus sativus
ggattcacgtctgagcattcaaaaaataaaaagtcatggggtttgcggcgatttggaactctcatcccaagaagtacgggcctggttcccgcacctgccgtgtgtgcggaaactcacatgggctaatcaggaagtatggtctgaactgctgtaggcagtgcttccgcagcaacgccaaggaaatcggattcatcaagtaccgttaaagatctggtgttgtttatgcagttgcagtcattttgttttcttaagcttttgagacttcaatattgtaatggatcttattaatatgcaatacatttgagttgttgaacgttttagtttacttgttttaatccacaatcttggttctgcaatttgatcatctggtagattggagtttctctttactt

SEQ ID NO: 1144 - DNA, 598 bp, Zamia vazquezii
agccaaggcctgtaacgttttcagaataagaagtgccgagaggtgtggtgttggcggtaatcgttatttgcaattacagagcttgcagggttcgaatttaattgaagatggggcattcgtcgatttggaattttcatccaaagtcttatggcctcggatcccgcagctgtcgggtctgtggaaatcctcatggactggtgaggaagtatggcctgatgtgctgtcggcagtgcttccgtagctatgccaaggacatcggatttgtgaagtatcggtaaacaaatgggggtgcaagatgggcttgcaactactttggagttacctgggtgggtgtcagtttacagaaatgacaatcctatttggaaacttatttccttatggatagacattttattttttggataggctgttttgtgttcacctttcttgcaaaacattggattaaatagtgcagtgtattaaattcaattttgaattttgaaggaaaatttccaaattttaatattgacttatttgtttgagactgtttaaaattgatatgtccaatctataagtacctgcagcatttttatgtgcatgctatgaacagttagttacc

SEQ ID NO: 1145 - DNA, 530 bp, Sarracenia psittacina
ggattctctctcagagaaagggagaagatgggtcactcgaacgtgtggaactcgcatccaaagaactacggtcctggatctcgcacgtgtcgtgtgtgtgggaaccctcatggtttgattcggaagtatgggcttatgtgctgcagacagtgcttccgcagcaatgccaaggaaattggctttattaagtatcgctgaaggatttctcactggccctgcaagagaagagaagagcattttgcccaggcatcatgctgtgtttcttttgtttttgttttcacctattttgagtaatttcatgactgttcttgtcctttttctttggaggccaacctatctatttgtcgtgacatttcttgttaattcaatgttgatcttgatttagataagtgattatctaaacaaattgctttttcctgtggatcctttgccctaaattgattttgttactgtttcggctaaagcttttctgtgagaaaaatctaatttttaaacatttatgcaaaaatatattttcttgtttggttgcg

SEQ ID NO: 1146 - DNA, 403 bp, Avena sativa
ggcggcggcaggcggaaggcgaacgcgtcgacgatggggcactcgaacgtctggaactcgcaccccaagaactacgggcccggctcccgcgtctgccgggtctgtggcaactcgcatggactgatcaggaagtatgggctgatgtgctgcaggcagtgcttccgcagcaacgccaaggacattggcttcatcaagtaccgttaagtcacctggacttgctgccctgaagtgaagctaatcaggggtgaagaaatcgatcattaatagaaggcttaattttaattccagtaatttagttgtatgctctgtacttttccagtaaactttgtgttattatgttttgatgggaactgaatgatgtgattgttcaacatgagttactgcacatcgaaaagccttttta

SEQ ID NO: 1147 - DNA, 539 bp, Cryptomeria japonica
agtaatagtacaaaggacaaagcacgatgaaggggaagatgatgagaaatatgtataatccaagaccggccggagtggaaacaaagaaatgagcaaccggttcggttcaagcctaagatctgtattctggacagcgttgaaactttggtgttttagttaagttgaagatggggcacactgcagtatggaattctcatcccaagacatatggttcatgctcacgggcctgtcgtgtgtgtggaaacccacatgccattatccgcaaatatggtcttatgtgctgtcgtcagtgctttcgcagttatgccaaggacattggctttgttaaatatcgttaagttatcggtggaagatttaagctgcttgagttttctagtaaatttgcatcatcaatggcaaatacataattgaattttcgctgttctggattttttttccagacacttaaactctctcgttttttagatctaatgttagtcttgtattgaaaacaattcaaaattattatctataatgaggatttgctaatttgaaagagg

SEQ ID NO: 1148 - DNA, 437 bp, Raphanus sativus
aacgaaatttagggttttcgagtgttttcacgccgttcatcttcgtcctctagctcctcgcacttgaccactcgaaaaccatgggtttcgctgcgatctggaactctcatcccaagaagtacgggcctggttcccgcacctgccgtgtgtgcggaaactcgcacgggctaatcaggaagtatggacttaactgctgtagacagtgctcccgcagcaacgccaaggaaatcggattcatcaagtaccgttaaagatccggtgtcgcttatgcagttgctgtcatttggatttttgtttttaaaagcttttgaaattttgtactggatcttataaatgctttatgatttcctcgttgaacaattgagctttccttgttttatcaatttttttggttctactacaatatgattatcttttaaatttggagtttctcttta

SEQ ID NO: 1149 - DNA, 797 bp, Abies balsamea
cattctagtgctagatacatcggagcggaaggagtagcagggcgaggaaggagcgatattttaccagaggaaggagcagcagggcgacgaaggaccgatattttaccagttaaagcgagggtacgaaatcaaattcggcgatcttgtatcgaagatgcctcactctgcagtctggaattctcaccccaagaaatatgggcctggttctcgcgcctgtcgggtgtgtggcaacccacatggcttgatcaggaagtatggtattaattgttgtcgacagtgctttcgcacttattccaaagacattggctttgttaagtatcgctaagagatggattctatggtgaaggcgctgcagggttggcagtagatccttccattaatcaatggaaataattcaatacggaaaattcatgttctatttgaactattcttgggttttgcgtctgttgtttttctataatgttgcaaaagttccattcagtcatttcagaactcactgatggaaagattcaagtacttgattatccttgaagttttgtcaaggatgatttacgattatttataattttacatctaggctatagatgcagagctttaggagacaatttttctagagtgcaattgaggattataatcatgtttgtatttcatttaattcttttgtcaattggatagcgccaagcacctagtttttattccaagatccgagacagtatgaaattctgttgatgcttttatgatcggacatcattatgtgaatctccttcctctatttgcaatattaactttactaaaaa

SEQ ID NO: 1150 - DNA, 786 bp, Abies balsamea
actgacattagggtttaaggtagggtgaagttggacatacagaggcgtggggaagaggcagccgagcgaggaagcatcgaaatctaaacagctaaaacgaggtcacgaggtcggatttggtgattttttatcgaagatgcctcactctgcagtctggaattctcatcccaagaaatatgggcccggttcccgcgcctgtcgagtgtgtgggaacccgcacggtttgattaggaaatatggtataaattgttgtcgacagtgctttcgcacttattccaaagacattggatttgtcaagtatcgataagagaatggagtctatagtgaaggagctgcagaatcattccatctctatggtggaactactcttgggcatttgctcggttggtttttttatgatgctgctccattcagtcattccagaacttaatgattgaagatagaaagagttgatgaatcactttttgctatttgctattacacagatctataattatacactctacagtctaagttacatattatgtggagcttaaggagggattaattgaacacgatgatttttcctgtagcgcattgatgaatagaatcatgtttagtagtttctttaaatctttggttaattggatgaaaaaatagttcacttaattctccaagtctgagacactatataatctcgttatggattctacaattgcgaatcattttggtgtgaaaatgaaggtgtaccgcatcacattttatgcttatatggttatgctatcatattgggaacaccccttctct

SEQ ID NO: 1151 - DNA, 251 bp, Brassica juncea
tcacgccgttcatcttcgtctcctagcttctaacgccttgagcattcgaaaaccatgggtttcgctgcgatctggaactctcaccccaagaagtatgggcctggttcccgcacctgccgtgtgtgcggaaactcacaggggctgatcaggaagtatggacttaactgctgtagacagtgcttccgcagcaacgccaaggaaatcggattcatcaagtaccgttaaggatccggtgttgctgatgaagttgc

SEQ ID NO: 1152 - DNA, 351 bp, Brassica nigra
cttcgtcctctagcttctcacgcctgagagcattcgaaagcctgggtttcgctgcgatctggaactctcaccccaagaagtatgggcctggttcccgcacctgccgtgtgtgcggaaactcacatgggctgatcaggaagtatggacttaactgctgtagacagtgcttccgcagcaacgccaaggaaatcggattcatcaagtaccgttaaggatccggtgttgctgatgaagttgctgtcatctggatgtctttaaagcttttgaatgttgtgttggatcttaatcttataaatgctttatgatttcgacttgaacatttgaactttccttgctttattaaaaattttg

SEQ ID NO: 1153 - DNA, 200 bp, Bupleurum chinense
aaagatggggcattcaaacatttggaacgctcatcctaagacatacggtcctggttctcgcgcccgccgtgtttgtggaaatcctcatggattgattagaaagtatgggataatgtgttgcagacaatgcttcaaaaccaatgccaaggagattggctttgttaagtatcgataaatgcatgtcacttacctctatattg

SEQ ID NO: 1154 - DNA, 396 bp, Daucus carota
tccaaacctcgaaatctctctcactatttgcagcggcgagaaagacttacagcgagagagagctgaaaatgggtcattcgaacatatggaacgctcatcccaagacctacggtccaggctctcgagcttgccgtgtttgtgggaatcctcatggaattattagaaagtacgggataatgtgttgcagacaatgcttcaaaacaaatgccaaggagatcggctttgttaagtatcgttaataatggattgtcaatcagatctacgttgaagatgatatgtcaaagtgggattatggtagttgattttatataatgttgcttcatgaaattatagttctgttttttcaacctagctaggaaaaacagattctgtctgcatattattaatgtaatgtat

SEQ ID NO: 1155 - DNA, 599 bp, Daucus carota
tccaaacctcgaaatctctctcactatttgcagcggcgagaaagacttgcagcgagagatagctgagaatgggtcattcaaacatatggaacgctcatcccaagacctacggtccaggctctcgcgcttgccgtgtttgtgggaatcctcatggaattattagaaagtatgggataatgtgttgcagacaatgcttcaaaacaaatgccaaggagatcggctttgttaagtatcgttaataatggattgccaatcagatctacggtgaagatggtaatgtcaaagtgggattatggtagttgattttatataatgttgcttcatgaaattatagttctgtttttggggggggggggggggggggggggggggggggggggggggggggggggggggggggggtttttggagacaaatatttgttgagatgatgtatttctagactctaaatttattgttgaatgactaaaaagctcgaaggttgctctattttgtgtctttttggcttcatctagttctgatttgtaaacatctgttctatgatttggttcttgtctggggaaaccctagtgtaacaagattttttattgatactgaac

SEQ ID NO: 1156 - DNA, 345 bp, Avena sativa
cgcaccccaagaactacgggcccggctcccgcgtctgccgggtctgtggcaactcgcatggactgatcaggaagtatgggctgatgtgctgcaggcagtgcttccgcagcaacgccaaggacattggcttcatcaagtaccgttaagtcacctggacttgctgccctgaagtgaagctaatcaggggtgaagaaatcgatcattaatagaaggcttaattttaattccagtaatttagttgtaagctccgtacttttccagtaaactttgtgttattatgttttgatgggaactgaatgatgtgattgttcaacatgagttactgcacatcgaaaagccttttta

SEQ ID NO: 1157 - DNA, 149 bp, Sesamum indicum
aacatctggaactcgcatcccaaaaactacggccctggctcacgcacttgccgtgtgtgcggaaatcctcatgggttgattcggaagtatgggctgatgtgctgcaggcagtgcttccgcagcaacgccaaggaaattggcttcatcaa

SEQ ID NO: 1158 - DNA, 329 bp, Helianthus annuus
cactcaaacatctggaacgcgcatccaaagctatacggacctggttctcgttcctgccgtgtgtgtggtaactcgcatggattgatcagaaagtatgggctcatgtgctgcagacaatgcttccacaacaatgctaaggaaattgggttcattaagtatcgttgaattatatatggtgggatcttcagaggttgcaagtgatcaataaagggtatgattgttagaaaactgttggaaatgttttggtatgagaatcctagaatgtatgtttttagttttaaattaatgcttgtgtaaacgactattatttgcttattgatattagtatc

SEQ ID NO: 1159 - DNA, 639 bp, Trigonella foenum-graecum
aggagactctgtactaaagataaattaatactataatgatgaaatatcacctccaaaattttagtcagtttatgacggtccttcactttgcaagaaatttgtcatttttgtttcactgctctatttctagcgcttccataagcagtccatatttgtgcaattcccattttccctaatcacggaggaacaaatcgaaggccagccatgggtctctccaatgtgtggaattctcaccccaagacctatggacctagttctcgcacctgttgtgtgtgtgggaactctcattgattgatcaggaagtacgggctcatgtgttgcaggcagtgcttccatagcaatgccaaggaaattggcttcactaagtatcgctgaaaagttcagaatcctttctcagtgttgcagtaatgctgaaggatcagcatccacctgcacccaccgttttagattcttgcattgggatgataataatgctaggatgatttcaatttttgaagaacttataattttgtggcttttagataattatgtcagttatcaaacttgagttgcgagactcaacatatttactttctatttagttgtggagttgccgtcattttctctttatccatcattggaattataaatttgatcttg

SEQ ID NO: 1160 - DNA, 483 bp, Centaurea maculosa
aagaagaagaagaagaatgggtcactcgaacatctggaactcgcatccaaaactatacggacctggttctcgtacctgccgtgtatgtggtaactcgcatggattgatccgaaagtatggcctcatgtgctgcagacaatgctttcacagcaacgccaaggaaattggtttcattaagtatcgttgattctatcggaagttgcaatcctcgatccgaagtatgatgttgggaaagtgttggtaattttgggaaatgtagtctttaattttaaactaatgttgatgtctatgttaagactttttgttgagtgaaatgcacctttctttactctttgctacaatcgtattcttacattgatattagtgttaagtacggtgtttttttaccattggtatgtgttacaaaatcaaacagtctaattaatttaattatcagattttagcactatattttattgatctatggtgaaatgagacttctta

SEQ ID NO: 1161 - DNA, 506 bp, Avena sativa
gaaaggaagctctcggaggaggagaagacgatgggtcacgagaacgtgtggaactcccaccccaagaactacggccccggatcccgcgtctgccgggtctgtggcaactctcatggcctgatcaggaagtacggcctcatgtgctgcaggcagtgcttccgcagcaacgccaaggacattggcttcatcaagtaccgttgaagactgttcggttccgctgctgtgactgagatctttacttgcatcagaggaatggaaccttcattgaaggcttaatttatgcgcttttagcttttttgttcagagtactctatgctagtaaacttgttgaagttttggtgagaaccatgtggttgttgaagtgactatgtgatcaaacttgaagtattgcttgtattcaactacttcatcctattttacttgggatgtgttatggctgtcatatctctatactttatctgttagcctttgtttggcaatcttacatatgaattgttccatgtgta

SEQ ID NO: 1162 - DNA, 2866 bp, Sorghum bicolor
aggaattctattcacgttcctgctcgatcgctacacccagcagcaggctgcggggagcaggcgcacatgggaattgaaggcagatcgctgaccgtgccgcccgccgtcacttgccgagcacgcaccggggtagccgacaccgccgcgcaccaccgctccgttcctctcctctcgagctgcccacctcagtcacatgcgagagccgccggctgcggcagctcagcctcagcgctccccaacccaaggaacgcaccaaaaacgccctcccctcccggacccccaactcgcctcgctcgcgctcggcggcgtctccgcgctcccgcactcacgcacgcttcccttccccacccacgcggacgcggccacgctaagctagcatagcagagccaccctctccctccctccctccctccctccctccgcgccgcagcgttcgtttcgtttcgttactcgttcatcagatccaacggagaggtggggggaggtgccatgcccacgccgtcgccgccgccgctccgcgtggcggcgctgctgctctgctacctctgcctctccctccttcccctcctcgcctcctccgagcccgacgccgacaaggcggcgctgctagcgttcctctccagcgtgggccggggcgccacaccgcgcgcccgcatcaactggcccaccaccccgctcgcctgcttcagctccgcctccggtgcccccggctggacgggggtcacctgcagcgcggacggcgcccgcgtcgtggcgctgcacctcccgggtctcggcctctcgggcgcggtcccgcagggcacgctgggcaacctcaccgcgctgcagctactcagcctgcgctccaacaacctctccggcccgttccccgccgacctcctccgcctccccgcgctcacgggcctccacctccaccgcaacgccttctccggcgcgctcccgcccggactcgcggggctcgcgggcctccaggtgctcgacctctccttcaacggcttcgacggcggcatcccgcccgacctcgccaacctgaccaacctcgtcgcgctcaacctctccaacaactcgctctctggccgcgtaccggacctcggcctccccgcgctcaagttcgtcaacctctccaacaatcacctcgatgggccgttgcccgcgtccctcctccggttcgcggacgcttcctttgctggcaacaacctgacgcgcccgctggctccggcgccgccggttgttctccctcctccgtcttctggcctcgccccgccttccgccgccacgagcgcgaggaggcgggtcaggctcagcgaggcggccatcctcgccattgccgtcggaggctgcgtcgtcgtgttcgccctcgccgcggtcatactcatcgccttctgcaacagggagggccgtgatgacgagacagggagcgacggcggcgtggttgtcgggaagggcggcggggataagaaggggagggagtcgcccgagtccaaggccgtcattggcaaggccggggacggtaaccggatggtcttcttcgagggcccgtcgctggcgttcgacctggaggacctgctccgcgcctccgccgaggtccttggcaagggcgccttcgggacggcgtaccgggccgtgctggaggacgccaccaccgtcgtcgtcaagaggctcaaggaggtgaacgccggccgccgcgactttgagcagcagatggagctggttggccggattcgacatgacaacgtcgtcgagctccgcgcctactactactccaaggacgagaagctgctcgtgtacgattactacagcaggggaagtgtatccaacatgcttcatgggaagaggggagaggacagaatgccattggactgggaaaccagattaaagattgccgtgggagcagcaagaggagttgcacacattcacaccgagaacaacgggagatttgttcatggcaacatcaaggcctccaatgtgttcatcaacaagcacgaatatggctgcatctcagacctcggcctggcattgctgatgaacccgatcacagcaaggtcccgttctcttgggtactgtgcgccagaggtcgccgacacgaggaaagcatcgcagtcttcagatgtctacagcttcggcgtcttcatactggagctcctcacggggaagtcgcctgtccagataaccggcggtggcaatgaggtggtccacctggtgaggtgggtgcagtcggtggtccgtgaggagtggaccgccgaggtgttcgacggtgagctgttgcggtaccccaacatcgaggaggagatggtggagatgctccagatcgcgatggcgtgtgtgtcgaggacccccgagcggcggcccaagatggcggacgtggtgaggacgatcgaggaggtgcggcggagcgacaccgggacgcggccgtccactgaggcctccactccggcagccattgaagcagcccagaactgggcagaaagctcatcggctgcgcaggaacggtgagagttcgtccaccggacgctcgcagccgcagctgctgattcgtagcttcttgtgttttgcttttccacggtaggagcacggatggtcgatcctgtgcttttggcgggtgctgtaccattcattcttttgtgttaagattcggtgttacgaaattgtaacagaatgtcacgtggacacggcggtccgatttggcagcaattgctcactgctgattactatctcttaagcgaaggaagaaaagcagctgtctgatctgctgacactccgttttgttctgttttgcaccgttgcttcttcagctcagtttatgttgctagatccaatgttcgtttcgctgaaatttggtttatgttaatgctgaaaaatactgttc

SEQ ID NO: 1163 - DNA, 2505 bp, Zea mays
cccgactctcctcttgctcgctctcggtggcgtctccgcctccgcagtccgcactcgcgcacgcttcccttcccttcctcgcccacgcggacgcggccacggccgctccaagctagcagcagagcgagagcagccaattttggcgcacctctctcactctccctccctccgttcagcagcgttcgtttcgttgctcactcagatccagccattcaggtgagagagtaggggcagcgatgcccacgccgccgctccgtggggcggggctcctgctccgtatctgcctcttcctctgcctctcactccgcccccgcctggcctcctccgagcccgacgccgacaaggcggcgctgctggcgttcctctccggcgtgggccgcggcgccaccgcccgcgcgcgcatcaactggtccaccacccacctcgcctgcagcgccgacggccccggccccggctggacgggggtcacctgcagcgcggacggcgcgcgcgtcgtggcgctgcacctcccggggctgggcctctcgggcgccgtgccgccgggcacgctcggccgcctcaccgcgctgcagctgctcagcctgcgctccaacgacctctccggcccgctccccgccgacctcctgcgcctgcccgcgctcgagggcctccacctccaccgcaacgccttctccggcgcgctccccgccgccctcgcggggctgaccgcgctccaggtgctcgacctctctttcaacgccttcgacggcgccgtccccggcgcgctcgccaacctcacccgcctcgtcgcgctcgacctctccaacaactcgctttccggccgcgtcccggacctcggcctccccgcgctccgtttcctcaacctctccaacaaccgcctcgacgggaccgtgccggcgtccctcctccgcttccccgacgccgccttcgccggcaacagcctcacgcgcccggctccggctcaggcgccgccggttgttgtcgctccgcctcctggcctcgctgcgcctccccccgcgaggcggcggcccaggctcagcgaggcggccatcctcgccattgccgtgggagggtgcgtcctcgggttcgccgtcgcggcgctgctgctcctcgcattctgcaacagcagcagggagggccgcgatgaagagacagtaggcggcggcgcggctgcagggaagggcggggagaagaaggggagggaatcgcccgagtccaaggcggtcatcggcaaggccggggacggcaaccggatggtcttctttgaggccccgtcgctggcgttcgacctggaggacctgctccgcgcctccgccgaggtcctgggcaagggcgcgttcgggacggcgtaccgggccgtgctggaggacgccaccacggtcgtcgtcaagaggctcaaggaggtgaacgccgggcggcgcgacttcgagcagcagatggagctgctcgggcggatccgccacgacaacgtcgtcgagctccgcgcctactactactccaaggacgagaagctgctcgtgtacgattactacagccggggaagcgtgtccaacatgctccatgggaagaggggagaggacagaacaccattggactgggaaaccaggctaaagattgccctgggagcagcacgaggagtggcacacatccacaccgagaacaacgggagattcgttcacggcaacatcaaggcctccaacgtgttcatcaacaagcacgagcacggctgcgtctcggaccacggcctggcgtcgctgatgaacccggtcacggcgaggtcccgttctctcgggtactgcgcgccggaggtcgctgacacgaggaaggcgtcccagtcctcggacgtctacagcttcggcgtcttcgtgctggagctcctcacggggaagtcgcccgtccagataaccggcggcaacggcggcgacgtggtccacctggtgagatgggtgcagtcggtggtgcgggaggagtggaccgccgaggtgttcgacggcgagctgctgcggtaccccaacatcgaggaggagatggtagagatgctccaggtcgcgatggcgtgcgtgtcgaggtcccccgagcggcgtcccaggatggcggacgtggtgaggaccatcgaggaggtgcgtcggagcggcagcgggaccgcgaccgggacggggacgcggccgtccaccgaggcctccaccccggccaccgccgctgaagcggcccagagcagggcggaggagggcggctcgtcggcggtggcgcagtgaccggacgcgacgcaggccgagctgcttgctggtggcgtagcttggatgatcctgtgctttattttggcgggtgctgtaccattcgttctttcgtgttacgaaatcgtaacagaatgtcacgtggacgtggacacggtggtcagatttttggcagcaactgctcgctgctgactattgattgactctttgtacaagtgtgaaggaagaaaggcagctgtctcatctgttgatcaaggatatgcttgagtac

SEQ ID NO: 1164 - DNA, 3510 bp, Sorghum bicolor
caaatcctcccgctcaaacgatttcgaaatttgaaacacctcttcccctaaatctaaaatcaatcaaccgttcccaaatccaaatcaaagcgacctttcctcttgtcccatctcccccccccggatcccccccaaaccctagccctgcatcgcctcccgctatgtcctcccgcctcaaggatcgcggcggtggcggcagcagggccacggccgcggcaacccgcccgctcaccccgaagcccttctccatctcgtcatccgccaggcggacgaccgccgccgccgccgccgccgggaaggagaacaccgcgtccaagccggccaagccgacctccgccgtgcgttggtccacatcgtcgctcccgcgggccagcaggatccaaagctcggtggactcctccaagctcgtctccaccctaagggctcccgtgctgcccgggagaccttccatcggtaaggattccgtggttgaggcaggtttgcggcggagcatcagtggtgggatcagggcttcttctgtagagaaagggaggaggtcgattagtgttgttggatccagggcctccgaggctaggagagggagtgctggcgctggtggtgatggcactggcagaagggagaggtttgatgcgaaggccaaggggtcggatgagatcagcacgagaagagatgaccttgatgccaaggggaagcaggctgatgagattggcaggaaaagggagagctttgatgcaaaggccaagcagatcggtgggaaaagagagagctttggtgtgaatgtgtcaaagcaatgtgatgagatcaaagggaaagcagattcattcgtgagtaatacgaagaagcagtgcgaggatgttggtgggcgaagagagggctctgattcgaaggcaaagccaggtgaagaaatcaatatgaagaaagaggggcccaataaattagtgaaggagatgcatttcaaaaaagctgatccaggtgaagcttcttccaaatccgtggaatgttgtgacactcagaagtatgatgagataggtaacacttctgtcatccctgttttcactgtccacgtggtggattcaaataatgtccctgatccaataaggaaacagcaaaagaataatgaagagggtaggaagcaggaagaaaagggaaaattggcagacaggataagagtttttgagaaagtggctgcaggtggggagggagggtcagcaaaacccacgtctgctatgaacaggtacccaagcaaacttcatgagaaactagctgcgctggaagggagggttcagaagattgctaccgatatcaagaaaaccaaagaaatgctcgatgagaacaacccagacgaaccgaagcagattttgtcaaatatccagaaggaaatcactgccattgagaaggcaatttctcatgtcaaggatgataataagatacagctgggtactgcagatagcagtgaatgtgagatctctcaccccgaaatatctgagaaatgtaacattgcaaagccaggtgacacgaagcaagccggaaaaggcttgaatgctgatgagctggaggcaaggttctttccacaccacaaattgttgaggggtcgcatatcttcgacttctactcaacaggagtcatctgtggatatgaagaaagattgtaatggaaaaacaagacctgctgcatctaaccctgacgatgatgagaacagtatagccatggagtttctggcttctttagatggtgaagaaaatgatttcttcaaggaccggcgagctaagaaactggaaaagaataagatatgtgaagtagcagatgctaccagcaagacatcaagtcaaggtagctcaaagaatccagttggtcttaatcataaggaggaaattgaattgcttgctacagaggagctagaagaatttgatgatcaggaaaacaagtcctccatgatgttacaggaagaaactgaggagtcatgcaatagtcagctatcaggtataggaaacaagtcttcaactggtggatggtttgtttctgagggggaagctgttcttcttgctcatggagatggcacatgctcctattatgacattgcaaaccatgagttcaaatcagagtacaagcctcccagcatggtatcaaataatatgtggggcgattgctggttgattcgtgccccaggtgtagacggatgttctggcagatatgttgttgctgcatcagctggaaatgcattggagcccgggttttgcagctgggattactataccagagaagtaaaatcatttcatgttgaggaggaagcttctcaagcttttgctccaacatccagggctattcttggtgctctctctaatgtcggttcatcaagatccagctccgcactgtcaaattcagaaaggcagcaatggtggtataaaccatgtggacctctcctgctttctactgctagcaagcaaaagatggtcacagcttatgatatacgtgatggcgatgttgtgatgaaatgggaagttagcaatccagtaatgggaatggaatactccagcccactacaatggcgtagcaggggaaaagtagtaattgctgggagtgaatcaatagggttgtgggatgtgaattcacttaacccacaacccttgttgtctgttgcttctggtaagaaagtgtactgccttcatgtgaataacactgatgctgaggtgggcggcggagtgcgtcaaagggttagttcatctgaggtggaagggaacgatggtgttttcagcacacaggaaagtgttaatgtattcgattttcgtgtacctgctggcattgggcttaaaatagcaagacatggtggcatagcaaactcaatcttctcacgtggagactcagtatttatcggtagcacagaaggaaggctgcaaataaaaggtgggttgagatcacgagttcagcaatactcgttgagaaagggaaaacttgtcgccacctatgagttaccagaattcaatgctcatatccatcactctgcaataacccaagtatggggcgactcaaaccttgtcttggctgcatgtggtatggggctgtttgcctttgacacatttaaggaagacatgcagccaacctacagctttgaccgtggaaacaccattggagtgagagaagctattggccctgatgatttgtactgtcctacatttgattactcatcatcaagggttcttctcgtctcaagagatcgaccagcacattggaggtacttgtagactgtagctagctatttaatgcttatttgtgtgcaatttgtgtcatgtaatatatgtactttgtttatgcttcacatgtggtgtggtgtcatctgccgtgtcaagcatcttgctttcactgtactggcagatattatctagtttttacccctgcaattataaattatctttactcttctgtacccttttttttttattattttgtgccttgcatgtttttatggtctttctcggctctcggttgaaacactatttatggagacatggttca

SEQ ID NO: 1165 - DNA, 3540 bp, Setaria italica
tttcctcttgtccagtctcccccgaatccccacccccgcacccccaaaccctagccctgcatcgccacccccgccatgtcctcccgcctcaaggaccgcggcggcggcggcgctaaggccgcggcctcgcgcccgctcacccccaagcccttctccatctcttcgtctgcccggcgcacgaccgccgccgcggccggcaaggagaactccgcgtccaagccggccaagcccacctccgccgtgcggtggtccacgtcgtcgctcccgcgggccagcaggatccagagctcggtggagtcctccaagctcgtctccacactcagggctcccgtgctgccggggagggcttccatcgggaaggaccccgtgccggacgcgggcttgcggcgaagcgtgagcggtgggatcaggtcttcttccgtagagaaagggaggaggtcggtaagtgctgttggatccagggcctcggaggctaggagagggagtggtggtgttggaagtgatgagattagcaggagacgggagggggttgatgcgaagtccaaggggttggatgggatcagtaggagaagggacgaccttgatgccaaggcaaaacaaactggtgagattgataggaaaagggatagctttgatgcaaaggccaagcaggtcagcgggaaaagagatggctttggtgcgcatgtggtgaagcaacgtgatgagataaaaggaaaaacagagatctgtggtgctaatatgaagaggcagagtgaagagattggtggaagaagagagggctctgattcaaaggcaaaggcaggtgaagaaatcagtgggaggaaagaggggctcaatatcaaattggtaaaggagatccctggagaaaatgctgattcaggagaagcttcttccaatgctgcagatttttctgctacccagaaggatgatgaagaaggaaatggttctgtcatcccagtgttcactgtccatgtggtggacccaattgatgttcctggtgcagcgagggaacagcaaaagaataatgaggagtgtaagaagcaggaagaaaagagcaaattggcagacaagattagagtttttgagaaagctgctgcaggtggggagggaaggtcagctaaacctgtgtctgctgttaacaagtacccaagcaaacttcatgagaaactagcagcgctagaaggaagggttcagaagattgctactgatatcaagaaaaccaaagaaatgcttgatgagaacaacccggacgagccaaagcagatcctgtcaaatattcagaaggaaatcaatgccattgagaaggcgatttctcatgtcaaggatgataataagatacagctaggtactgcagatagcagtgaatgtgagagttcccatgctgaaagcgctgcaaaatgtactgttgcgaagccaggtggcctgaagcatgctggaaaagggctgaatactgatgaactggaggcaaggttttttccacatcacaaattgttgagggatcgtaaatcttcaacatctactcaccatgattcatctgcggatacaaagagggttattcctggaacaacaggacctgctgcccctgaccctgatgatgatgagaactgtatagccatggagtttcttgcttctttagatggtgaagaaaatgactttttcaaggaccgccgtgctaagaaattggaaaagaacaagatatatgaagtagcagatgcaaccagcaagacatcgagccaaggtagctcaaagaatccagttggtcccaatcacaaggaggagattgaattgcttgctaaagagaaactagaagagtttgatgagcaagaaaacaagccctccatgatggttcaggaggaaacagaggagtcttgcagtgatcagttatcaggtataggaaacaagtcttctacgggtggatggtttgtttcggagggggaagctgttcttctagctcatggtgatggcacatgctcctattatgatattgcaaaccatgagttcaaatctgagtacaagcctcccagcatggtatcgaataatacgtggggcgattgctggttgattcgcgccccaggtgtagatggatgttctggtagatatgtggttgctgcatctgctggcaatgcattggagcctgggttttgcagctgggattactataccagagaagtaaaagcatttcatattgaggaggaggcttctcatgatcctgctccaccaccccgggctgttcttggacctctctctaatttaggttcatcaagatctagctctgcgttgtcaaatggagaaacacaacaatggtggtataaaccttgtggacctctcctgctttctactgctagcaagcaaaggatggtcacagcttacgatatccgtgatggtgatgtagtgatgaaatgggaagttagcagtccagtaatgggaatggaatactcgagcccgctacaatggcgtagcaggggaaaagtagtaattgcagggatcgagtcaatagggttgtgggatgtgaattcgcttaacccacaacccttgctgtctgttgcttcttctggtaagaaagtgtactgccttcatgtgaataacactgatgctgaggtgggcgggggagtgcgtcaaagggttagttcatctgaggtggaaggaaatgatggtgttttcagtacgcatgaaagtgttaatgtattcgattttcgtgtacctgctggcattggtcttaaaatagcaagacatggcggtacggcaaactcaatcttctcacgtggagattcagtatttattggtagcacagaaggacggctgcaaataaaaggtggtttgaggtcacgagttcagcaatactctttgagaaaggggaagcttgttgcaacctatgagttaccagaattcaatgctcatttccatcattctgcgataactcaagtatggggcaactcgaaccttgtcttggctgcttgcggtatggggctgtttgcctttgacacatttaaggaagacatacagccaacttatagctttgaccgtggaaacaccattggagtgagagaagctattggccctgatgatttgtactgtcctacatttgattactcatcatcaagggttcttcttgtctcaagagaccgaccagcgcagtggaggtacttgtcgtagctatctatttatcgtttatttgtgtgcaatgtgtgtcatgtaatatatgtactttatttaaggttcacttctggtgtcatctgctgtgtcaagcatcttgctttcacagtttcactgtactagcaatattatcttgttttcactcctgtgcgttctcagtctgccgtgccttcgttttatcttgtcttgcatgtttttatgtttgtcctgatcactcagttgtaactcgcacgtatggaacattgttaaaattatgtttgatgccctggagcttacaattccatgcaatatttttctggcatgaattcgataaatacataacttagttatcaacaaagatcttgttagctgattaacacacaacactcttcaatcgaccaataagga

SEQ ID NO: 1166 - DNA, 3832 bp, Panicum virgatum
cggaaatttatgccattttaagcgcccaaatatttttttgtatactacatcttataacatcaacaatttgtgcaaaatgaaggccaaatgaaactgatcaatcagcgggtcaaattctcttgtgtctactgactactaaaataaagttgtctctatgtatcttccacgtgggcctaccacgcgaactgcagggcgctggcaccacgggcccacaaaaaagctcccgcccgaacgaattcgaaatttgaaacgccccttccccaaatctcaaatcagtcgaccattcccaaatccaaatcagagcgacctttccccttgtctcgtctcatcgaatcccccaaaccctagccctgcatcgccaccccgccatgtcatcccgcctcaaggaccgcggcggcggcggcggcaaggcctcggccacggccacggcctcgcgcccgctcaccccgaagccgttctccatctcttcgtccgcccggcgcacgaccgcggccgccgctggcaaggagaactcagcgtccaagccggtcaagcccacctccgccgtgcggtggtctacgtcgtctctcccgcgggccagtaggatccagagctcggtggagtcctccaagctcgtctccaccctcagggcttccgtgctgccggggcgggcttccatcgggaaggaccccgtggcggacgcgggcttacggcggagcgtgagtggtgggatcaggtcttcttctgtagagaaagggaggaggtcggtaagtgttgttggatctagggcttccgaggctaggagagggagtggtggtgttggcagtgatgacattggcaaaagacgggaggggtttgatgctaagggcaagggcttggatgggatcggcaggaaaagggatgaccttgatgccaaagtgaagcaaactggtgagattgacaggaaaagggagagctttgatgcaaaggccaagcagatcggtgggaaaagggacagcttttgtgtgaatgtgtcgaagcaatgtgatgagatcaaggcgaaaacagagatcactggtgttaatatgaagaagcaaagtgaagagatagttgggagaagagaggactttgatacgaaggcaaaggcaggtgaagaaatcactaggaagaaagaggggctcaatatgaaattggtgaaggagatgcatgccaaaaaatctaattcgggtgaagcttcatccaatgctgcagatttttgtcctgcccagaaggatgatgaggaaggcaatggttctgtcatcccagtgttcactgtccgtgtggtggactcaattgatgttcctggcacaatgagggagcagcaaaagaataatgaggagtgtatgaagcaggaagaaaagggcaaattggcagacaagattagagtttttgagagagcagctgcaggtggggaggaaaggtcagttaaacctgtgtttggtgttaacaagtacccaagcaagcttcatgagaaactagcagcgctggaagggagggttcagaagattgctaccgatatcaagaaaaccaaagaaatgcttgatgagaacaacccagacgagccaaagcagatcctgtcaaatattcagaaggaaatcactgccattgagaaggcgatttctcatgtcaaggatgataataagatacagctaggtactgcaggtagcagtgaatgtgagagttcccatgctgaaagcgctgccaaatgtactgttgtgaagccaagtgacctgaagcatgctggaaaagggttgaatactgatgaactggaggcaaggttctttccgcatcacaaattgttgagggatcgtaaatcttcaacttctgcgcaccaggagtcatctgcggatgcaaagaaggtttgccctggaaaaacaggaccttctgcccctgccactgatgttgatgagaatagtataaccatggagtttcttgcttctttagacggtgaagaaaatgacttcttcaaggaccgccgcgctaagaaaatggaaaagaacatgatatgtgaagtagcagatgctaccagcaagacatcgagccaaggtagctcaaagaatccagttggtcccaatcataaggaggaaattgaattgcttgcttcagagaagctagaagagtttgatgagcaagaaaacaagccctccatgatggttcaggaggaaacagaggagtcttccaatgaccagctatcaggtataggaaacaagtcttcaactggcggatggtttgtttcggagggggaagctgttcttcttgctcatggtgatggcacatgctcctattatgatattgcaaaccatgagttcaaatctgagtacaagcctcccagcatggtatcaaataatatgtggggcgattgctggttgattcgcgccccaggtgtagatggatgttctggtagatatgttgttgctgcatcagctggcaatgcactggagcctgggttttgcagctgggattactataccagagaagtaaaagcatttcatattgatgaggaggcttctcatgcgctggctccaccacccagggctgttcttgggcctctctctaatttaggttcatcgagatctagctctgcattgtcaaatggagaaacacagcaatggtggtacaaaccttgtggacctctcctgctttctactgctagcaagcagaagatagtcacagcttacgatatccgtgatggtgatgtagtgatgaaatgggaagttagcaatccagtgatgggaatggaatactccagcccactgcaatggcgtagcagggggaaggtagtaattgctgggagcgagtcaatagggttgtgggatgtgaattcgcttaatccacaacccttgttgtctgttgcttcttccaataagaaagtgtactgccttcatgtgaataacacagatgctgaggttggcggcggagtgcgtcaaagggttagttcgtctgaggtggaaggaaatgatggtgtttttagtacacaggaaagtgttaatgtatttgattttcgggtacctgctggcattggtcttaaaatagcaagacatggcggtacagcaaactcaatcttctcacgtggagattcagtatttattggtagcacagaaggacgactgcaaataaaaggggggttgagatcacgagttcagcaatactcgttgagaaaggggaagcttgttgcaacgtatgagttaccagaattcaatgctcatttccatcactctgcgataactcaagtatggggaaactcgaaccttgtcttggctgcatgtggtatggggctgtttgcctttgacacatataaggaagacatgcagccaacttacagctttgaccgaggaaacacaattggagtgagagaaactattggccctgatgatttgtactgtcctacatttgattactcatcatcaagggttcttcttgtctcaagagaccgtccagcacactggaggtacatgtcgtagctatctatttatcatttatttgtgttcagtgtgggtcttgtaatatatgtactttatttatggttcacttctggtgtcacctgcctgctgtgtcaagcatcttgctttcacagtttcactgtactagcaatattatctagtttttacccctgtgattgttttcactctgctgtgccttcattttatcatttgccttgcatgtttttatgtgcttcctgggcactcagttgtaacttgcatttacagaatcattgttcaaattatgcttgacgcccaggagtttacaattcgatacatacatagcttaatgattgacaaagttaagatcttgttagtcgattaacacaggacactattcaatcgaccaataagga

SEQ ID NO: 1167 - DNA, 3498 bp, Panicum virgatum
gtcgctttattggtgccatggcgaatagattcgactagacgacattataacattgcttcgggcctacctcgcgaactccagggtgcagggcaccacgggcccacaaaaaagctcccgcccgaacgaattcgaaatttgaaacgccccttccccaaatctcaaatcagtcgaccattcccaaatccaaatcagagcgacctttccccttgtctcgtctccccgaatccccccaaaccctagccctgcatcgccacccggccatgtcctcccgcctcaaggaccgcggcggcggcggcaaggcctcggccacggccgcggcctcgcgcccgctcacccccaaaccgttctccatctcttcttccgcccggcgcacgaccgcggccgccgctggcaaggagaactcagcgtccaagccgatcaagcccacctccgccgtgcggtggtccacgtcgtctctcccgcgggccagtaggatccagagctcggtggagtcctccaagctcgtctccaccctcagggcttccgtgctgccggggcgggcttccatcgggaaggaccccgtggcggacgcgggcttacggcggagcgtgagtggtgggatcaggtcttcttctgtagagaaagggaggagatcggtaagtgttgttggatctagggcctcggaggctaggagagggagtggtggtgttggcagtgatgacattaggaggagaccggaggggtttgatgctaaggccaagcgcttggatgggatcggcaggaaaagagatgaccttgatgccaaagcgaagcaaactggtaagattgacaggaaaagggagagctttgatgcaaagaccaagcagatcggtgggaaaagggatagctttggtgtgaatatgtcgaagcaatgtgatgagatcaaagggaaaaccgagatcactggtgctaatatgcagaagcaaagtgaagagatagttgggagaagagaggactttgatatgaaagcaaaggcaggtgaagaaatcagtaggaagaaagaggggctcaatatgaaattggtgaaggagatgcatgccaaaaaagctgattcgggagaagcttcttccaatgctgcagaactttgtcctgcccagaaggatgatgaggaaggcaatggttcggtcatcccagtgttcactgtccgtgtagtggactcaattgacgttcgtggcacaacgagggagcagcaaaagaatagtgaggggtgtaagaagcaggaagaaaagggcaagttagcagacacgattagagtttttgagagagcagctgcaggtggggaaggaaggtcagttaaacctgtgtctggtgttaacaagtacccaagcaagcttcatgagaaactagcagcgctggaagggagggttcagaagattgctactgatattaagaaaaccaaagaaatgcttgatgagaacaacccagatgagccaaagcagatcctgtcaaatattcagaaggaaatcatttccattgagaaggcgatttctcatgtcaaggatgataataagatacagctaggtactgcagatagcagtgaatgtgagagttctcatgctgaaagcgctgccaaatgtactgttgtgaagccaagtggcctgaagcatgctggaaaagggttgaatactgatgaactggaggcaaggttctttccacatcacaaattgttgagggatcgtaaatcttcaacttctactcaccaggagtcatctgcggatacaaaggtttgccctggaaaaacaggacttgctgcccctgcccctgatgttgatgagaatagtataaccatggagtttcttgcttctttagatggtgaagaaaatgacttcttcaaggaccgccgtgctaagaaaatggaaaagatcatgatatgtgaagtagcagatgctaccagcaagacatcgagccaaggtagctcaaagaatccagttggtcccaatcataaggaggaaattgaattacttgcttcagagaagctagaagagtttgatgagcaagaaaacaagccctccatgatggttcaggaggaaacagaggagtcttccaatgaccagctatcaggtataggaaacaagtcttcaactggcggatggtttgtttcacagggggaagctgttcttcttgctcatggtgatggcacgtgctcctattatgatattgcaaaccatgagttcaaatctgagtacaagcctcccagcatggtatcaaataatatgtggggcgattgctggttgattcgtgccccaggtgtagatggatgttctggtagatatgttgttgctgcatcagctggcagtgcactggagcctgggttttgcagctgggattactataccagagaggtaaaagcatttcatatcgatgaggaggcttctcatgcgttggctccaccacccagggctgttcttgggcctctctctaatttaggttcatcgagatcgagctctgcgttgtcaaatggagaaacacagcaatggtggtataaaccttgtggacctctcctgctttctactgctagcaagcagaagatggtcacagcctatgatatccgtgatggtgatgtagtgatgaaatgggaagttagcaatccagtgatgggaatggaatactccagcccactgcaatggcgtagcaggggaaaggtagtaattgctgggagcgagtcaatagggttgtgggatgtgaattcgcttaatccacaacccttgttgtctgttgcttcttctaataagaaagtgtactgccttcatgtgaataacacagatgctgaggtgggcagcggagtgcgtcaaagggttagttcgtctgaggtggaaggaaatgatggtgtttttagtacacaggaaagtgttaatgtatttgattttcgggtacctgctggcattggtcttaaaatagcaagacatggtggtacagcaaactcaatcttctcacgtggagattcagtatttattggtagctcagaaggacgactgcaaataaaaggggggttgagatcacgaattcagcaatactcgttgagaaaggggaagcttgttgctacgtatgagttaccagaattcaatgctcatttccatcactcagcgataactcaagtatggggcaactcgaaccttgtcttggctgcatgtggtatggggctgtttgccttcgacgcatataaggaagacatgcagccaacttacagctttgaccgtggaaacacaattggagtgagagaaactattggccctgatgatttgtactgtcctacatttgattactcatcatcaagggttcttcttgtctcaagagaccgtcctgcatactggaggtacatgtcataggctcgtagctatctatttatcatttatttgtgttcagtgtgggtcttgtaatatatgtactttatttatggttcacttctggtgtcacttactgtgtcaagcatcttgctttcacagtttcactgtactagcaatattatctagtttttacccc

SEQ ID NO: 1168 - DNA, 3412 bp, Zea mays
gtggttgtatagttctctcaggatgtaaacaagcccttacgcccaccagcaacttatctatccacgtatttggtttcaaactccattatataaacattgcaatttagtattgcaaatacgattttgtcccatattttcttctgcctttgattctgacaaaaataaggtgatatagctgccactcccatgcgggcctacccgagaactgcaggtggaccaagcaccacgggtccacctcaaagcctcccgccctaacgatttcgaaatttgaaacaccctttcctccaaatcattcaaccattcacaagtccaaatcaaagcgtcctttcctcttgtaccatctccaccggatccccaaaccctagctctgcatcgactcccgctatgtcctcccgcctcaaggataccggcggcggtggcggcagggccacggccgcggcaacccgcccgctcaccccgaagcccttctctgtctcgtcatcagcccggcggacgaccgccgtcgccgccgccgggaaggagaacaccgcgtccaagccgtccaagcccacctccgccgtgcggtggtccacatcgtcgcttccgcgggccagcaggatccaaagctcggtggagtcctcgaagctcgtctccaccctcagggctcccgtgctgcccgggaggccttccgtcggtaaggataacgtggtggaggcaggcttgcggcggagcgtcaatggtgggatcagggcttcttctgtagagaaagggaggaggtcggttagtgttgttggatccagggcctccgaggctaggagagggagtgctggcgctggtggtgatggcactagcagaagggagaggcttgatgcgaaggccaaggggttggatgagatcagcaggagaagagatgatcttgatgccaaggggaagcagactgatgagattggcaggaaaagggagagctttgatgcaaagcccaagcagatcggtgggaaaagacagggctttggtgtgaatgtgtccaagcaatgtgatgagatcaaggggaaaactgacgcattcgtgagtaatatgaagaagcaaagcgaagatgttggtgggcgaagagtgggctctgattcgaaggcaaaggcaggtgaagaaatcaatatgaggaaagaggggctcaataaattggtgaaggagatgcatacccaaaaggctgatccaggagaagtttcttccaaatccgtggaatgttgtgccacccagaaggatgatgagataggcaacacttctgtcatccctgttttcactgttcatgtggtggattcaatggatgcccctgatccaataaggaaacagcaaaagaataatgaagagggtaggaagccggaagaaaagggaaaattggcagacaggataagagtttttgagaaagtggctgcaggtggggagggagcgtcagcaaaacctgtgtctgctgtgaacaggtacccaagcaaacttcatgagaaactagctgtgttggaagggagggttcagaagattgctaccgatatcaagaaaaccaaagaaatgcttgatgagaacaacccggacgagccaaagcagatcttgtcaaatatccagaaggaaatcactgccattgagaaggcaatttctcatgtcaaggatgataataagatacagctgggtactgcagagaacagtgaatgtgagaactctcaccctgaaacagctgaaaaatgtaccattgcaaagccaggtgacctgaagcaagctggaaaaggcttgaatgctgatgagctggaggcaaggttccttccacaccacaaattattgaggggccacatatcttcaacttctactcaacaggagtcatctgttggtatgaggaaagattgtaatggaaaaacaagatctgcagcatctaaccctgacgatgatgaaaacagtatagccatggagtttctggcttctttagatggtgaagaaaatgatttcttcaaggagcgaaaagctaagaaattggaaaagaataagacatgtgaagtagcagatgctaccagcaagacatcaagtcaaggtagctcaaagaatccagttgttcccaatcataaggaggaaactgaattgcttgctacggaggagctagaagaatttgatgatcgggaaaacaagtcctccatgatgttacaggaagaaactgatgagtcatgcaatagtcaattatcaggtataggaaacaagtcttcaaccggtggatggtttgtttcagagggagaagctgttcttcttgctcatggagatggcacatgctcctattatgacattgcaaaccacgagttcaaatctgagtacaagcctcccagcatggtatcaaataacatgtggggcgattgctggttgattcgtgccccaggcgttgatggatgttctggtagatatgttgttgccgcgtcagctggcaatgcattggatcctgggttttgcagctgggattactataccagagaagtaaaatcatttcatgtcgaggaggaagcttctcaagcctctgctccaacatcaagggctattcttggtgctctctctaatgtaggttcatcaagatctagctctgcactgtcaaatgcagaaagacagcaatggtggtatagaccgtgcggacctctcctgctttccactgctagcaagcaaaagatggtcacagcttatgatatacgtgacggcgatgttgtaatgaaatgggaagttagcaatccagtaatgggaatggagtactccagcccgttacagtggcgtagcaagggaaaggtagtaatcgctgggagtgagtcaatagggttgtgggatgtgaattcacttaacccacaacccttgttgtctgttgcttctggtaagaaattgtactgccttcatgtcaataacactgatgctgaggtcggcggcggagtgcgtcaaagggttagttcatccgaggtggaaggaaacgatggtgttttcagcacacaggaaagcgtaaatgtatttgatttccgtgtacccgctggcatcgggcttaaaatagcgagacatggcggcacagcgaactcaatcttctcacgcggagactcggtatttatcggtagcacagaaggaaggctgcaaataaaaggagggtcgaggtcacgagtccagcattactcgctgagaaaggggaaacttgtcgccacctatgagctaccagaattctgcaacgtgtgtcatgtaatatatgtacttcgtttatgcttcacatgtgatgccatctgccgtgtcaagcatcttgctttcactgtagtacttgctagcagatgttatctagttcttacccctggaatgataaattagttaacgaccatatgtttccttccatgcaatttttttcagtcaccaattcccagatacattttcacaacttaaacga

SEQ ID NO: 1169 - DNA, 1537 bp, Saccharum officinarum
ccatcctgctccggacagagccctcgttccacaccgccgggcgccggcgacctttttcctccgctcgaggagtgggccaggccaacggagggagaccatatgggcgcggaggcagggcatccgcagcagcaacctccctcttccctccgacccggcagggaggcggcggcggcggcgccgcccgcggtgctggggctgcagctctcggcgctgatcgaccacgtcgcgcgcgtcgactggtcccttctcgaccgcgtccctggcgaccgcggcggctcgcagcaggtgtccattgaggagctgaatcatattcttgatgaagtgaatgcccacatccttccttcccgcaatgatctcactccagtaactacaatagccggtggaagtgttgccaacacaatccgtgggctctcagctggttttgggatatcaactggaataattggagcttgtggagatgacaaccagggccttttgtttgtcaacaatatgagctttagtggtgtagatctcacaagattaagggccaaaaaagggcacaccgctcagtgtgtgtgcttggtcgatgcaagcggcaatcgtaccatgcggccatgcctatctaccgcagtcaagatacaggccaatgaatttagaaaggaggatttcaaaggctccaagtggcttattgtgagatatgcgcaacagaacatggaacaaattattgaagctattaggattgcgaaacaggaaggcctttcagtatcattagatttggccagttttgagatggttcgtgactctaggtctaaactcattaaccttttggagactggtaacattgacctttgctttgccaatgaggatgaagctagagaggttatagggggaggtctggaatcagatccagaggaggcacttgcgttcttgggcaagtattgcaaatgggctgtggtgacacttgcttcaaagggatgcatggcaaagcatggcaaacaggtggttcaagtgccggccatcggggagagcaacgcggtggacacaactggagcaggcgacctgttcgcgagcgggttcctgtacgggctggtgaaggggctgccgctggaggagtgctgcaaggttggggcgtgcagcggcgggtcggtgacgcgggcgctcggcggggaggtgcggccggagaactggcagtggatgtacaagcagatgcacgccaggggcctgctgctccccgagctcaagaactgagctaatgctgctgtagctgtagctagctgcatgctgcaccagctgttgtatctctcagcactcctaaagactcgtatcaccacccaggagcaagaggccattatccggcctcccgttggtgattgtttgccgttacctttcccctgctaatctggtggtggtactaaaaaaataatggcgtccatgcttgattgctggcatggggaaagaccgacaggcaggcaggcacattacttgatttggtgaagaaacaagccgaccacttcctagaagggatcaatccgatggggccctttgtatactgcactcc

SEQ ID NO: 1170 - DNA, 1589 bp, Sorghum bicolor
catctgctccggacagagcctcgttccacaccgccggcgacctttttcctcctccgctcgaggagtgggccgggccaacggagggagaccatatgggcgcggaggcagggcatacgcagcagcagcctccctcctccctccgacccggcagggaggcggcggcggcggcggcgccacccgcggtgctggggctgcagctctcggcgctgatcgaccacgtcgcgcgcgtcgactggtccctcctcgaccgcgtctctggcgaccgcggcggctcgcagcaggtgtccattgaggagctgaatcatattcttgatgaagtgaatgcccacatccttccttcccgcaatgatctcactccaataactacaatagccggtggaagtgttgccaacacaatccgtgggctatcagctggttttgggatatcaactggaataattggagcttgtggagatgacaaccagggccgtttgtttgtcaacaatatgagctttagtggtgtagatctcacaagattaagggccaaaaaagggcacaccgctcagtgtgtgtgcttggtcgatgcaagcggcaatcgcaccatgcggccatgcctatctagcgcagtcaagatacaggccaatgaatttagaaaggaggatttcaaaggctccaagtggcttattgtgagatatgcgcaacagaacatggaacaaattattgaagctattaggattgcgaaacaggaaggcctttctgtatcattagatttggccagttttgagatggttcgtgactctaggtctaaactcattaatcttttggagactggtaacattgacctttgctttgccaatgaggatgaagctagagaggttatagggggaggtctggaatcagatccagaggaggcacttgcgttcttgggcaagtattgcaaatgggctgtggtgacacttgcttcaaagggatgcatggcaaagcatggcaaacaggtggttcaagtgccggccatcggggagagcaacgcggtggacacaactggagcaggcgacctgttcgcgagcggcttcctgtacgggctggtgaaggggctgccgctggaggagtgctgcaaggttggggcgtgcagcggtgggtcggtgacacgggcgctcggcggggaggtgcggccggagaactggcagtggatgtacaagcagatgaacgccaggggcctgctgctccccgagctcaagaactgagctaatgctagctgccgtagctgtagctagctgcatgctgcaccagctgttgtatctctctcagcactcctaagactcgtatcatcgcccaggagcaaagaggctattatccggcctcccattgttgattgttgcagttacctttcccctgatagtctgttactgttactagaatattggtgtccatgcttgattgctggcatggcaaaggacggacagccgggcaggcaggcaagcacattagttgatttgttgaagtaaccgcagtgccactcctaagactgaatcaatcagatggagtatattgattactgcacttcgtgtgtgtggtagagtactattcccttggtctaaaatattatgccg

SEQ ID NO: 1171 - DNA, 1363 bp, Zea mays
catctgctccaccaccggcacatcgccgccgaccttattcctccgccgctcgaggagtcagccgagccaacggagggagaccatatgggcgcggaggcagcgcatccgcagcaacagcctccctcctccgtccgaccctgcagggaggcggcggcgcccgcggtgctggggctgcagctctcggcgctgatcgaccacgtcgcgcgcgtcgactggtccctcctcgaccgcgtccctggcgaccgcggcggctcgcagcaggtgtccattgtggagttgaatcatattcttaatgaagtgaatacccacatccttccttcccacaatgatctcaccccaataactacaatagccggtggaagtgttgccaacacaatccgtgggctctcagctggttttggaatatcaactggaataattggagcttgtggggatgacaaccagggacttttgtttgtcaacaatatgagctttagtggtgtagatctcacaaggttaagggccaaaaaagggcacaccgctcagtgtgtgtgcttggttgatgcaagcggcaaccgcaccatgcgtccgtgcctatctagcgcagtcaagatacaggccaatgaatttagaaaggaggatttcaaaggctccaagtggcttattgtgagatatgcacaacagaacatggaacagattattgaagctattaggattgctaaacaggaaggcctttcagtatcattagatttggccagttttgagatggtccgtgactctaggtctaagcttattaaccttttggagaccggtaacattgacctttgcttcgccaatgaggatgaagctagagaggttatagggggaggtctggaatcagatccagaggaggcgcttgcgttcttgggcaagtattgcaaatgggctgtggtcacacttgcttcaaagggatgcatggcaaagcatggcaaacaggtcgttcaagtgccggccatcggggagagcaacgcggtggacacaactggagcgggcgacctgttcgcgagcgggttcctgtacgggctggtgaaggggttgccgctggaggagtgctgcatggttggggcgtgcagcggcgggtcggtgacgcgggcgctcggcggagaggtgcggccggagaactggcagtggatgtacaagcagatgcacgccaggggcatgctgctccctgagctcaagaactgaactaatcatgctgcagctggtgttagctgcatgctgcaccagctgttgtatctctcagcactcctacctttcccctgctagaatattgaaccactcctgagattgaaccaatcagatggagtgtattgataattgcacttcatatgtgtgctagtgtact

SEQ ID NO: 1172 - DNA, 1785 bp, Panicum virgatum
aataatccacattatcgagcataatgcctagagatccatgcaagggtagtgatgaagagtgctgaagaagattgccctctttgaccacctccgataaaacggcggcgaacaagccctcccctcggaggcttgcaatccccccatctgctcccgagtcccgacacgggccccgccccgcccccgtcaccgccgcggcgccggcgaccgtttcctcctcctcctccgctcgaggagagggccagcggcaggagaccggtcaattcaacaggaccgtcccatatgggcgcggaggcagagcacccgcagcagcagcagcctccgtccgccgtccgtcccggcagggcggcggcggcgcccgcggtgctggggctccagctctccgcgctgatcgaccacgtcgcgcgcgtcgactggtccctcctcgaccgcgtccccggcgaccgcggcggctcgcagcaggtgtccattgacgagctgaatcatattcttactgaagtgaatgcccacatcctttcttcccgcaatgatctgactccaataactacaatagccggtggaagcgttgccaacacaattcgtgggctctcagctggttttgggatatcaactggaataattggagcttgtggagacgacagccagggcattttgtttgtcaacaacatgagttttagtggtgtcgatctcacaagattaagggccaaaaaagggcacactgctcagtgtgcgtgcttggtcgatgcaagcggcaatcgcaccatgcggccatgcctatctagtgcagtcaaaatgcaggccaatgagtttagaaaagaggatttcaaaggttccaagtggcttgttgtgagatatgcacaacagaacatggaacagattattgaagctattaggattgctaaacaggaaggcctttcagtatcattagatttggccagttttgagatggttcgtgactctaggtcaaaactcattaaccttttggagactggcaacattgacctttgcttcgccaatgaggatgaagctagagaggttatagggggagatccgacatcaaatccagaggaggcgcttgcattcttgggcaagtactgcaaatgggccgtggtgacacttgcttcaaaggggtgtatggcgaaacatggcaaacaggtcgttcaagtgccggcgatcggggagagcaacgcggtggacacgactggagcaggcgacctgttcgcgagcgggttcctgtacgggctggtgaaggggctgccacttgaggagtgctgcaaggtgggggcgtgcagcggcgggtcggtgacgcgggcgctgggcggggaggtgcggccggagaactggcagtggatgtacaagcagatgcacgccaggggcctactgctccctgagctcaagaactgaactgctgctgctgctgctgcttctgttgctgctgcgtattagcagcaccagctgctgtatctcaccactcctaagaggccattatccagcctcccgttattgattgtcgcggttgccttacctgtttgctagaatattgttggtttaccatgcttgattcatggcatggtgaagggcaggctggcacattagttgatttgttgatgaaccactcctaagattgaatcagtcgaatggagtatattgataacatcatgtgtgtggctgtgtgctagctagtgtacttgagtaatttgccttgccttgttagaaaatgtgcttgacttgctttgttaagaagcctctctggttcttcagtttaagttgtctgttgttcatctaaaa

SEQ ID NO: 1173 - DNA, 1412 bp, Echinochloa colona
ccctcccccctggaggcttgcaatcccatctgctcccgacacgggcccccgcccccacaccgccggcgaccttttccgcctccaccgcccggggagagggccagcggagggagaccgggctaattcacgagtatgggcgccgaggcagagcacccgcaccagcagcctccctcctccctccggcccagcagggaggcggcggcgccgccggcggtgctggggctccagctctcggcgctgatcgaccacgtcgcgcgcgtcgactggtccctcctcgaccgcgtccccggcgaccgcggcggctcgcagcaggtgtccattgaggagctgaatcatattctaactgaagtgaatgcccacatccttccttcccgcaatgatctcactccaataactacaatagccggtggaagcgttgccaacacaatccgtgggctctcagctggttttgggatatcaactggaataattggagcttgtggagatgacaaccagggcattttgtttgtcaacaatatgagttttagtggtgtagatctcacaagattaagggccaaaaaagggcacactgctcagtgtgcgtgcttggtcgatgcaagcggcaatcgcaccatgcggccatgcctatcaagtgcagtcaagatgcaggccaatgagtttagaaaggaggacttcaaagactccaagtggcttgttgtgagatatgcacaacagaacatggaacagattatggaagctattaggattgctaaacaggaaggcctttcagtatcattagatttggccagttttgagatggtccgtgactctaggctgaaactcattaaccttttggagagtggtaacattgacctttgcttcgccaatgaagatgaagctagagaggttatagggggaggtccaacatcaaatccagaggaggcgcttgtattcttgggaaagtactgcaaatgggctgtggtgacgcttgcttcaaagggatgtatggcaaagcatggcaaacaggttgttcaagtgccggccatcggtgagagcagcgcggtggacacgaccggagcaggcgacctgttcgcgagcgggttcctctacgggctggtgaaggggctgccgctggaggagtgctgcaaggttggcgcgtgcagcggcgggtcagtgacgcgggcgctgggcggggaggtgaggccggagaactggcagtggatgtacaagcagatgcacgccaggggcctgctgctccccgaactcaagaactgaatccctgatgctgctgtagcttagctgcaccagctgctgtatctcaccactcctaagaaaaggccgttaacctgcctcccgttattgattgttgtggttgccttaccctgtttactagaatattgttagtttaccgtgcttgattcctggcatggtga

SEQ ID NO: 1174 - DNA, 1595 bp, Echinochloa colona
aagcgggcgtgatgcatcgagatccatgcaagggcagtgatgaagagtgccgaggaagattgcctctctttcacccctcctataaaacggcggcgaagaagccctcccccctggaggcttgcaatcccatctgctcccgacacgggcccccgcccccacaccgccggcgaccttttccgcctccaccgcccggggagagggccagcggagggagaccgggccaattcactcacgaggaccatccatcggtatgggcgccgaggcagagcacccgcaccagcagcctccctcctccctccggcccagcagggaggcggcggcgccgccggcggtgctggggctccagctctcggcgctgatcgaccacgtcgcgcgcgtcgactggtccctcctcgaccgcgtccccggcgaccgcggcggctcgcagcaggtgtccattgaggagctgaatcatattctaactgaagtgaatgcccacatccttccttcccgcaatgatctcactccaataactacaatagccggtggaagcgttgccaacacaatccgtgggctctcagctggttttgggatatcaactggaataattggagcttgtggagatgacaaccagggcattttgtttgtcaacaatatgagttttagtggtgtagatctcacaagattaagggccaaaatagggcacactgctcagtgtgcgtgcttggtcgatgcaagcggcaatcgcaccatgcggccatgcctatcaagtgcagtcaagatgcaggccaatgagtttagaaaggaggacttcaaaggctccaagtggcttgtggtgagatatgcacaacagaatctggaacagattatcgaagctattaggattgctaaacaggaaggcctttcagtatcattagatttggccagttttgagatggtccgtgactctaggctgaaactcattaaccttttggagagtggtaacattgacctttgcttcgccaatgaagatgaagctagagaggttatagggggaggtccaacatcaaatccagaggaggcgcttgcattcttgggaaagtactgcaaatgggctgtggtgacgcttgcttcaaagggatgtatggcaaagcatggcaaacaggttgttcaagtgccggccatcggtgagagcagcgcggtggacacgaccggagcaggcgacctgttcgcgagcgggttcctctacgggctggtgaaggggctgccgctggaggagtgctgcaaggttggcgcgtgcagcggcgggtcagtgacgcgggcgctaggcggggaggtgcggccggaaaactggcaatggatgtacaagcagatgcacgccaggggcctgctgctccccgaactcaagaactgaatccctgatgctgctgtagcttagctgcaccagctgctgtatctcaccactcctaagaagaggctattatcctgcctcccgttattgattgttgtggttaccttaccctctttgctagaatattattagtttaccgtgcttgattcctggcatggtgattggtgaagggcaagctggcgcattagttgatttgttgaagggaaccatggaagcactgctccta

SEQ ID NO: 1175 - DNA, 1456 bp, Setaria italica
gcccagcagccccccgcaccgccggcgccggcgaccgtttcctcctcctcctccgctcgaggagagggccagcggagggagaccggccaattcacctggaccgacccatatgggcgccgaggcagagcacccgcagcagcctccgtcctccctccggcccggctgggaggcggcggcggcggcggcgcccgcggtgctggggttccagctctcggcgctgatcgaccacgtcgcccgcgtcgactggtccctcctcgaccgcgtccccggcgaccgcggcggctcgcagcaggtgtccattgaggagctgaatcatattcttactgaagtgaatgcccacatccttccttcccgcaatgatctcactccaataactacaatggctggtggaagcgttgccaacacaatccgtgggctctcagctggttttgggatatcaactggaataattggagcttgtggagatgacaaccaggccattttgtttgtcgacaatatgagttttagtggtgtagatctcacaagattaaggcccaaaaaagggcacaccgctcagtgtgcgtgcttggttgatgcaagcggcaatcgcaccatgcggccatgcctatctagtgcagtcaagctgcaggccaatgagtttagagaggaggacttcaaaggctccaagtggcttgttgtgagatatgcacaacagaacatggaacagattattgaagctattaggattgctaaacaggaaggactttcagtatcattagatttggccagtttcgagatggttcgtgactctaggttgaatctcattaaccttttggagactggcaacattgacctttgcttcgccaatgaggatgaagctagagagcttatagagggaggtccaacatcagatccagaggaggcacttgcattcatgggaaagtactgcaaatgggctgtggtgacccttgcttcaaagggatgcatggcaaagcatggcaaacaggtcgttaaagtgccggcgatcggggagagcaacgcggtggacacgaccggagcgggcgacctgttcgcgagcgggttcctctacgggctagtgaaggggctgccgctggaggactgctgcaaggtcggggcgtgcagcggcgggtcggtgacgcgggcgctgggcggggaggtgcggccggagaactggcagtggatgtacaagcagatgcacgccaggggcctgctgctccccgagctcaagaactgaactgctgctgctgctgtagcttagcatcaccagctgctgtatctcaccattcctaagaggccatattccagcctcccccgttattgattgttgctagaatgttgttggtttaccatgcttgattcatggcgtggtgaagggcaagcctggcacattagttgatttgttgaagggaaccacggaaccactcctaagtcctaagatgaatcaatcgaatggaat

SEQ ID NO: 1176 - DNA, 1338 bp, Pennisetum glaucum
ccggcagggaggcagcggcggcggtggcggcgccagcggtgctggggctccagctctcggcgctgatcgaccacgtcgcgcgcgtcgactggtccctcctcgaccgcgtccccggcgaccgcggcggctcgcagcaggtttccattgaggagctgaatcatattcttactgaagtcaatgcccacatccttccttcccgcaatgatctcactccaataactacaatggctggtggaagcgttgccaacacaatccgtgggctctcagctggttttgggatatcaactggaataattggagcttgtggagatgacaaccaggccattttgtttgtcgacaatatgagttttagtggtgtagatctcacaagattaagggccaaaaaagggtacaccgctcagtgtgcgtgcttggtcgatgcaagcggcaatcgcaccatgcggccatgcctatctagtgcagtcaagctgcaggccaatgaatttagaaaggaggacttcagaggctccaagtggcttgttgtgagatatgcacaacagaacttggaacagattatcgaagctattaggattgctaaacaggaaggcctttcagtatcattagatttggccagttttgagatggttcgggactctaggttgaaactcattaaccttttggagactggcaacattgatctttgcttcgccaatgaggatgaagctagagagctcatagggggaggtccaacatcagatccagatgaggcacttgcattcctgggaaagtactgcaaatgggctgtggtgacccttgcttcaaagggatgtatggcaaagcatggcaaacaggtcgttcaagtgccggccatcggggagagcaacgcggtggacacaaccggagcgggcgacctgttcgcgagtgggttcctctacgggctggtgaaggggctgccgctggaggactgctgcaaggtcggggcgtgcagcggcgggtcggtgacgcgggcgctgggcggggaggtgcggccggagaactggcagtggatgtacaagcagatgcacgccaggggcctgctgctccccgagctcaagaactgaactgctgctgctctagcttagcatcaccggctgctggctgctgtatcgatctcactattcctaagaggccattgcccagcctcccccgctatcgattgttgcggttgccttaccctgtttcctagaatgttgttggcttaccatgcttgattcctggcatggttaagggcaaaccctggcacattagttgattttgttgaagggcaccacggaacctcctaagatgaaatcagtcgaatgaaatatattgatcactgca

SEQ ID NO: 1177 - DNA, 1535 bp, Brachypodium distachyon
gaaaccccctcccgccccccgccgcgccgcacaagcttccgccggcgagcgacgacccttgttccgacctgtccgccgcacgcggaggccggcgtggagggaggaggagggggagccctgcagccatgggcgccgaggcagagcagcagcaggcgccctcctcgcccccgccggtggtggtggggctgcagctgtcggcgctgatcgaccacgtggcgcacgtcgactggtccctcctcgaccgcgtccccggcgaccgcggcggctcgcagcaggtctcttttgaggagttaaatcatatcctgactgaagtgaatgccctcatcctcccttcccgtgacgacctctctccagtaagaactatggccggtggtagtgttgcaaatacaatccggggactctcagcgggatttgggatatcgactggaataattggagctcgtggagatgatgaccagggtcttttatttgtcaataacatgagctttagtggtgtagacctcaccagattaaggacgaaaaaggggcacactgcgcagtgtgcatgcttggttgatgccagtggcaatcgcaccatgcgcccgtgcctatccagtgcagtcaagctccaggccaatgagttcgtgaaggaggacttccaaggctccaagtggctggttgtgagatatgcacaacaaaatctggaacagattattgaggcaatcagggttgctaaacaagaaggtctctcagtatcattagatttggctagtttcgagatggttcgcgactataggttgcaactcattgcccttttggagacaggcaacattgacctttgttttgcaaatgaggatgaagctagggagatcatagggggagaactgacatttgatccagaggtggcacttgcattcttgtccaagtactgcaaatgggccgtggtgacccttgcatcaaagggatgccttgctaagcatggcaagcaggtagtccaggtgccggccatcggggagagcaacgcggtggacgccacaggcgcgggggacctgtttgcgagcgggttcctgtacgggctggtgaaagggctgcccctggaggagtgctgcaaggttggggcgtgcagcggcgggtcggtgatcagggccctgggcggggaggtgaggccggagaactggcagtggatgtacaagcagatgcacgccggcgggctgctgctcccggagctcaagaactgaatgaatgactcctcctgccttggttacatacttgctcctaagaagctgctggaaagcttgtgttaagaagccatcgattgactttggtcattgcaagtgctttgcccccattgatctcccatatgtttgggaaagggcaagcagattgattgtttgttcaggagggcactgaacctgtccatgcttgaatggatgaatgaattgaattgaacccactatggattattagtactactatcatgcatgtgatttgattgttttataacctgttgcaaaagaatagtcacaaatgcaataaaaaaacaggattaagctggc

SEQ ID NO: 1178 - DNA, 1408 bp, Aegilops tauschii
ccgaccgcccccgccgcacagcgccactcagacgccggcggcgacccttcccaccaccaaggcgggcgggcgcggagggaggagggccgcggaccccaaggagccccggagaggaagggaaaccatgggcgccgaggcagagcagcagcagcagcttcctcctccctccccccaggccggcaaggcggacccgccggcggtggtggggctgcaggtgtcggcgctgatcgaccacgtcgcacgcgtcgactggtccctcctcgaccgcgtccccggcgaccgcggcggctcgcagcaggtatcttttgaggagttggatcatattctgaatgaagtgaatgcccttatccttccttcccatgacgacccctctccagttagaactatggctggtggtagtgttgccaacacagttcggggtctctcagctggttttgggatatcaactggaataattggagctcgtggagatgatgaccagggcattttgtttgtcaacaacatgagctttagtggcgtagatctcacaagattaagggcaaaaaaggggcacactgcacagtgtgcatgcttggttgatgcaagtggcaatcgcaccatgcgcccatgcctatctagtgcagtcaagctccaggccaatgagttcactaaggaggacttccaaggctccaagtggctggttgtgagatatgcacaacaaaacctcgctcagattattgaggctatcagggttgcaaaacaagaaggtctctcggtatcattagatttggctagttttgagatggttcgcgactataggtcacaactaattgccctgttggagacaggcaacattgacctttgtttcgccaatgaggatgaagctagggagatcatagggggagggctgacatatgatccagaggatgcgcttgcgttcttgtccaagcactgcaaatgggctgtggtgactctcgcttcaaaggggtgcatcgcaaaacatggcaagcaggtagttcatgtgccggccatcggggagagcaacgcggtggatgccaccggtgcgggcgacctgttcgcgagcgggttcctgtacgggctggtgaaagggctccccctggaggagtgctgcaaggtcggggtgtgcagtggcgggtcggtggtcagggccctcggcggggaggtgaggccggagaactggcagtggatgtacaagcagatgcacgccggtgggctgctcctcccggagctcaagaactgagcctcgcctatgcgagaaaaaaaacttgtgtcagccccattggttggttgattgtatcgctgattggaagtgcttgctcccattgatctcccatgcgtgtatgggaatgggtaggcacgttgatgatgatttgctggaggtgaatgaagagataaatgaaaaagaact

SEQ ID NO: 1179 - DNA, 1313 bp, Hordeum vulgare
ctataaaacagggaagaacccatctttccttgcaaggttccaacagaccccgacctcccccgccgcacaacgccgctccgacgccggcgacgacccgtccctccaccgacgcgggtgggcgcggagggaggagggccgcgggcccaaggagccccggagaggaaaccatgggcgccgaggcagagcagcagcagcagcagcttcctcttccctccccccaggccggcaaggcggacccgccggcggtggtggggctgcaggtgtcggcgctgatcgaccacgtcgcacacgtcgactggtccctcctcgaccgcgtccccggcgaccgcggcggctcgcagcaggtatcttttgaggagttggatcatattctgaatgaagtgaatgcccttatccttccttcccatgacgacccctctccagtcagaactatggctggtggtagtgttgccaacacagttcggggtctctcagctggttttgggatatcaactggaataattggagctcgtggagatgatgaccagggtattttgtttgtcaacaacatgagctttagtggtgtagatctcacaagattaagggcaaaaaaggggcacactgctcagtgtgcatgcttggttgatgcaagtggcaatcgcaccatgcgcccatgtctatctagtgcagtcaagctccaggccaatgagttcactaaggaggacttccaaggctccaagtggctggttgtgagatatgcacaacaaaacctcgctcagattattgaggctatcagagttgcaaaacaagaaggtctctcggtgtcattagatttggctagttttgagatggttcgcgactataggtcacaactaattgccctgttggagacgggcaacattgacctttgtttcgccaacgaggatgaagctagggagatcatagggggagggctgacatttgatccagaggatgcgcttgcattcttgtccaagcactgcaaatgggccgtggtgactctcgcttcaaaggggtgcatcgcaaaacatggcaagcaggtggttcaggtgccggccatcggtgagagcaacgcggtggatgccaccggcgcgggcgacctgttcgcgagcgggttcctgtacgggctggtgaaagggctccccctggaggagtgctgcaaggtcggtgcgtgcagtggcgggtcggtgaccagggccctcggcggggaggtgaggccggagaactggcagtggatgtacaagcagatgcacgccggtgggctgctgctcccggagctcaagaactgagcctcgcctatgtgagagagaaaaaaa

SEQ ID NO: 1180 - DNA, 1535 bp, Triticum aestivum
gaggttccaacagactccgaccgcccccgccgcacagcgccactcacacgccggcggcgacccttcccaccaccaaggcgggtgggcgcggagggaggagggccgcggacccaaggagccccggagaggaaaccatgggcgccgaggcagagcagcagcagcagcttcctcctccctccccccaggccggcaaggcggacccgccggcggtggtggggctgcaggtgtcggcgctgatcgaccacgtcgcacgcgtcgactggtccctcctcgaccgcgtccccggcgaccgcggcggctcgcagcaggtatcttttgaggagttggatcatattctgaatgaagtgaatgcccttatccttccttcccatgacgacccctctccagtaagaactatggctggtggtagtgttgccaacacagttcggggtctctcagctggttttgggatatcaactggaataattggagctcgtggagatgatgaccagggcattttgtttgtcaacaacatgagctttagtggcgtagatctcacaagattaagggcaaaaaaggggcacactgcacagtgtgcatgcttggttgatgcaagtggcaatcgcaccatgcgcccatgcctatctagtgcagtcaagctccaggccaatgagttcactaaggaggacttccaaggctccaagtggctggttgtgagatatgcacaacaaaacctcgctcagattattgaggctatcagggttgcaaaacaagaaggtctctcggtatcattagatttggctagttttgagatggttcgtgactataagtcacaactaattgccctgttggagacaggcaacattgacctttgtttcgccaatgaggatgaagctagggagatcatagggggagggctgacatatgatccagaggatgcgcttgcgttcttgtccaagcactgcaaatgggccgttgtgactctcgcttcaaaggggtgcatcgcaaaacatggcaagcaggtggttcaggtgccggccatcggggagagcaacgcggtggatgccaccggtgcgggcgacctgttcgcgagcgggttcctgtacgggttggtgaaagggctccccctggaggagtgctgcaaggtcggtgtgtgcagtggcgggtcggtggtcagggccctcggcggggaggtgaggccggagaactggcagtggatgtacaagcagatgcacgccggtgggctgctcctcccggagctcaagaactgagcctcgcctatgcgagaaaaaaacctgtgttcagccccattggttggttgattgtatcgctgattggaagtgcttgctcccattgatctcccatgcgtgtatgggaatgggtaggcacgttgatgatgatttgctggaggtgaatgaagagataaatgaaaaagaactgatgtggtatcatgcatgtgtctgaatttgaatttgaatctaaattcgaacttctgactggtatgctaaatgaacataatggtagtcatcatttagtatatcaatgtttattacgat

SEQ ID NO: 1181 - DNA, 1405 bp, Oryza sativa
gtgcgttctccttctccctccccggcccctagccgccgcacccccaccctcgcccgcctctcgccgtcgccggaacggaaaatcatgggcgcggaggcagagcaccgcatgtctccctcccccgctcccgctcccgctccccctacccctgttgggaggaccgacggcgacgcccctcccatggtgctgggcctgcagctgtcggcgctcatcgaccacgtcgcgcgcgtcgactggtccctcctcaaccgcatccccggcgaccgcggcggttcacagcaggtctgtattgaggagttgaatcatattctggctgaagtgaatgctcaaatcctcccttgccgtgatgacctttcttcaataaggactatagccggtggtagtgtcgccaacacaattcgaggtctctcagcaggttttgggatatcaactggaataattggagcttgtggagatgacagccagggcgttttgtttgtcagcaacatgagctttagtggagtagacctcacaagattaaggacaaaaaaggggcacactgctcagtgtgcatgcttggtcgatgcaagtggcaatcgcaccatgcgcccttgcctatctagtgcagtcaagctccaggccaacgagttcaaaaaggaggacttcaaaggctccaagtggttggttgtacgatatgcaagacagaacatggaacagatccttgaagctattaggattgctaaacaagaaggtctctcagtatcattggatttggctagttttgagatggttcgtgactataggacacaactcattgaccttttggaaactggcaacattgacctttgctttgccaatgaggatgaagctagagagcttctagggggagagctgacatttgatccagaggaggcacttgctttcttggccaagtactgtaaatgggccgtggtgaccctagcttctaagggatgcatagcgaagcatgggaagcaggtggttcaagtggcggcaaccggggagagtaatgcggtggacgcgacgggggcgggggatctgtttgcgagcgggttcctgtacgggttggtgaaagggctggcattggaggagtgctgcaaggtaggggcgtgcagcggtgggtcagtggtgagggctctgggcggggaggtgaggccggagaactggcagtggatgtacaagcagatgaacgccagtggcctgctgctccctgacctcaagaactgaagaaaaagaaaaaagggcttgccttttacttgtcaagcttccaagaaagaaacaaagattcagaccatggtcattgatggcttgattgtttgttagttagacctcctatgctcggtttctttctttgtttcttaatttgtgagatgagatgaatggaatggatggtggtaacctgcactgc

SEQ ID NO: 1182 - DNA, 1133 bp, Lolium multiflorum
gtgggtggacgcggagggaggagcgcgcgcgcccaacagaaacacagaggaaccatggttgccgaggcagatcatcagcagccaggccggccggccggcagggcggcggacccgccggcggtgctggggctgcaggtgtcggcgctgatcgaccacgtcgcccacgtcgactggtccctcctcgatcgcgtcccgggcgaccgcggcggctcgcagcaggtctcttttgaggagttgaatcatattctcaatgaagtgaatgccctcatccttccatccagcgacggcctctctccagtaagaactatggccggtggtagtgtcgctaatacaattcgagggctctcagcgggttttgggatatcaactggaataattggagctcgtggagacgatgaccaaggtgttttgtttgtcaacaatatgagctttagtggtgtagatctcacaagattaagggcaaaaaaggggcacactgcgcagtgtgcatgcttggttgatgcaagtggcaatcgcactatgcgcccatgcctatctagcgcagtcaagctacaggcaaacgagttcaccagggaggacttccaaggctccaagtggctggttgtgagatacgcacaacaaaatctcggccagattgttgaggctatcagggttgcaaaacaagaaggtctctcggtatcattagatttggctagctttgagatggttcgcgactataggtcgcaactaattgcccttttggagaccggcaacattgacctttgcttcgccaatgaggatgaagctagggagatcataggggaagggctaacgtttgatccagaggaggcacttgcattcttgtccaagtactgcaaatgggctgtggtgaccctcgcatcaaagggatgccttgctaagcatggaaagcaggtagttcaagtgccagcaataggggagagcaacgctgtggatgccacgggcgcaggtgacctgtttgcgagcggtttcctgtatgggctggtgaaagggctccccctggaggagtgctgcaaggtcggtgcatgcagcggcgggtccgtgatcagggcactcggcggtgaggtgaggcctgagaattggcagtggatgtacaagcagatgcacgccggtgg

SEQ ID NO: 1183 - DNA, 1372 bp, Avena sativa
gaaccgccgccccaccctgcagcgccacgcagccaccggcggcgaccctttcctccccaccaccatcaccactctaggagagaggtgcgtggacgcggagggaggatgggcgtacccggagaaacagagggaaccgtcacgggcgccgaggcagagcatcagcagccgggccgggccgacggggcggcggacccgccggcggtgctggggctgcaggtgtcggcgctgatcgaccacgtcgcccgcgtcgactggtccctcctcgaccgcgtccccggcgaccgcggcggctcgcagcaggtcacttttgaggagttgaatcatattctcactgaagtgaatgccctcatccttccctccagcgacgacctcactccagtaagaactatggctggtggtagtgttgctaatacaattcgagggctctcagcgggttttgggatatcaactggaataattggagctcgtggagacgatgaccaaggtgttttgtttgtcaacaatatgagctttagtggtgtagatctcacaagattaagggcaaaaaaggggcacactgcacagtgtgcatgcttggttgatgcaagtggcaatcgcaccatgcgcccatgcctatctagtgcagtcaagctccaggccaatgagttcactaaggaggacttccaaggctccaagtggctggttgtgagatatgcacaacaaaatctcggccagattattgaggctatcagagttgcgaaacaagaaggtctctcggtatcattagatttggctagttttgagatggttcgcgactataggtcgcaactagttgcccttttggagacaagcaacattgacctttgcttcgccaatgaggatgaagcaagggagatcatagggggagggctaacgtttgatccagaggaggcgcttgcattcttgtccaagtactgcaagtgggccgtggtgaccctcgcatcaaaaggatgccttgctaagcatggcaagcaggtagttcaagtgccggcaattggggagagcaacgcggtggacgccacgggtgcaggcgacctgttcgccagcgggttcctgtacgggctggtgaaagggctccccctggaggagtgctgcaaggttggggcttgcagtggcgggtcggtgatcagggcactcggcggtgaggtgaggccggaaaactggcagtggatgtacaagcagatgcacgccggtgggatggtgccgcctgagctcaagaactgatggtccagctgagacttctgccttggttacttactcctaagaagcttctgttaagccattgattgattgtatcattgcaagtgcttgctcattgacctcccatgcatcggaataagtaggcacattaatt

SEQ ID NO: 1184 - DNA, 1286 bp, Avena sativa
ggcggacccgccggcggtgctggggctgcaggtgtcggcgctgatcgaccacgtcgcccgcgtcgactggtccctcctcgaccgcgtccccggcgaccgcggcggctcgcagcaggtcacttttgaggagttgaatcatattctcactgaagtgaatgccctcatccttccctccagcgacgacctcactccagtaagaactatggctggtggtagtgttgctaatacaattcgagggctctcagcgggttttgggatatcaactggaataattggggctcgtggagacgatgaccaaggtgttttgtttgtcaacaatatgagctttagcggtgtagatctcacaagattaagggcaaaaaaggggcacactgcgcagtgtgcatgcttggttgacgcaagtggcaatcgcaccatgcgcccatgcctatctagtgcagtcaagctccaggccaatgagttcactaaggaggacttccaagggtccaagtggctggttgtgagatatgcacaacaaaatctcggccagatcattgaggctatcagagttgcaaaacaagaaggtctctcggtatcattagatttggctagttttgagatggttcgcgactataggtcgcaactagttgcccttttggagacgggcaacattgacctttgcttcgccaatgaggatgaagcaagggagatcatagggggagggctaacgtttgatccagaggaggcgcttgcattcttgtccaagtactgcaagtgggccgtggtgacccttgcatcaaaaggatgccttgctaagcatggcaagcagatagttcaagtgccggcaattggggagagcaacgcggtggacgccacgggtgcaggcgacctgttcgccagcgggttcctgtacgggctggtgaaagggctccccctggaggagtgctgcaaggttggggcttgcagtggcgggtcggtgatcagggcactcggcggtgaggtgaggccggagaactggcagtggatgtacaagcagatgcacgccggtgggatggtgccgcctgagctcaagaactgatggtccagctgagacttctgccttggttacttactcctaagaagcttctgttaagccattgattgattgtatcattgcaagtgcttgctcattgacctcccatgcatcggaataagtaggcacattaatttctcgaagggaactgaactggccatggttaattgaacggattgaacttatggtaagtactgtcatatgtatatgtgcctctgtacctgaatgcaaaatt

SEQ ID NO: 1185 - DNA, 1206 bp, Secale cereale
ggctgcaggtgtcggcgctgatcgaccacgtcgcacgcgtcgactggtccctcctcgaccgcgtccccggcgaccgcggcggctcgcagcaggtatcttttgaggagttggatcatattctgaatgaagtgaatgcccttatccttccttcccatgacgacccctctccagtaagaactatggctggtggtagtgttgccaacacagttcggggtctctcagccggttttggcatatcaactggaataattggagctcgtggagatgatgaccagggcattttgtttgtcaacaacatgagctttagtggtgtagatctcacaagattaagggcaaaaaaggggcacactgcgcagtgtgcatgcttggttgatgcaagtggcaatcgcaccatgcgcccatgcctatctagtgcagtcaagctccaggtcaatgagttcactaaggaggacttccaaggctccaagtggctggttgtgagatatgcacaacaaaacctggctcagattattgaggctatcagggttgcaaaacaagaaggtctctcagtatcattagatttggctagttttgagatggttcgcgactataggtcacaactaattgccctgttggagacaggcaacattgacctttgttttgccaatgaagatgaagccagggagatcatagggggagggctgacatttgatccagaggatgcgcttgcattcttgtccaagcactgcaaatgggccgtcgtgactctcgcttcgaaggggtgcatcgcaaaacatggcaagcaggtggttcaggtgccggccatcggggagagcaacgcggtggatgccaccggtgcgggcgacctgtttgcgagcgggttcctgtacgggctggtgaaagggctccccctggaggagtgctgcaaggtcggcgcgtgcagtggcgggtcggtgatcagggccctcggcggggaggtgaggccggagaactggcagtggatgtacaagcagatgcacgccggtgggctgctgctcccggagctcaagaactgagcctcgcctatgtggggaagaaaaaaaaacttgtgttcagccccattggttggttgattgtatccttgattggaagtgcttgctcccattgatctcccatgcgtgtatgggaatgggtaggcacgttgatgatgatttgctggaggtgaatgaagagataaatgaaaagaac

SEQ ID NO: 1186 - DNA, 2369 bp, Zea mays
ttcaaagtcacaaaccaaccatccagtcaacgagtcaaataccccttgggaacactacagagtttgccaaaactcatgacatttcagcaagcttttggaaactttggttaccctcatttcctagctctttttcatccaattcatcggtatctgaaccaaggtcctctgtggatccttgggcatcactcacttttgaaggaagtaaaacagcatttttcttgtagccccatacaagcatcgaaatattgtcctgtggtgttataagcccgtcctccctgatgcagtttctctgctcttccaatgtctgttgatctgtgagctttatgtactccagcaaaatcttctcatgatctggccgccatccaaatggtaacggcgtgtaatcaggatcaggaaccatcgacatccttgtatactgaagaccatcaattgaatcaactaggcccattctcagcaaattgtgatactctggcgactggcctttcttatccttcaatggccgactaagatttcttgacgcgatcttatagacctttgcccttgaccgcaacttgtacttggcagcatataactttgccagtgacccccttataatgtaagagcagaagttgacaaccttcttgcggttatcagcgtagcgataccactctgccatcgtcagtaaaagcttattcatctgcgaatttgtgtgagattgtgtggcgtggaacatacggaagcatggttgtggatcgggttcgcggtctcctttcaaaaactcaagcttccggaattgtttgatgcactgcttcagactagctgtcactgagagcagtgtaccaactcccttctcactaatgatcttgcctcctgtagcagtgtaacgcagtgttgggtacacaactcgacggcacagcacatggtcaaggaacatgactccttttgtgatgtgctcaatagggaggctctcgttatcaagtttgatcctgaatcgctgatcacaaaactcaactagctgcttccggagcaccgccgcatccgctcttggccccctcacaccaatcaagaaatgcccgccgtatcgaatgtagtccaccttccttgtcttgtcagggccagtcgtggggacaaactctggccatgatgtattgccctgctcaataccatcatcccctcccacaacatcggacttggatggcttgtaaaactccttaatcctctcttccatccacttatcaaactcatccaggcacacattggcaagcaacgggctcagcaccccacaatggccccaatcaggctgtgtctgtgcttcctctggtgcaaacccaaaaaacgtctgcaaccagtaaggatcaggcttcggctccccctctggcagcaccttcttcttctggtatttcctcttggtcttcttcttcttcactgcagcatcatcgcttgcggtcaccaccggggtgagcagggccgaacggatcaaatcaaccacttttttatcacgcacatcacggataagcgcaccgaccacgagagcatgatcaggcgagtgcaggagtggggagaggtcgcccttgatataccagaggtacggagcaaagctgcggcggatggtgcgaatcgcggcatgcggggatcgacctgggcggaaggcgaaggactttggcgagaacctggcttcgtagacgggctcgagcaggagtaggagcagctcctgcacgacgcggtcctggaagggcgatgggccgggggttgtaaggagggcgcggagcttgcgcttggagagggtggcagggtccggcgcgttggcggcgcgcggggactggaggatgggggtgaggcggttgccgaagcggaagcggccgtcgagtacggcgttgcggagcgtgaggagggaggcgagcgtggaggccgggatggaggagcgcggcagataggaaccggtctcgtcagcgtacgccttctggtaggcgagcacccacagctccaggcgcgagaggaagggggtgagtggctgcggcggtgcgggggtacaagagccggaggtggaggcggcggcgcggaaggaggatacccaaagggaagcggtgattgccaccgggtcgtcgcggaggagctgcgtcgggtccaagatgttcccgttcccggaaccgacgccgccgatgcccccgacgacaccacggtttgtggaggtggtggggtcggcgacgaactggtggcgtcgcaggggcgcgggtgggtagggatgaggataggcaatggaggagaaggagcggaggcggaggagggatgtgacaagcgcgcggcgaggcggcggcatcggaggaggctaaaaccctagcggtggccgtggccggcggcgtcgtggggtttgaatgtttgatgggtaagcg

SEQ ID NO: 1187 - DNA, 3915 bp, Zea mays
ggctagcatgttacatataaagctgacagttgatctatggagtaatcttcccacctgggacgagaggagcatagactaacgtaacattagtccatgccattttgggggcaaaaccattgggccgtccactgtcaaagcccaacatcacgatatattctccccactggccgcgggccgcacccggggctcgggcgttcggcatccctccccgtcgtaactcagcagcgccgccgtcgccgtgcacgcaccagcgccacgactcggcgcttacccatcaaacattcaaaccccacgacgccgccggccacggccaccgctagggttttagcctcctccgatgccgccgcctcgccgcgcgcttgtcacatccctcctccgcctccgctccttctcctccattgcctatcctcatccctacccacccgcgcccctgcgacgccaccagttcgtcgccgaccccaccacctccacaaaccgtggtgtcgtcgggggcatcggcggcgtcggttccgggaacgggaacatcttggacccgacgcagctcctccgcgacgacccggtggcaatcaccgcttccctttgggtatcctccttccgcgccgccgcctccacctccggctcttgtacccccgcaccgccgcagccactcacccccttcctctcgcgcctggagctgtgggtgctcgcctaccagaaggcgtacgctgacgagaccggttcctatctgccgcgctcctccatcccggcctccacgctcgcctccctcctcacgctccgcaacgccgtactcgacggccgcttccgcttcggcaaccgcctcacccccatcctccagtccccgcgcgccgccaacgcgccggaccctgccaccctctccaagcgcaagctccgcgccctccttacaacccccggcccatcgcccttccaggaccgcgtcgtgcaggagctgctcctactcctgctcgagcccgtctacgaagccaggttctcgccaaagtccttcgccttccgcccaggtcgatccccgcatgccgcgattcgcaccatccgccgcagctttgctccgtacctctggtatatcaagggcgacctctccccactcctgcactcgcctgatcatgctctcgtggtcggtgcgcttatccgtgatgtgcgtgataaaaaagtggttgatttgatccgttcggccctgctcaccccggtggtgaccgcaagcgatgatgctgcagtgaagaagaagaagaccaagaggaaataccagaagaagaaggtgctgccagagggggagccgaagcctgatccttactggttgcagacgttttttgggtttgcaccagaggaagcacagacacagcctgattggggccattgtggggtgctgagcccgttgcttgccaatgtgtgcctggatgagtttgataagtggatggaagagaggattaaggagttttacaagccatccaagtccgatgttgtgggaggggatgatggtattgagcagggcaatacatcatggccagagtttgtccccacgactggccctgacaagacaaggaaggtggactacattcgatacggcgggcatttcttgattggtgtgagggggccaagagcggatgcggcggtgctccggaagcagctagttgagttttgtgatcagcgattcaggatcaaacttgataacgagagcctccctattgagcacatcacaaaaggagtcatgttccttgaccatgtgctgtgccgtcgagttgtgtacccaacactgcgttacactgctacaggaggcaagatcattagtgagaagggagttggtacactgctctcagtgacagctagtctgaagcagtgcatcaaacaattccggaagcttgagtttttgaaaggagaccgcgaacccgatccacaaccatgcttccgtatgttccacgccacacaatctcacacaaattcgcagatgaataagcttttactgacgatggcagagtggtatcgctacgctgataaccgcaagaaggttgtcaacttctgctcttacattataagggggtcactggcaaagttatatgctgccaagtacaagttgcggtcaagggcaaaggtctataagatcgcgtcaagaaatcttagtcggccattgaaggataagaaaggccagtcgccagagtatcacaatttgctgagaatgggcctagttgattcaattgatggtcttcagtatacaaggatgtcgatggttcctgatcctgattacacgccgttaccatttggatggcggccagatcatgagaagattttgctggagtacataaagctcacagatcaacagacattggaagagcagagaaactgcatcagggaggacgggcttataacaccacaggacaatatttcgatgcttgtatggggctacaagaaaaatgctgttttacttccttcaaaagtgagtgatgcccaaggatccacagaggaccttggttcagataccgatgaattggatgaaaaagagctaggaaatgagggtaaccaaagtttccaaaagcttgctgaaatgtcatgagttttggcaaactctgtagtgttcccaaggggtatttgactcgttgactggatggttggtttgtgactttgaaaacacaaaaccatctgctagttctttgctgactgctttgtgctggaacagtagttgcaaaatcaagggatgattctgagcctcctttgcttattacttgcgaaggacttgaatatgcagctataagcaggcctctaccaattatacgtgggcgagcactatttaaactgaagatatctcagttaccacgatcgtcctcctcgtcaccatcgcccctgccatccacgtcggcgccgccggaccagatgtcctcctcgtcgctaccccagccgtctgcctcgtcgtcgccgccccagccatctgcctcggctccactgcaatagccatatgccttggcgccactgccccagccgtcttcctcggcggcctgctcctcactgccttgtcgtgatcaagatgccccctagaaggatggttgggccgaggacgctcacggatcttggtggggccatgcagggtgtacctttcaactgtcaaagaaggaacacccacatgtgtactggttctggaggaacaaaaggatccaagaaagtgctagcacctaatgcagaagaccaagttggtagaataactaggtagaagacaaaggaactatccttagctgagaaagatctacatggttcaactacaaatacagaagagcacacattgatttttgccaattgtcctgcacaacatgatgacgagattcaaatctgtgatgaaggccaaacagatgccatgacagataaatggataaggggaaaaagtatgggcatgcaattggaacggataagccgaggcttaaacacagattccactggtcatcactgaaggcaagagacgtccagagttagaaaagatcaatgatctgcaaaaaggaatagatgatactaatgctctccttctctttagcctcaataagaagttggtcgattcattttagtgtggtccttgtatctcatattgctgttgtatggccctgattttgctgtccttttggtactgtccttagcactctacttgatgcttgtttgatgaaacatgatgctagttttgaaaattttgaagggcttggttcttgataaatgatatctatgatatatgttgctaagtacactgtgaaacaaattggttgggttctactgcaacctaacgctggttccagcagtagggcttcagtcaactgtttatgcgttgttggctacaaattcagaagtaaacagacaaaacaatatggtgaaacaaattagcttgtggctaaatattttgtgacgaacaaaattgtcataagcatagatgcc

SEQ ID NO: 1188 - DNA, 3326 bp, Sorghum bicolor
ctggcgctccgcatcccctccccgccgcaactcagccgcgccgccgtcgccgtgcacgcaccagcgccaccacttcggcgcttccctatcagaccgacaaacaaggccaaaaccccacgacgacgccggccacggccaccgcgagggttttttagcctcctccgatgccgccgcctcgccgcgcgcttctcacctccctcctccgcctccgctccttctcctccattgcttatccccatccccacccacccgcgcccccgcggcgccaccagttcgtcgccgaccctaccacctccacaagccgtggcgtcatcgggggcatcggtggcgggagcgggaaccccttggacccaacgcagctcctccgtgacgacccggtggcaatcaccgcttccctttgggtatcctccttccgcgccgccgccgccgcctccggctccggctcttgtacctccgcaccgccgcaatcgctcacccccttcctctcgcgcctggagctgtgggtgctcgcctaccagaaggcatacgctgacgagaccggctcctacctgccgcgctcctccatcccggcctccacgctcacctccctcctcacgctccgcaacgccgtactcgacgcccgcttccgcttcggcaaccgcctcacccccttcctccagtccccgcgcgccgccaacgcgccggaccccgccaccctctccaagcgcaagctccgcgccctcctcacaacccccggcccaccgcccttccaggaccgcgtcgtgcaggagctgctcctactcctgctcgagcccgtctacgaagccaggttctcgccaaagtccttcgccttccgccccggtcgatccccgcatgccgcgatccgcaccatccgccgcagctttgcgccatacctctggtatatcaagggcgacctctccccactcctgcactcgcctgatcctgcgcttgtggtcggcgcgcttatccgtgatgtgcgtgataaaaaggtggtggatttgatccgttcggcgctgctcaccccggtggtgaccgcaagtgatgatgctgcagcgaagaagaagaagacgaagaggaagtaccagaagaagaaggtgctgccagagggggagccgaagcctgacccttactggctgcagacgttctttgggtttgcaccagaggaggcccagacacagcctgattggggccactgtggggtgttgagcccgttgcttgccaatgtgtgcctggatgagcttgataagtggatcgaagagaagattaaggagctttacaagccatccaagttggatgttgtgggaggggatgatggtattgagcagggtaacacatcatggccggagtttgttcccacgagtggccctgacaagacaaggaaggtggactacattcgatatggtggacatttcttaatcggtgtgagggggccaagagccgatgcggcggtgcttcggaagcagctagttgagttttgtgatcagcgattcaggatcaaacttgataatgagagcctccctattgagcacatcacaaaaggagtcatgttccttgaccatgtgttgtgccgtcgagttgtctacccaacgctgcgttacactgctacaggaggcaagatcattagtgagaagggagttggtacactgctctcggtgacagctagtctgaagcagtgtatcaaacagtttcggaagctcgagtttttgaaaggtgaccgtgaaccagatccacaaccatgcttccgtatgttccacgccacacaggctcacacaaattctcagatgaataagcttttactgacgatggcagagtggtatcgctatgctgataaccgcaagaaagttgtcaacttctgctcttacattataagggggtccctggcaaaattatatgctgccaagtacaagctgcggtcaagggcaaaggtctataagattgcgtcaagaaatcttagtcggccattgaaggataagaaagggcagtcgccagagtatcacaatttgctgagaatgggccttgtggattcgattgatggtcttcagtatacaaggatgtcgatggttcctgatcctgattacacgccgttaccaagtggatggcggccagaccatgagaggattttgctggagtatataaagctcacagatcaacagacattggaagagcagcgaaactgcattagagaggaggggctaataacaccacaggactatatttcgatgcttgtatggggctacaagaaaaatgctgttttacttccttcaaaagtgagtgatgcccaaggatccacagaggacctgggttcagatactgatgaattggatgaaaaagagctaggaaatgagggcaatcaaagtttcccaaagcttgctgaaatgtcatgatgactattggtgaactctgtagtgttcccaaggggcttttgactcattgactggatggttgctccatgactgtgaacacacgaaaccaactgctagctctttgctgactgctttgtggtggcctaagcagaggactacatgtttcatgagatcacaactcagccgctgcttcggtcaagtctgttccttaatgttgagtgccatggtgaatagtgtccacggtgctcgaacatgcggttcgacacagcatggcatttctgggaactagtggagatcttatgttggtgtcaaattgtgtgccacctggagtgcgttcctcatatatcaagcctgaatgtttggtgagactttacatctttgttgactgcttcatggtggcctaagcagatgactttttcctgctcagtgacagtgagatggcaattgtgcctctgcattggtcaagtatgttccttaatgctgagggtgatggtgaatactgtcagtggtgctcaaacataagctttgacacagcatggcatttcagggaactagtggagatctcatggtttcaaattgtgtggtacatgcagggctagctcctcatatatcaagcctgatgtttaccgagactttagatgcatttgaaagcatagaaaaaaaacagtgtttacacattccatccaacgtcctgcttgtgcaaattgttatctgtataatctttcactgaagagtaaaaacagcccgaagttcatgatgagccttaaggtgtgttgagaaccctaattgcttatattgtatgtagttagattgtgtctggttgttcacttatgcattttttgtcagttgtttatgtccagcttaaatgttttagtcaacagtaagtaagctgttaggtataattttgtttgctcaagtctcctgtttgctgatagttcagtaaattgtactgttctaaggtta

SEQ ID NO: 1189 - DNA, 2785 bp, Setaria italica
cggccaccgagagggttttatcctcctccgatgccgccgcctcgccgcgcgcttctcacctccctcctccgcctccgcgccttctcctccatcgcctctccacacccccacccacccgctcccccacggcggcaccagtttcagtttgtctctgaccccgccgcctccacaagccgaggcgtcctcgggggcatcggtggcgccggtgccgggagcgggaaccccttggacccgacgcagctcctccgcgacgacccggtggcaatcaccgcctccctctgggtctcctccttccgcgccaccgccgactccgtctccgcctcgtccacccccgcgccgccgcagtcgctcacccccttcctctcgcgcctcgagctgtgggtgctcgcctaccagaaggcgtacgccgacgagaccggctcctacctgccgcgctcctccatcccggcctccacgctcgcctccctcctctcgctccgcaacgccgtgctcgacgcccgcttccgcttcggcaaccgcctcacccccttcatccagtccccgcgctccgccaacgcgccggaccccgccactctctccaagcgtaagctccgcgccctcctcacaacccccggtccgccgcctttccaggaccgcgttgtgcaggagctgctcctgctccttctcgagcccgtctacgaggctaggttctcgccaaagtccttcgcctttcgccccggtcgatcccctcatgccgcgatccgcaccatacgccgcagctttgcgccatacctctggtatatcaaaggcgacctctccccactcctgcactcgcctgatcctgcacttgtcgtcggtgcgctaatccgtgatgtgcgtgataagaaggtggtggatttgatccgctcggcgttgctcaccccggtggtgactgcaagtgatgatgctgcggtaaagaagaagacgaagaggaagtaccagaagaagaaggtgctgccagagggggagccgaagcctgatccttactggttgcagacgttcttcgggtttgcaccggaggaggcaatgacgcagcctgattggggccattgtggggtgctgagcccattgcttgccaatgtgtgcctggatgaacttgataagtggatggaagagaagattaaggagttttacaaaccatccaaatcggatgttgtgggaggggatgatggtattgaacaaggtaatacatcgtggccggagtttgttcccacgagtgggcctgacaagacaaggaaggtggactacattcgatatggcgggcatttcttgatcggtgtgagggggccaagagccgatgcggcagtgctccggaagcagctagttgaattttgtgatcagcggttccgggtcaaacttgataatgaaagcctccctattgagcacatcactaaagggatcatgttccttgatcatgtgctgtgtcgtcgagttgtgtacccaacgctgcgttacacagccacgggtggcaagatcataagtgagaagggagttggtacactgctatctgtgacagctagtctgaagcagtgcatcaaacagttccgaaagctcgagtttttaaaaggagaccgggaaccagacccacaaccatgcttccgtatgttccatgccacacaagctcacacaaattctcagatgaataagcttttactgacaatggcagagtggtaccgctatgctgataaccgcaagaaggtggtcaacttctgctcttatatcataaggggatctttggcaaagctatatgctgccaagtacaagttgcggtcaagggcaaaggtctataagattgcatcaaggaaccttagtcgcccattgaaagataagaaagggcagtcaccagagtatcacaatttgctgagaatgggcctgttggattcgattgatggtcttcagtatacaaggatgtcgatggttcctgatcctgattatacaccattacctagtggatggcgtcctgaccatgagaagattttgctggagtatataaagctcacagatcaacagacgttggaggagcagcgaacttgcattagagaggaggggcttataacaccacaggactatatttcaatgcttgtatgggggtacaagaaaaatgcagttttacttccttcttcaaaagggagtgacacccaaggatctacggaggacattggttcagatactgatgaattgggtgaaaaagagctaggaaacgagggccgtcagggtttcccaaagtttgctgagatgtcatgagtattgatgatctctgtaaacctcccaagaaacatttgtctggatggtgacaatgaaattacatgaaaccaaatgcttcactgcttcatgctcaaggagttgacagctgcatctgccaagaccattgatgtctcttggttgaccggttcatggtggcctagggagatagctgcttcctgctcaaagagatgacagttgtgcagctgcatcagtcaagtccattccttaatgctggagactatggtgaattatgtctggtgctcaagcatgaactttgacctagcataacattcatggaactagtgaagattacattttggcaacaaattgtgtgctacatgcagagctagctactcatatatcaatcctaatgtttagtgctaggaaaagcaaaggaactcaagaggtagaagccatacaggacgctgtactactaatcctaagtctgactttataatgtatactgtctaaacattgttgaggatagcatcatagcatgatgagaccggtgtaatattatagc

SEQ ID NO: 1190 - DNA, 3700 bp, Panicum virgatum
tatggccttgtttggatgcgcgctagaatcctagcgctagaagagaatctttcccgcatgaaggattgaataaagtctatttgcaaaacttttttgggaatgggtgtaacttttcgcgacgaatctaatgacggtaattaatcgatgatttgctacagtgatgctacaataaccatcctctaatcgcgcggtcaaaggcctcgttagattcttcagggtcactagcgcggggttctggagttggttttgtaaactgactttgtttgacaccgtaataatcggtcaaagtgtcactattcactagcgcgctacaaaaccaaacgaggcctatctaaagtttctttttagatttttagcttcctttatgatccctctgtttgaagccgagaggagcatatctcatatctgtactgcatatttgtggctcactggctctaacgtatacacatcattttggagggccaaagaaagcccattggaccgccaccatcaaagcccactagcccgcggcaccctccccgtccccggccccccgccgcccgcccgctccgccgccgtcgccgtgcacacgccaccctttcggcacttccccaccccatcaaacaaggccaaaaccccaccgcgccgccggccacgggccaccgagagggttttagcctcctccgatgccgccgcctcgccgcgcgcttctcacctccctcctccgcctccggggtttctcctccatcgcctctcaccacccccacccacccgctcccccgcggcgccaccaatttgtcgccgaccccaacgcctccacaagccgaagcgtcgccggagccatcggtggcgggagcggtaaccccttggacccgacgcagctcctccgcgacgacccggtcgcaatcaccgcctcaatctgggtctcctccttccgcgccgccgccgcctccgcctccgcctccgcctctcccgcaccgccccagtcactcacccccttcctctcgcgcctcgagctgtgggtgctcgcctaccagaaggcgtacgccgacgagaccggctcctacctgccgcgctcctccatcccggcctccacgctcgcctccctcctctcgctccgcaacgccgtcctcgacgctcgattccgcttcggcaaccgcctcacccccttcctccagtccccgcgcgctgccaacgcgcccgacctcgccaccctctccaagcgtaagctccgcgccctcctcacaactcccggtccgccgcctttccaggaccgcgtcgtgcaggagctgctcctgctcctgctcgagcccgtctacgaggccaggttctcgccgaagtccttcgccttccgccctggtcgatccccgcatgctgctatccgcaccatccgccgcagcttcgctccatacctctggtatatcaagggcgacctctccccactcctgcactcgcctgatcctgcacttgtggtcggtgctcttatccgtgatgtgtgtgataagaaggtggtggatttgatccgctcggcgctactcaccccggtggtgactgcaagtgatgatgccggggtaaagaagaagaaaacgaagaggaagtaccagaagaagaaggtgctgccggagggggagccgaagcctgacccttactggttgcagacattcttcgggtttgcaccggaggaggcacagatgcagcctgattggggacattgtggggtgctgagcccattgcttgccaatgtttgcctggatgagcttgataagtggatggaagagaagattaaggagttttacaagccgtccaagtcggatgttgtgggaggggatgatggtattgagcaaggtaatacatcatggccggagtttgttcccacgagtggtcctgacaagacaaggaaggtggactacattcgatatggtggccatttcttgattggtgtgagggggccaagagccgatgcagcggtgctccggaagcagcttgttgaattttgtgatcagcggttccggatcaaacttgataacgaaaacctccctattgagcacatcactaaagggatcatgttcctagatcatgtgctgtgccgtcgagttgtgtatccaacactgcgttacacagccacaggtggaaagatcataagtgagaagggggttggtacactgctatcggtgacagctagtttgaagcagtgcatcaaacagttcagaaagcttgagtttttgaaaggagaccgggaaccagacccacaaccatgcttccgtatgttccatgccacacaagctcatacaaattctcagatgaataagcttttattgacaatggcagagtggtaccgctatgctgataatcgcaaaaaggttgttaacttctgttcttatattataaggggttctttggcaaagttatatgctgccaagtacaagctgcggtcaagggcaaaggtctataagattgcatcaaggaaccttagtcggccattgaaggataagaaaggacagtcaccagagtatcacaatcttctgagaatgggccttgtggactcaattgatggtcttcagtatacaaggatgtcgatggttcctgatcctgattacacgccgttacctagtggatggcggccagaccatgagaagattttgctggagtatataaagctcacagatcaacaaacattggaggagcagcgagcttgcattagagaggaggggcttataacaccacaagattatatttcaatgtttgtatggggctacaagaaaaatgcagtgttacttccttcttcaaaagatagtgatgcccatgaatcgacggaagaccttggttcagatactgatgaattggctgaaaaagaactaggaaatgagggctgtcagcgtttcccaaagtttgctgagatgtcatgagtattggtgatctctgtaaacttcccaaaaaaatttgactagatggttggttggtgacattggattacacgaaaccaattgcttcacgctcaaggagatgacagctgcatcagcaagtccatcgatgatctctttcctgactggggtcatggtgacctaggcagatgtttgcttcctgctcagggacacgatagttgtgcagctgcatcagtcaagcccattcttaatgctgacttgctaagggctatggtgaattctttctgttgtgctcaaacatgactgagtcttcgacccagtataatattcatggaactagtggagattacattttggtgccaaatcgcgtgccacatgcagggtctcatatatcaatcatgatgtttattaagattttactaagcctatttatgcattttaaaagttacatagaaaaaaaaactgtgtacacattctatccaaatgtcctgcttgtgcaaaatgttgactctaatcttttatcaagaagcagaccttgcaatgaagaggaaacgaagcctgatgttcatagcatttatcagccttaagatgtgttcagaacccctgattgctcatatctacttggatcgcatttggttgttcagcatttttatcacttgtttgtgtttagctgaaactgaaatgcttttgtcaacagtagctgtttgtagtttaactattcattttctttactcaagtctactgcttcctgaatggttcgctaaatactagtgttccaagcatatgcctgctggcagccatatttcaaattgctgaaaatgttttacgaccaacaaaat

SEQ ID NO: 1191 - DNA, 3162 bp, Panicum virgatum
tcatatctgcactgcatatatggctcactctcaccgcctcactggctctaacgtacactcgcccatgtcattttggagggccaaagcccattagaccgctacccatcaaagcccaaattaatctaaaaaaaacaatcaaagcccaactcctgctctctccccactggcccgcggcatcctcccggccgctccgccgccgtcgccgtgcacacgccacccccttgggcacttccccacccccatcaaaccaaaaccccacggcgccgccggcgacgggccaccgagagggttttagcctcctccgatgccgccgccgcctcgccgcgcgcttctcacctccctcctccgcctccggggtttctcctccatcgcctctccccacccccacccccacccacccgctcccccgcggcggcaccagtttgtcgccgaccccaccgcctccacgagccgcagcgtcgtcggggccgtcggtggcgggagcggcaaccccttggacccgacgcagctcctccgcgacgacccggtggcaatcaccgcctcactctgggtctcctccttccgcgccgccgccgcctcctccgcctctcccgcgtccacccccgcgccgccccagtcactcacccccttcctctcgcgcctcgagctgtgggtgctcgcctaccagaaggcgtacgccgacgagaccggctcctacctgccgcgctcctccgtcccggcctccacgctcgcctccctcctctcgctccgcaacgccgtcctcgacgcccgattccgcttcggcaaccgcctcacccccttcctccagtccccgcgcgccgccaacgcgcccgaccccgccaccctctccaagcgtaagctccgcgccctcctcacaacccccggcccgccgcctttccaggaccgcgtcgtgcaggagctgctcctgctcctgctcgagcccgtctacgaagccaggttctcgccaaagtcctttgccttccgccccggtcgatccccgcatgctgcgatccgcaccatccgccgcagcttcgcaccatacctctggtatatcaagggcgacctctccccgctcctgcactcgcctgatcctgcacttgtggtcggtgcacttatccgtgatgtgcgtgataagaaggtggtggatttgatccgctcggcgctactcacccctgtggtgactgcaagtgaagatgccggggtaaagaagaagaagacaaagcgaaagtaccagaagaagaaggtgctgccagagggggagccgaagcctgacccttactggttgcagacattcttcgggtttgcaccagaggaggcacagatgcagcctgattggggacattgtggggtgctgagcccattgcttgccaatgtgtgcctggatgagcttgataagtggatggaagagaagattaaggagttttacaagccatccaagtccgatgttgtgggaggggatgatggtattgagcaaggtaatacatcatggccggagtttgttcccacgagtgggcctgacaagacaaggaaggtggactacattcgatatggcgggcatttcttgattggtgtgagggggccaagagccgatgcggcggtgctccggaagcagcttgttgaattttgtgatcagcggttccggatcaaacttgataatgaaagcctccctattgaccacatcactaaagggatcatgttccttgatcatgtgctgtgccgtcgagttgtgtacccaacactgcgttacacagccacaggtggcaagatcataagtgagaagggggttggtacactgctatcggtgacagctagtttgaagcagtgcatcaaacagttccgaaagcttgagtttttgaaaggagaccgggaaccagacccacaaccatgcttccgtatgttccatgccactcaagctcatacaaattctcagatgaataagcttttattgacaatggcagagtggtatcgctacgctgataaccgcaagaaggtggttaacttctgctcttatattataaggggttctttggcaaagttatatgctgcaaagtacaagctgcggtcaagggcaaaggtctataagattgcatcaaggaaccttagtcggccattgaaggataagaaaggacagtcaccagagtatcacaatcttctgagaatgggccttgtggactcaattgatggtcttcagtatacaaggatgtcgatggttcctgatcctgattatacgctgttacctagtggatggcggccagaccatgagaagattttgctggagtatataaagctcacagatcaacaaatgatggaggagcagcgagcttgcattagagaggaggggcttataacaccacaagattatatttcaatgcttgtatggggctacaagaaaaatgcagtgttacttccttcttcaaaagatagagatgcccatggatccacggaagacctttgttcagatgctgatgaattgggtgaaaaagaactaggaaatgagggctgtcagggtcctccaaagtttgctgagatgtcatgagtattggtgatctctgtaaacttcccaagaaacatttgactggatggttggttggtaacattgaattacacaaaaccaaatgcctcactgcttaacgctcaaggagatgacagctgcctcggccaagtaaattgatgatctctttggtctttgctgaccgggttcacagtggcctaggcagatggctgcttcctgctcaagagacaataattgtgcagctgcatcagtcaagtacattccttaatgctgacttgctgatggccatggtgaattctgtctagggtgctcaaacatgagcttggacccagcataacattcatgaaactattggagattacattttggtgtcaaatcatgtgccacatgcagagctaggtgctcttatgtcagtcctgatgttttgtaagattttaccaagcctatttatgcattttaaaagttacatagaaaaaagatcactgtgtacacattccatccaaatgtcctgcttgtgcaaattgttgactgtgtaatcttttatcagaaacagaccttgtgatgaagaggaaaagaagcttgatgttcgtatctttatgagccttaagatgtgttcagaacccctgattgctcatatctacttggactgc

SEQ ID NO: 1192 - DNA, 2753 bp, Brachypodium distachyon
gccgcgccgccgtggccgcctccgctatctacgtcgtccactttcccagccaaacccctccgccgccgacgcccttcgcgagggttttagccacagatgcctccgcctcgccacgcactcctctcctccctcctccgcctcccccgcgcctcctcctccctcgccttccacccaccgcggccgcctcccacgcgccgccaccagttcgtcgcggaccccaacgctgccgcgagccgaagcggggtcggcgtcggcggcaaccccttggacccggcgcagctcctccgggacgaccccgtgtccatcaccgcgtcgctttgggtttcctctttccgcgccgccgccacctcaccggaagacgccgcgcctccgcctccgccgccctcgctgtcgcccttcctaacgcgcctggagctctgggtgctcgcctaccagaaggcctacgccgacgacacaggctcctacctgccccgctcctccatcccagcctccacgctcgcctccctcctcacgctccgcaacgccgtcatcgacgcccgcttccgtttcggcaaccgcctcaccccctacctccagtccccgcgcgccgccgcgaacccggaccccgccacgctctccaagcgcaagctccgggccctcctcaccaccccggggccggccccattccaggaccgcgtcgtgcaggagctgctcctgctgctgctcgagcctgtctacgaggcgcggttctcgcccaagtccttcgccttccgccctgggagatccccgcatgccgccctccgtagcatccgtcggacctgggcgccctacctctggtacatcaagggagacctatctccgctgctcgactcccctgaccctgcacttgtggttggtgcgctcatccgtgatgtgcgtgacaagaaagtcgtcgatttgatccgctcggcattactcaccccagtggtgactgggaggccaggtgatgaagatgcatcgaagaaaaagaagaagaggaagtaccagaaaaagaaggttctgccggagggggagccgaagcctgatccctactggttgcagacgttctttgggtttgcaccagaggaagcgctgacacagccggattgggggcattgtggggtgcttagcccgttgcttgctaatgtgtgtctggatgaatttgataaatggatggatgagaagattaaggagttctacaagccttccaaatcagatgttgtgggaggcgaggacggtgttgagcaggggaatacatcatggccagaatttgttcccacgagtgggcctgacaaaacaaggaaggtagactacattcggtttggcgggcatttcttgattggagtgagggggcctagggccgacgccgcaattatccgaaagcagcttgttgagttttgtgaccagcggttcaggatcaagcttgacaatgagagcctcccaattgagcacatcactaaagggatcatgttccttgatcatgtgctgtgtcgtcgtgttgtgtacccaacccttcgttacacagccactggaggcaagatcatcagtgagaagggggttgggactctgctctcagtgacagccagtttgaagcagtgcatcaagcagttccggaagctagagtttttaaagggagatcgtgaaccagacccacagccatgcttccggatgttccatgccacacaatctcacactaactcacaaatgaataaacttctgttgacgatggctgaatggtatcgctatgctgataaccgcaagaagatcgtcaacttttgctcttacattataagggggtcgttggctaagttatatgctgctaagtataaactgcggtcaagagcaaaggtctacaaaattgcatcaaggaatcttagtcgaccattgaaggataagaaagggcagtcgccagagtaccacaatttgctgagaatgggtcttgtcgactcaattgatggacttcagtatacaaggatgtccatggttcctgatcctgactacacaccgttaccaagcgggtggcgcccagaccacgagaagtttttgctggagtatataaagctcacagatcaacagacactggaagagcaacgaagttgcattagagaggagggacttataacaccacaggaccagatttcaatgcttgtatggagctacaagaaaaatgcagttttactaccttcttcaaaagagagtgatgtccaaggatccatagaagaccttggttcagatacagatgaaatgaataacaaggagctaggacatgaggggcatcagggcttttcacaacctgctgaaatgtcatgagtctcagtgatttctgtaaaatccccagggagcaattaacttgaaaatttgtcggtgccactgaatttacaggaggccaactcactattggactactaagactggtgtaaatgtgtaattctgtggaatttctagcattttgctggctggttcataaccgcctagctagatggttacttcctactcaaggacattatatatcatgcggttctatccgtgaagaccatttcttaatgctcaggagtgatgcatgaacatgaccttcaacccaagatgcaattccagggaattagtgaaaaattctcattatgctgccaaacagtgcatctgctgcaagggcagctgctcatatcagggactaagttgggtctttcttgatacttcggccgtgctctataatataattagaagagagcaagagagaatagaagtgcaggtcaaagcac

SEQ ID NO: 1193 - DNA, 2785 bp, Hordeum vulgare
cccgcccccgcctccgcccgatgcctcagcctcaccgcgcgctcctctcctccctcctccgcatccgcgcttgctcctcccttgcccaccgcccaccgcggccgccgacgccctccccgcgccgccaccagttcgtcgctgaccccaacgccgccgccggcacgggacgaggcagcgtcggcggcaaccccttggaccccacccagctcctccgcgacgacccggtgtccatcaccgcgtcgttgtgggtctcctccttccgcgccgccgcgcctgacgacgccgcccccccgccgccgccgccgctggctcccttcctcactcgcctcgagctctgggtcctcgcctaccagaaggcgtacgccgacgagaccggctcctacctaccccgctcctccatccccgcctccacgcttacctccatcctcacgctccgcaacgccgtcatcgactcccgattccgcttcggcaaccgcctcacaccctacctccactccccgcgcgcagcggcggccccggaccccgctaccctctccaagcgcaagctccgcgccctcctcaccaccccgggcccggcccccttccaggaccgcgtcgtgcaagaactgctcctgctgctgctcgaaccagtgtatgaggcgcggttctcgcccaagtccttcgccttccggcctgggcgatccccgcatgccgcgctccgtagcatccgccggagctgggcgccctacctctggtacatcaagggagacctctccccgctgcttgattctcccgaccctgcgctcgtggttggcgcgctcattcgtgatgtgcgtgacaagaaagtcgtcgatttagtccgctcggcgttgcttactccagaagtgaccgcgaggccaggtgatgatgatgcatcaaagaagaagaagaagaggaagtaccagaaaaagaaggtgctgccggaaggggagccgaagcctgacccctactggttgcagacattctttgggtttgcaccagaggaggctctgactcagcctgattgggggcattgtggggtgctgagcccgttgcttgccaatgtctgtctggatgagtttgataaatggatggacgagaagattaaggagttctacaagccgtccaagtcggatgtcgtcggaggggaggatggcatcgagcaggggaatacatcatggccggagtttgtacccacgagtgggcctgacaaaacaaggaaggtggactatattcggtttggcgggcatttcttgattggggtcagggggcctagggctgatgctgcagtgatccgaaagcagctcattgaattttgtgatcagcggttcaggatcaagcttgacaatgagaccctcccaattgaacacatcactaaaggtatcatgtttcttgatcatgtcttgtgtcgtcgtgtcgtgtacccaaccctccgttatacggccactggaggcaagatcattagcgagaagggggttggtactctgctctcggttacagccagtttgaagcagtgcatcaggcagttccggaagctagagtttttaaagggagaccgtgagccagacccacagccatgtttccggatgttccatgccacgcaagctcacactaactcgcagatgaataagcttttaactacgatggcagagtggtatcgctatgctgataaccgcaaaaaggttgtcaacttttgctcgtacattataaggggttccttggcaaagttatatgctgccaagtataagctgcggtcaagggcaaaggtttacaagattgcatcaaggaatcttagtcgaccattgaaggataagaaagggcagtcaccagagtacaccaatttgctgagaatgggtcttgtggactcagttgatggacttcagtatacaaggatgtcaatggttcctgatcctgactatacaccattaccaagcgggtggcgcccagaccacgagaagtttttgctggaatatataaagctcacagatcaacaaacactggaagagcaacggagttgcattagagaggaggggcttataacaccacaggaccacatttcaatgcttgtatggagctacaaaaaaaatgcagttttactaccttcttcaaaagagagtgatgtccaagaatccacagaagacctcggttcagatatagatgaattgaataacaaggagctagggcatggaggccatcagggttttccacaacctactgaaatgtcttgagtgtcaataacttctgtaaaatcaccaaggattaattacgataacagttagttgctgccctggatttacaagcgaccaactctccgatggactacaaagattatgtaaatgtgtactactgtcatgcagattctagcaatttgctggctggttcataactgcctagctagatggttacttcctgctcaaggacataacatatcatgcggctctatctttcaagatcattttcaaatgctcaggacatggtgcaagaatatgaaaaaacccaggatcatcttgcttccaaacagtgcgtctgcatcatggctagctgctcatacaccattcatgtctaatagtaagacttctatcaagcctatgtatttaaagttatgtaggaaatttattgaacacacattctgtgagaggatatcctgcttgttcagatggccatctgtacaatcttttatcaaatacagagctttctgaagttactactaaaggataataaatttccttggccttgtgtaaggttgctcatgttaacttgtttccctgatattgtgaagtagctcact

SEQ ID NO: 1194 - DNA, 5137 bp, Oryza sativa
ggcgcgagaaaacacacaaaaccccacgacgacgacgacggcggccaccgcgagggtttagctttccttctcctccccgatgcctccgcctccgcctcgccgcgcgctcctcgcccccctcctccgcctccgcgccttctcctcctcctcctcctccctcgcccaccaccccccgttgccgcctcccccgcgccgccaccagttcgtcgccgccgacgccatcaccggccagggcggcggcggcaatccactggacccggcgcagctcctccgcgacgatccggtcgccataaccgcatcgctgtgggtctcctccttccgcccgcagccgaccgccgcagcgccaccgccgccgtcgctgtcgccgttcctgtcgcgcctcgagctctgggtgctcgcgtaccagaaggcctacgccgacgagacgggctcctacctgccccgctcctccatcccggcctccacgctctcctccctcctcgcgctccgcaacgccgtcctcgacgcccgcttccgcttcggcaaccgcctcacccccttcctccgctccccgcgcgccgccgccgcggcgcaggaccccgccacgctctccaagcgcaagctccgcgccctcctcaccaccccggggccggccccgttccaggaccgcgtcgtgcaggagctcctcctcctcctgctcgagcccgtctacgaggcgaggttctcacccaagtccttcgcctttcgccccggccgatctccgcacgccgccatccgcaccatccgccgcagcttcgcgccctacctctggtacatcaagggtgacctctccccgctcctccactccccggaccctgccctggtcgtcggcgcgcttatccgcgatgtgcgcgacaagaaggtcgttgatttggttcgttcggcattgctcaccccacctgtgaccgcgaggcccggcgatgaagatgcggcgaagaagaagaagaagaggaagtaccagaagaagaaggtgcttccagagggagagccgaagcctgacccctactggttacagacattctttgggtttgcgccggaggaggcactcacccagcctgattgggggcattgtggagtgctgagcccattgcttgccaatgtgtgcttagatgagcttgataaatggatggaggagaagattaaggaattgtacaggccgtccaagtcggatgttgtgggaggggaggatggagttgagcaggggaacacttcatggccagagtttgtccccacgagcggccctgacaaaacgaggaaggtggactacattcgattcggtggccatttcttaatcggggtgaggggtccgagggcagatgcagcagtgctccgaaaacagcttgttgaattctgcgaccagcggttcaggatcaagcttgacaacgagagcctcccgatcgagcatatcactaaagggatcatgttccttgatcatgtgctgtgtcgtcgtgttgtgtacccgactctccgttacacagccactggaggcaagatcatcagcgagaagggggttgggactctgctctctgtgacagccagtttgaagcagtgcatcaagcagttccggaagcttgagtttttaaagggggaccgtgaaccagacccacaaccgtgcttcaggatgttccatgccacacaagctcacacaaacgcgcagatgaataagctcttgctgacaatggcagaatggtatcgttatgctgataaccgcaagaaggttgtcaacttctgctcatacattataagggggtccttggcaaagttatatgctgccaaatacaaattgaggtcgagggcaaaggtctacaagattgcttcaaggaatcttagtcgaccattgaaggataagaaagggcagtcgccggagtaccacaatctgctgagaatgggtcttgtggactcaattgatggacttcagtatacacggatgtcgatggttcctgatcctgattacacaccattaccaagtggatggcgccctgaccatgaaaagattttgctggagtatataaagctcacagatcaacaaaccctggatgagcagcgaagctgcattagggaggaaggacttataactccacaggactacatttcaatgcttgtatggagctacaagaaaaatgcagttttactaccttcgttcaaagagaatgatcacaaaggatccacagaggacttgggttcagatacagatgaattgggtgatgaggaaataggaaatctggaccatgtcgattccccaaaggttgctgaaatgccatgagtgttgaattgatgaaaatgactactactctcatactctgaaggggcagttaacaagatagctgactgatgctgctggagttgcaagaaatcaactaactcgtggtgaacataaactatggtatagagctgtaatgtgcctgtcaaatctcttgcaatcagctgggctggttcctaagtgcctaactagatgtctgattcctactcagggacatcaaattttgtgcagcttcaacttcaacaatatttctcaatactcaggattatattggatgcttgctgcggtgagaaagaagccagaatggacattcagaggatcaaactttgctgccagactgtgcatctgcatgcagaaccagctgcttaccgccaagcttatattttagtaagactagcggccttaccaatcctatttatacatctccagcgcatttggaaaaatcacagtgtacacattctgcccaaacgtcctgttcgtgcaattttctactcatctgtagaatgttttacagaaagcagaggtcacagaatttacttatagatgatactaagtagcatccttgctttttggtagatttgcttatctattgctttttataccatattgtggtctaattaggctgattggatgcttggtcagttattcttaaagatatgactggaaactctatctaatagaattgtatttgttctatctgtttgttcttatgtttataacatttgtctttttaagcatggaatactatagtcaacagtatgttgtttgtaattagctataaatttggaaactccaaatgacaatttcttcaatggttcagtagagagttagcactgaaagtttcactctgctaacaatcatttcacattttattgcttttatttgtttccattgggcatgtgtaatgtgggatgcaccttatgttggaagacagatattagctttgacttctgcacagaaattacagttactttagtaaattaacagagagaaaataaacaaacaggcttgtatgacacagataacggcactgattgcttctgctatggtttgatctttacatttgacatgttgcctgactggttctctcaacatatgactttttatttagagcatgatctacatctgtttttttttataatatcacattgcttgtcctctgcattcttacccctgttacatctaattttgtgaaaatgttttctattgcattagaggtcgggctgtatttatagttgtagtgctggatgcaactgtagctacccatccttgcatgtttctcttcagttttcatgatgaagtttgtgttattaataacaccttgccgactttccgtcagcacagaatagatatgaaccatttctccaccatgttctgaaacaagggaacccaagagaagttgaaatcaagcacatgatgtacagctaatgttaaagcttcttttgcaatgatagttagctagcgttgtggatattaggaatgaggtgatgatggaaagacttattccaaatgatcaggaactctttgatgctagcaccaacctttcctcgaaccaaactctaagtgtggatctggatgtgaaacttgggtcccatcgaccacagtgaggtgctttttccgacagagacaagcctatgttcatgctcttgcaagtcacagaaggagaaggctgagaagcaaaagaagagggtgacaatgcattgaggaaactggactggtagctgtgttgtcatcgtcatcggaccaccttgttgccatctttcgcactgaaagaaagccccagttcaactccatacatgtaggatacaacatcactcgaagatgtggggactagctcagttctgttggacctacggctatacgttgccatcgacgaacgcatgctctacgtgctgtgattcatgtcgcccttgaaggtttcccgcacgaaaatgtggtgaaatttcgcccaattcctgaaggaacagaaaagcgactgacgggaatgcactttggggtaggcaatttgatggattttgaccaaaaaaaaatttaagttggtggcatgcatgcaaggtcacgcgcctcggtcatgtgagaaagcgcggttcctacaaggaaaggaaaggcgtttgttctgtgtaaaaagaccagaaaagagcacgtacatcgtgtggtgtagcagagcagatcgtagttcattggtaaagatggaatttggcagccaatgacgcttaaggtgaagagaatcctagtgcagtttgcgatacagttacatacacatgttctttatccatgggtaattgagtagtaggagcagaaatagctttttcataggtttataagatatggattttaggagatgaaatatgccacgcgcggcaaggcgccatgatcgcccaaagcatgcgttcatcatctcgtctcaacgtgactgatgccatggctattcccccgaggtaggcgatcgatcgatcgagcactaacccagccgcccattgttggaccatcaagctcatcgaatcttcgtttccggcacatgtatagctcctcatattgtacgatttctattgcgtttcgccacatatatagctccatgttgtctcaagagctagaaatcaactctgtttaatacacactgctccaggctaccactagtagcaggtaagcagctcacggctaaataaacgctggggtttattttgggaccatttccaggagaagatagtgccggtgtgggtggaagtgtcacatcaatttggatcagccgcaacatgattcaacaattcaccaattcacggaaatcgaccgatcggtgaatgtgtatcccttgtatataagcagtgccgtgcagcttaatttagccacgacctacctcag

SEQ ID NO: 1195 - DNA, 1255 bp, Sorghum bicolor
tctccgcgagcagatataaacccattcctccccttcctccaactcctcttcgtctcctccaccccccgctccctctaccaccagcaccgcgggaccgcttgctcgtctcgtcgcagaccgtccccgagccggaaccctagcggctgccattgcccgcgcgccgcgcgcccgatggacggcgggggctccgggccggcgcccaacgccgcgcgcaccgcggacgaggtcttccgcgactacaaagcccgccgcgccggcatgatcaaggcgctcaccaccgatgtggagaggttcttcaagctctgtgaccccgaaaaggagaacttgtgcctttatggctatcccaatgagacgtgggaggtgaccttgccagctgaggaagtgcccccagagatccctgaaccagcattaggaatcaactttgctagggatggcatgaatgagaaggactggctggcgctagttgcagtccacagcgattcctggttactctctgttgcattctactttggtgcacggtttggatttgacagagaagctaggaggcgactctttagcatgataaacaacatgcccacaatatttgaggtagtgacaggagcagtcaagaagcaggcaaaggagaagacacctaacagtagcagcaagagcaacaagcctagttcaaaagtgcagtcaagagcagagtctcgttcaaaggctaaggttcccaaagatgaagaagagagcggcgatgacgatggggatgaggaggcggaggagcacgacaacaccctgtgtggaacctgcggaaccaatgacggcaaggaccagttctggatctgctgcgataactgcgagaagtggtaccatgggaagtgcgtcaagatcacacctgcccgagctgagcacatcaagcagtacaagtgcccagactgcaccaacaagagggccagggcatgagcgacgagcatcgcatcggcgaccttgctaggaaggaagaaagcaccctcctggcgtcaaagatccctagatatggcgtagctccctagtctgtaagcctgcattttcattcatggttattattattatatctgttcattagctgttcgacctagcagtgtcttaaaacgtgacatgtctcctgtgctgagcgttgacatgggccctcctccctctagtctgtaaacgctgtcactgaaggtacctctcaactgaccatttcttcatattgttggtgtcgtgcaatgagtagtggctgtagtctttgttccca

SEQ ID NO: 1196 - DNA, 1158 bp, Saccharum officinarum
gaagtaaccggcccgaaatacccgggtggaccaacgcgtccgccccccgctccgtctaccaccaccaccgcgggaccgctttgctcgtctcgccgcagcccgtccccgagccggaaccctagcggctgccattgcccacgcgccgcgcgcccgatggacggcgggggctccgggccggcgcccaacgccgcgcgcaccgcggacgaggtcttccgcgactacaaagcccgccgcgccggcatgatcaaggcgctcaccaccgatgtggagaggttcttcaagctctgtgaccccgaaaaggagaacttgtgcctttatggctatcccaatgagacgtgggaggtgaccttaccagctgaggaagtgcccccagagatccctgaaccagcattaggaatcaactttgctagggatggcatgaatgagaaggactggctggcgctagttgcagtccacagtgattcctggttactgtctgttgcattctactttggtgcacggtttggatttgacagagaagctaggaggcgactctttagcatgataaacaacatgcccacaatatttgaggtggtgacaggagcggtcaagaagcaggcgaaggagaagacacctaacagtagcagcaagagcaacaagcctagttcaaaagtgcagtcaagagcagagtctcgttcaaaggctaaggttcccaaagacgaagaagagagcggtgatgatgatggcgatgaggaggcggaagagcacgacaacaccctgtgtggaacctgcggaaccaacgacggcaaagaccagttctggatctgctgcgataactgcgagaagtggtaccatgggaagtgcgtgaagatcacgcccgcccgagctgagcatatcaagcagtacaagtgcccagactgcaccaacaagagggccagggcgtgagcgacgagcatgggcgaccttgctaggaaggaagaaaccacctcctggcgttaagatcccagtctgtaagcctgcattttcattcatggttattattatatctgttgattagctgttcgacctagcagtgtctaaaaccttgcttgtctcctgtgctgagtgttgacatgggacctcctccctctagtctgtaaacgttgtcactgaaggtacctctcaactgaccatttcttc

SEQ ID NO: 1197 - DNA, 2112 bp, Panicum virgatum
cggcgcggcggcgagctgcagctccattggatccccgtcgagcacgggcggcgtcgagctccgcccttccgcgcgcggcggcgtggatctgctgtggcgccgggccttcccctctttccctccctcccccatttccgtgcggacggaggtcgggcgttgtgccttgggcggtggcggagggcgccgcgggcggtggcggcgtccagcagcggcctgccagcgcgatcggggcccccaaccgtcggcgtcgcagtgtccagccgcattcccactctttctctcctctttatctccggccggaggctgcgcgcggccgctgtccccttttctgcggacgcgaggagcctcgggctggcgctgcgaggagccagcagggcgtggcctcggccagcggcggcgaggagtgggccacggggaggatgggctcagccagccgccgaccgttgttcgccggatagacgggcacgattttttttatgacgtggccgcgctctcctggcttcttttggtgcggaaatcgtagatagagatttaggaatttcaagtttataaaaataaatgaaacataaccgtaaaaaaaaaccgagaccaccaagaaaacattaggaaaccctccaggtccaccgtggaccggttccaccggccgtagacgggcgcgccacggcgagggcgacggcagcggttttgggcccggtgccgagcacaacacacggatcaaataaaccgggcccaactcctggccgaaacgcccaggaaattccccgcaaagccctcagaaaaaaagtaaattccccgcaaggcaaatataaacccactccccccttctctcctccaactcctctcttcctccaccatccccccgtgttccctctagcaccgcctgctcgtctcgccgcgacccgcggccgccctcccccgcgccggaaccctagcgaccgccattgcccccagcgcgccgcgcccgatggacggcgggggctccggggcggcgccgtacgcggcgcgcaccgcggaggaggtcttccgcgactaccgcgcccgccgcgccggcatgatcaaggccctcaccaccgatgtggacaagttcttcaagctctgcgaccccgaaaaggagaacctgtgcctttatgggtatcccaatgagacgtgggaggttaccttgccagctgaggaggtgcccccagagatccctgaaccagcattaggaatcaactttgctagggatggtatgaatgagaaggactggctggcgctagttgcagttcacagcgattcctggttactgtctgttgcattctactttggtgcccggtttgggtttgacaaagaagctaggaagcgactctttagcatgataaacaacatgcctacaatatttgaggtagtgacaggatcggccaagaagcagacaaaggagaagacgcctaacagtagcagcaagagcaacaggcctagttcaaaagtgcagtcaagagctgagtctcgttcaaaggccaaggtccccaaagatgaagaagagagtggcgacgatgatggggatgaggcggaagagcacgacaacaccctgtgtggaacttgcggaaccaacgatggcaaggaccagttctggatctgctgtgataactgcgagaagtggtaccatggcaagtgcgtcaagatcacgcccgcccgagctgagcatatcaagcagtacaagtgcccggattgcaccaacaagagggccagggcatgagtgaccgagcagcgagcatcggtggacccatgttaggaggaaatcatctcctggcgccgagatcatccctagatatggcgtagtttcctagcctgtattatggctatatctgttgattagttgttcgacctagctgtgtctaaaacgtggcatgtctcttgttgagttgttgacgtgagcctctctcttctctctagtatgtaaacgttgccactgaagctacctcccaactgaccatttcttcattattggtgccgtgcacttggtagtagtgactagtgactagtttctgttcccagttcccagcacatctgcttgtgcgtagccaggatttgtactggttctgagttgctgaaatctgtatcttagtgtgcatgtat

SEQ ID NO: 1198 - DNA, 1342 bp, Setaria italica
gtctgcctcctctccatccccccgttccctccaccaccgccaccaccaccggccttgctcgtctcgcggcgacccgcggccgcgctcccccgcgccggaaccctagcggccgccattgcccccgcgccgcgcgctcgatggacggagggggctctggggcggcgccgaacgccgcgcgcaccgctgaggaggtcttccgcgactaccgcgcccgccgcgccggcatgatcaaggccctcaccaccgatgtggacaagttcttcaagctctgcgaccccgaaaaggagaacttgtgcctttatgggtatcccaatgagacgtgggaggtgaccttgccagctgaggaagtgcccccagagatccctgaaccagcattaggaatcaactttgctagggatggcatgaacgagaaggactggctggcgctagttgcagttcacagtgattcctggctactgtctgtagcattctactttggtgcccggtttgggtttgacaaagaagctaggaggcgactcttcagcatgataaacaacatgcctacaatatttgaggtagtgacaggatcggccaagaaacagacgaaggagaagacacctaacagtagcagcaagagcaacaagcctagttcaaaagtgcagtcaagagctgaggctcgttcgaaggccaaggtccccaaagatgaagaagagagcggtgacgacgatggggacgaggaggcggaagagcacgacaacaccctgtgcgggacctgcggaaccaacgacggcaaggaccagttctggatctgctgcgataactgcgagaagtggtaccacgggaagtgcgtcaagatcacgcccgcccgggccgagcacatcaagcagtacaagtgcccggactgcaccaacaagagggccagggtgtgaacgacgaccgagcaccccagcggccttttcaggaggaaaccatctcctggcgccgggatcatcccctagatatggcgtagtttcctagcctgtaaaacccgcgtttctatttatggttacatatctgttggttagttgttcgacctagctgtgtgtctctaaaacgtggcatgtcccctgtgttgagtgttgacgtgagcgtctctcttcctagtatgtaaacactggaggtacctctcaactgaccatttcttcattattcgtgcagtgcacttggtagtagtgactagtgactgtagtctctgttcccagttcccagcatgtctgcttgtgcgtaggtaggatttgaatagttcttgaattgctcaaatctgtatcttactgtgcaatatgttggtactacatgaatgttctacagatagcattcccgcggg

SEQ ID NO: 1199 - DNA, 1428 bp, Panicum virgatum
aaacatcaggaaaccctcctggtccaccgtggaccggttccaccggccgtagacgggcccaccgcggcgagggcgacggcagcggttttgggccccgtgcgagcacaacacacggatcaaataaaccgggcccaaatcctggccgaaacgcccaggaaattccccgcaaggcaaatataaacccactccccttcctccaactcctctcttcctccaccaccatccccaccgggttccctcgagcaccgcctgctcgtctcgcctcgcctcgccgcgacccgacgcggccgccctcccccgcgccggaaccctagcgaccgccattgcccccgcgtgccgcgcccgatggacggcgggggctccggggcggcgccgtacgcggcgcgcaccgcggaggaggtcttccgcgactaccgcgcccgccgcgccggcatgatcaaggccctcaccaccgatgtggacaagttcttcaagctctgcgaccccgaaaaggagaacttgtgcctttatgggtatcccaatgagacgtgggaggttaccttgccagctgaggaagtgcccccagagatcccggagccagcattaggcatcaactttgctagggatggcatgaatgagaaggactggctggcgctagttgcagttcacagcgattcctggttactgtctgttgcattctactttggtgcccggtttgggtttgacaaagaagctaggaggcgactctttagcatgataaacaacatgcctacaatatttgaggtagtgacaggaacaggatcggccaagaagcagacaaaggagaagacgcctaacagtagcagcaagagcaacaggcctagttcaaaagtgcagtcaagagctgagtctcgttcaaaggccaaggtccccaaagatggagaagagagtggcgacgatgatggggatgaggaggcggaagagcacgacaacaccctgtgtggaacttgcggaaccaacgatggcaaggaccagttctggatctgctgtgataactgcgagaagtggtaccatggcaagtgcgtcaagatcacgcccgcccgagctgagcatatcaagcagtacaagtgcccggattgcaccaacaagagggccagggcatgagtgaccgagcagcaagcatcggcgaacctgttaggaggaaatcatctcctggcgccgagatcatccctagatatggcgtagtttccctagcctgtaaaccagcgtttctatttatggctatatctgttgattagttgttcgacctagctgtgtgtctaaaacgtggcatgtctcttgtgtttgagttgttgacgtgaagcctctctctagtatgtaagcgttgtcactgaagctacctctcaactgaccatttcttcattattggtgccgtgcacttggtagtagtgactagtgactgtagtctct

SEQ ID NO: 1200 - DNA, 1156 bp, Zea mays
ctccgttccccgttccctcctctaccactggccccggcaccgcgggagcgccgaccgcctgctcgtctcgccgcagcccgtccctgtcggaaccctagcggccgccattgcccacgcgctgcgcgcccgatggacggcgggggctccgggccggcgcccaacgccgcgcacaccgcggaagaggtcttccgcgactacaaagcccgccgcgccggcatgatcaaggcactcaccaccgatgtggagaggttcttcaagctctgtgaccccgaaaaggagaacttgtgcctctatggctatcccgatgagacatgggaggttaccttgccagctgaggaagtgcccccagagatccctgaaccagcattaggaatcaactttgctagggatggcatgaatgagaaggactggctggcgctagttgcagtccacagtgattcctggttactatctgtcgcattctactttggtgcacggtttggatttgacagagaagctaggaggcggctctttagcctgataaacaacatgcccacgatatttgaggtggtgacgggagcagtcaagaagcagcaggcaaaggagaagacacctaacagtagcagcaagagcaacaagcctagttcaaaagtgcagtcaagagcagagtctcgatcgaaggctaaggtccccaaagacgaagaagagagcggtgacgacgacggggacgaggaggcggaggagcacgacaacaccctgtgtggaacctgcgggaccaacgacggcaaggaccagttctggatctgctgcgataactgtgagaagtggtaccatgggaagtgtgtcaagatcacgcccgcacgggccgagcatatcaagcagtacaagtgcccagactgcaccaacaagagggtcagggcgtgagcaaccgatgcgaccttgctaggaaggaaaggaagaaacgacctccttggcgccaagatatggcgtgtagttccctagtctgtaagcctgcatttttcatttatggttgttttatctgttgattagctgttcgacctagcattgtctaatgcgtggcatgtctcatgtgctgagtgttgacattggcatgggccccgccctctagtctgtaaacgttgtcactgaaggtacctctcggctgaccatttctcca

SEQ ID NO: 1201 - DNA, 1073 bp, Zea mays
gtttataaacccactcctccccttcccctgttccctctaccaccaccaccggcaccgcgggacagtctgctctcgtcccgccgcagcccgtccccgacccggaaccctagcgactgccattgcccacgcgccgctcgcccgatgaacggcgggggctctgggctggcgcccaacgccgcgcacaccgcggacgaggtcttccgcgactacaaaggccgccgcgccggcatgatcaaggccctcaccactgatgtggagaggttcttcaaactctgtgaccccgaaaaggagaacttgtgcctttatggctatcccgatgagacgtgggaggtgaccttgccagctgaggaagttccccctgagatccctgaaccagcattaggaatcaactttgctagggatggcatgaatgagaaagactggctggcgctagttgcagtccacagtgattcctggttactgtctgttgcattctactttggtgcacgctttggatttgacagagaaactaggaggcgactctttagcctgataaacaacatgcccacgatatttgaggtagtgacaggagcagccaagaagcaggcgaaggagaagacacctaatagtagcagcaagagcaacaggcctagttcaaaagtgcagtcaagagcagagtctcgttcaaaggctaaggtcccccaagacgaagaagagagcggtgatgacgatgaggatgaggaggcagacgagcacaacaataccttgtgtggaacttgcggaactaacgacagcaaggaccagttctggatctgttgtgataactgcgagaagtggtaccatgggaagtgtgtcaagatcacgccagctcgagctgagcatatcaagcagtacaagtgcccagactgcaccaacaagcgggccagggcatgagcggcaaacatcggcatcgggcgacctttgataggaaggaagaaaccacctcctggcttcaagatccctagatatggctgtctaaaacgtgccgtgtgtcttctgtgctgagtgttgacatggggcctcctccctccagcctgtaaacgctgtcactgaag

SEQ ID NO: 1202 - DNA, 1176 bp, Brachypodium distachyon
attcattccaaataaaacctcaccaccactcctgcgagtctgcgaccctgtcctgtcccgtcctccccttcctcgtgctcgcctccaccctcgcctctcgttccagcgccgccgccgccgccgcctcctcctcctccacgccggaaccctaaatggaccctggtgccggtgccggcgcgccgtacgcctcccgcacggcggaggaggtcttccgtgacttccgcggccgccgtgccggcatgatcaaggccctcacccaagaagttgagaagttctaccagctctgcgaccccgaaaaggagaacttgtgcctttatgggtaccctaatgaaacatgggaagtgaccttgccagctgaggaagtccccccagagattcctgaaccagcactaggaatcaactttgctagggatggcatgaacgagaaggattggttggcactagttgctgttcacagtgattcctggttgttgtctgtttcgttctacttcgcagcacggtttgggtttgacaaagaggcaaggaggcggctctttaacatgataaataacttgcctacaatatttgaagttgtgaccggggctgcaaagaaacaaaccaaggagaagggccccaacagtacgaacaagaacaataagccaagcacaaaaattccatcaagaccagagtctcattcaaaggccccgaaggtggtggctccccccaaggatgaagatgatagcggcgaagactacggagaagaagaggaggaagagcgcgacaataccttgtgtggaacttgtggaacaaacgatggcaaggatgagttctggatctgctgcgataactgtgagcggtggtaccatggaaaatgtgtgaagatcacgcctgctcgagctgagcatatcaagcactacaagtgcccagactgcagcaacaagagagctagggcataacaacgacaagcaccagcgggacttggaacggaaccagtgccagcgccaaatcgtcaatgtctgcagatatggcctagctttctagcttgtagacttatttttcatttcaatcgaacactgttgagttgattcactcttgatcctggcagttcttgttgctctgactctgagttgtcttgaaaccattggttggtgtagtattgccagcttcaatcttctcttcagcggaaatgtcaaaggc

SEQ ID NO: 1203 - DNA, 1273 bp, Avena sativa
cctccacctccatctccatctccaggctgcccctttctatttctctctccaagccgctcccaccaccacctcctactccccgtcgccgcccctgcctccacgctcgcccgaaccctagacgccattgcccacgcccccatggaaggtgccggcgccggagcggcgtacaccgcgcgcacggcggaggaggtcttccgcgaccttcgcggccgccgcgccggcatgatcagggccctcaccgacgatgtggacaagtttttcaagctctgcgaccctgaaaaggagaacttgtgcctttatggatatcccaatgagacatgggaagtgaccttgccagctgaggaagtacccccagagatccctgagccagcattaggaatcaactttgctagggatggaatgaatgagaaggattggttggcgctagttgcagttcacagtgattcctggctactgtccgtagcattctactttggagcccgctttgggtttgacaaagaaactaggaggcggctcttcaacatgataaacaacttgcccactatttatgaggtagtgacaggagcagccaagagacagtcgaaggagaagacacccaacaccaacagtagtagcaagagcaacaagcctagttcgaaagtgcagtcgagggcggctgaacctcgcgcgaaggccaagctgtcagcccccaaggatgaagaagaggatagcggcgatgacggcggcgatgacgaggaagaagagcacgacaacaccctgtgtgggacctgcgggacgaacgacggcaaggacgaattctggatctgctgcgacaactgcgagaagtggtaccacgggaagtgcgtcaagatcacccccgcccgggcggagcacatcaagcagtaccggtgcccagagtgcggcaacggcggcagcaacaagaggatcaagacatgagcagcgacaaaacgtctcgttggaggaaagacgctttgctgcaaggcaaaccacctttgttcggagcgtcatggtcctctagatatcatcatcatcaattatttatggcttagtttcctagagtctgtaagcgtgtttttctgtttccaaaacttgagattttcgtgtgttattgacatcatcatcatcagactttctagcctgtaaacgttgtcggctcaggggtagtactgccaactgaccatttcttcattattcctggaccaatgtagttcgtgactctgttacctgaaatttgcactgatcttgaattgctgcaatctgtcttaatctcttc

SEQ ID NO: 1204 - DNA, 1157 bp, Triticum aestivum
accctaaatggacgccggcgccggcgccggcgctggcgcgccctacgcctcccgcacggcggaggaggtcttccgcgacttccgcggccgccgcgccggcatgatcaaggccctcacccaagaagtggacaagttctaccagctctgcgaccccgaaaaggagaacttgtgcctttatgggtaccctaatgaaacatgggaagtgacgttgcctgctgaggaagttcccccagagattcctgaaccagcacttggaatcaactttgctagggatggcatgaacgagaaggattggttggcactagttgctgttcacagtgattcctggttgttggctgtttcattctacttcgcggcacggtttggatttgacaaagaggcaaggaggcgactcttcaacatgataaataacctgcctacaatatttgaagtcgtgactggggctgcaaagaagcagatcaaggagaaggcccccaacagtacgcacaagagcaataataagccaagcatgaaaacttattcaaagcctgagtcccaatcaaaggccccaaagatagcagcgcccccaaaggatgaagatgagagcggcgaggactatggagaagaagaggaggaagagcgcgacaacaccttgtgtggtacctgtggaacaaacgacggcaaggacgagttctggatctgctgcgacaactgcgagcggtggtatcatgggaaatgcgtcaagatcacgcctgctcgagccgagcatatcaagcactacaagtgcccagactgcagcaacaagagggcgagggcgtaactgcgacaaaccagcaccagcagggcggcaggactcggaatggaaccagcgccagcaccaaatcgtcattgtcgatgcctgctgcagcctgcagatatggcctagctctctagctcatcatagactcgcttttcgtttcagtcgaacactgttgattacccttgaccctgcagttcgttcatgttggtccgactcttgacttgtgtgtgtgtttaaactgttggttggtgtagtagtgtaccagcttggatctcttcagcggacatgtcaaaggcgttcttcaactgaaaggacccgaaagctgacaccattgtttctggctttgttagcctcgtctcgttcctgggcatatatatat

SEQ ID NO: 1205 - DNA, 1230 bp, Aegilops tauschii
ctctgtgtgtcctccacctcctcgcgctctcgcctcccttcccaacaccctctctcgccgccgccgccgccgccccctcgccggaaccctaaatggacgccgccggcgccggcgccggcgcgccctacgcctcccgcacggcggaggaggtcttccgcgacttccgcggccgccgcgccggcatgatcaaggccctcacccaagaagtggacaagttctaccagctctgcgaccccgaaaaggagaacttgtgcctttatgggtaccctaatgaaacatgggaagtgacgttgcctgctgaggaagtccccccagagattcctgaaccagcacttggaatcaactttgctagggatggcatgaacgagaaggattggctggcactagttgctgttcacagtgattcctggttgttggctgtttcattctacttcgcggcacggtttggatttgacaaagaggcaaggaggcgactcttcaacatgataaataacctgcctacaatatttgaagtcgtgactggggctgcaaagaagcagatcaaggagaaggcccccaacagtacgcacaaaagcaataataagccaagcatgaaaacttattcaaagcctgagtcccagtcaaaggccccaaagatagcagcgcccccaaaggatgaagatgagagcggcgaggactatggagaagaagaggaggaagagcgcgacaacaccttgtgtggtacctgtggaacaaacgacggcaaggacgagttctggatctgctgcgacaactgcgagcggtggtatcatgggaaatgcgtcaagatcacgcctgctcgagccgagcacatcaagcactacaagtgcccagactgcagcaacaagagggcgagggcgtaacggcgacaaacagcaccagcagggcggcaggactcggaatggaaccagcgccagcaccaaatcgtcatcgtcgatgcctgctgcagcctgcagatatggcctagctgtctagctcatcatagactcgcctttcgtttcagtcgaacactgttgattcacccttgaccctgcagttcgttcatgttggtccgactcttcacttgtgtgttttaaaccgttggttggttggtgtagtagtgttgtaccagcttcgatctcttcagcggacatgtcgaagacgttcttcaactgaaaggacccgaaagctgacaccattgtttctggctttgttagcctcgtctcgttcctg

SEQ ID NO: 1206 - DNA, 1314 bp, Secale cereale
gactcctcccggaagcgaacgcaaatctccttcccgaataaaaaacctcaccactcctgcggacagcgagcctgcggccctgtctctctgtgtgtgtcctccacctcctcgcgctctcgcctccctcccaacactctctcgccgccgccgccgccgccccctcgccggaaccctaaatggacgccggcgccggcgccggcgcgccctacgcctcccgcacggcggaggaggtcttccgcgacttccgcggccgccgcgccggcatgatcaaggccctcacccaagaagtggacaagttctaccagctctgtgaccccgaaaaggagaacttgtgcctttatgggtaccctaatgaaacatgggaagtgacgttgccagctgaggaagtccccccagagattcctgaaccagcacttggaatcaactttgctagggatggcatgaacgagaaggattggttggcactagttgctgttcacagtgattcctggttgttggctgtttcattctacttcgcagcacgatttggatttgacaaagaggcgaggaggcgactcttcaacatgataaataacctgcctaccatatttgaagtcgtgactggggctgcaaagaagcagatcaaggagaagggccccaacagtacacacaagagcaataataagccaagcatgaagactcattcaaggcctgagtcccagtcaaaggccccaaagatggcagcgcccccaaaggatgaagatgagagcggcgaggactatggagaagaagaggaggaagagcgtgacaacaccttgtgtggtacctgtggaacaaacgacggcaaggatgagttctggatctgctgcgacaactgcgagcggtggtatcatgggaagtgcgtcaagatcacgcctgctcgagccgagcatatcaagcactacaagtgcccagactgcagcaacaagagggcgagggcgtaacggcgacaaacagcaccagcagggcggcaggactcggaatggaaccagcgccagcaccaaatcgtcgacgtctgctgcagcctgcagatatggcctagctctctagctcatagactcgcttttcgtttcagtcaaacactgttaattcacccttgaccctgcagttcgttcatgttgtccgactcttgacttgtgtgttttaaaccgttggttggttggtgtagtagtgttgtaccagcttcgatctcttcagcggacatgtcaaagacgttcttcaactgaaaggacccgaaagctgacaccattgtttctggccttgttagcctcgtctcgttgctgggcatatatatat

SEQ ID NO: 1207 - DNA, 1079 bp, Avena sativa
ccggaaccctaaatggacgccggtgccggcgccggcgccggcgcgccctacgcctcccgcacggcggaggaggtcttccgcgacttccgcggccgccgcgccggcatgatcaaggccctcaccctcgaagtcgacaagttctatcagctctgcgaccccgaaaaggagaacttgtgcctttatgggtaccctaatgaaacatgggaagtgaccttgccagctgaggaagttcccccagagattcctgaaccagcactaggaatcaactttgcaagggatggcatgaatgagaaggattggttggcactagttgctgttcacagtgattcttggttattggctgtttcgttctacttcgcagcacggtttgggtttgacaaagagtcaaggcgacgacttttcaacatgataaataacctgcctacaatatttgaagttgtgactggggctgcaaagaaacagaccaaggagaagccccccaacagtacaaccaagagcaataagccaagcatgaaaatgccatcaaggcctgagtcccattcaaaggcccctaagatgccagctcccccgaaggatgaagatgagagtggcgaggagtatggagaagaggaggaggaagagcgcgacaataccttgtgtgggacttgtggaacaaacgatggcaaggatgagttctggatttgctgcgataactgcgagcggtggtatcatgggaaatgcgtcaagatcacgcctgctcgagcggagcatatcaagcactacaagtgcccagactgcagcaacaagagggcgagggcataacgccaacaagcatcagcaggactcggaacggaaccagcgccgccagcgctaacgccaaatcgtcagtgcctgcagacatggcctagctttctagcttgtagacccgcttttcgtttcaatcgaacagtgttaattcactcttgaccctgcagttcatgttgctcttgactgttgagttgtgtttaaaccgttggtcggtgtagtaattgcaagcttcgatctcttcagcgggcatgtcaaagacgttcttcaattgagaagacctgaaagctagaact

SEQ ID NO: 1208 - DNA, 2608 bp, Aegilops tauschii
gaaccctagacgccattgcccacgcccccatggacggcgccggcgcaggaggggcgtacgtcgcgcgcacggcggaggaggtcttccgcgacctccgcggccgccgcgccggcatgatcaaggccctcaccgaagatgtggacaagttcttcaagctctgcgaccctgaaaaggagaacttgtgcctttatggatatcccaatgagacatgggaagtgaccttgccagctgaggaagtgcccccagagatccctgaaccagcattaggaatcaacttcgcaagggatggaatgaatgagaaggattggttggcgctagttgcagttcacagtgattcctggttactgtccgtcgcattctactttggagcccgctttggcttcgacaaagagaataggaggcgactgttcaacatgataaacaacttgcccactatatacgaggtagtgacaggaatcgccaagaagcagtccaaggaaaagactcccaacagcagtagcaagagcagcaagcccagtatgaaagtgctctcgagagccgagccccgtgcaaaggccaaggtgccagcccccaaggacgaggaggagagcggcgaggacgagggcgacgaggaggaggaggagcacgacaacaccctgtgcgggacctgcggcaccaacgacggcaaggacgagttctggatctgctgcgacaactgcgagaagtggtaccacggcaagtgcgtcaagatcacgcccgcccgggcggagcacatcaagcactaccggtgcccggagtgcaccaacggcggctccaacagcaacaagagggtcaagacatgagcgggcggcgccggcgccggaggaaagccgcgccgcgcttgctgcgaggaaaaccaagcaatcttcgcccggcctctagatatcatttattcatggcttagtttccttcctagtctgtaagcgtgtttttatcatgttttaaaaaacctgagattttcgtgtgtgttgacatcaaccagcctttctttctagcatgtaaactctgtcgactgccagctgaccatttcttcattattcgtggatcctctgtagttcgtgactctgttgccgtcattcgtgttggaatttgcactgatcctgggttgcttcaagccgtcttgctctgttgatcgaaacatatttgtaaggatgtttggttaatactacaattccatcattcgtagcagtattgaccaaacatccttgcaaatatggagtactactttggtagttgggtggtgtttttttttgacactggaatagttgagtgattttttcccctgctgtatgtcttgcttgtgttgcaaaactggcctacaggatacacgggttcctcctcacaggtttttttaggggcaccctcctcacaggtctgggccaacgcgacgccgaggccgagaacgggccgcacggcgaagcccaccaagtagcgaagcccggccactgtcggagcccaaagccaaacccaccaaaaaatccgtccgaccgaaggcgacccatccgccgcgccgcatccaacccatcgtccttccttcctcctccgccgctccggtggcgcgatggccgcgcgggccctcctcctccggacagccgcccgctgctgctcccctctccactcccccaccgccgccccgcgcctccacccgcggctccgcagccacgccgccgctccccagctctgcttccccgcgctctccttctccgcctccgccgcgtccaccagctcgcacggccccagcggcggcgacgccggcgccgaaggggaggatgacaagggagggtacgagaactacctggggatgagcgacgacgagctcatggcacagtgcgacatgggcaccttcaagtcttccggccccggcggccagcaccgcaacaagcgcgagtccgccgtccggctccgccaccaccccaccggcatcgtcgcccaggctgtggaggataggtcacaacataagaatcgatcatctgctttatctcggcttcggaccctgattgctcttaaagggacaataattgtttatcttgatcaccatgcacttactcataatttacagcagcaagaatgatcgggttatgtttacatcgttcgttttcaatttccatggtagtcatttaacattttggtcgttcacatcttatcagttaggaggccgataaaccttgataactacactcctccagttgaacttcttcagatattgccactgaagtctaccattcgatcaaaggatgttggtaaccaaattggcccaaataatccaaaattttctccaggaatgcaagctttattagatcttctatttgctgttgaaggttctgtatcagaggcagcgaaaattctaggcctaagcactggtgccctgtcaaggttaattctatcagatgattctctccgagcggctgccaatgaactacgagcctccaagggactgaagccactaagatgatgcccctttacaatgttatcatcttcagctgcgccacaggtgccaaggtgtctgattgcttatgatttcatggcatgccattggagcttatgcccaattccctggcgcaagaaatgcaaaacatacacagggtctgtc

SEQ ID NO: 1209 - DNA, 1234 bp, Panicum virgatum
cccaaataaaacctcacccctcctgcgactctgcgaccctgtctcctcctcccacctcgccttcacacctccttcctcccctcgtctccgccgccgcctcatcctcgccggaaccctaaatggaccccggcgccggcgcgcactacaccgcccgcaccgcggaggaggtcttccgcgacttccgcggccgccgcgcgggcatgatcaaggctctcaccaccgatgtggagaagttctaccagctctgcgaccccgaaaaggaaaatttgtgcctttatggctaccctaatgaaacatgggaagtaactttgccagcggaggaagttcctccggagatccctgaaccagctttgggaataaactttgctagggatggcatgaatgagaaggattggttggcactagttgctgtccacagcgattcctggttactagctgttgcattctactttgcggcccggtttggatttgacaaagaggccaggaggcgactcttcagcatgataaataacttgccaacgatatttgaagtagtgactggggctgctaagaaacaaaccaaggagaagggccccaatagtaccagcaaaagcaacaaaccaagctcgaaaatgccatcaagaccagaatctcattcaaagtcgacaaaagtggtggcgccccccaaggatgatgatgatgagagtggtgaagaatacgaggaagaggaagaacgtgataacaccctatgtggatcctgtggaacaaatgacggtaaggacgagttctggatctgctgcgacagttgcgaacggtggtaccatggcaagtgcgtcaagatcacacctgctcgagcagaacatatcaagcactacaagtgccccgattgcaccaacaagagggcaagagcctagcagcaagcaggtggcagaattatcgatgtctgcagatatggcctagctgtctagcatgtagacttgcttttcatttcgaagaacgctgttaattcacttggttgtcccagcagctcgtgttgctcgagcttaattgtgttccatgtttgaaacggttgttgtagtaataccagattccctggtgaggctgtcctgcagatgtgtcagacgttattgaactgaaagacgtgaaaactgaccgtttctccacatcctgtttcgttccagcatcgcttgtttcgatgttgcaatgctttctgaccctcagaaccttttcatgagagttccacaaaattatcttt

SEQ ID NO: 1210 - DNA, 1136 bp, Setaria italica
cacctcctcgccttcacacacccctcctcccctcgtctccgccgccgcctcctcctcgccggaaccctaaatggaccccggcgccggcgcgcactactccgcccgcaccgcggaggaggtcttccgcgacttccgcggccgccgcgcgggcatgatcaaggccctcaccaccgatgtggagaagttctaccagctctgcgaccccgaaaaggaaaatttatgcctttatggttaccccaatgaaacatgggaagtaactttgccggcggaggaagttcctccggagatccctgaaccagcattgggaataaactttgcgagggacggcatgaatgagaaggattggttggcactagttgccgttcacagcgattcctggttactagctgttgcattctactttgcggcccggtttgggtttgacaaagaggccaggaggcgactcttcaacatgataaataacttgcccacaatatttgaagtagtgactggggttgccaagaaacaaaccaaggagaagggccccaatagtaccagtaaaagcaacaaaccaagttcgaaaatgccatcaagacccgagtctcattcgaaggcaacaaaagggtcggcaccccccaaggatgatgatgatgatgagagtggcgaagaatacgaagaagaggaagaacgtgataacaccttatgtgggtcctgtggaacaaatgacggcaaggacgagttctggatctgctgcgacagttgcgaacggtggtaccatgggaagtgtgtcaagatcacacctgctcgagctgagcatatcaagcactacaagtgcccagattgcagcaacaagagggcaagagcctagcagcaagctctggtgagacccgggagggaagcaagcgccagaatcgtcggtgtctgcagatatggcctagctgtctagcttgtagacttgcttttcatttcgaatgaacgcagttaattcactcggttgccccagcagctcatgttgctcgggcttaattgtgtttaatgtttcaaacggttgttgtagtaataccagattctctggtgaggctgtcttgcagatgtgtgatggacgtgttcttcaactgaaagacttgaaaactgaccgtttttccatcgcttgtctc

SEQ ID NO: 1211 - DNA, 1148 bp, Brachypodium distachyon
tccacctcccagttgccccctcctccttctccctgccgctcccaccaccgcctcctcctcgtcgccgccccccaacctccaagctcgcccgaaccctagccgccattgcccaagccgccatggaaggcgccggaggcggagcggcttacccctcccgcacggcggaggaggtcttccgcgacctccgcggccgccgcgccggcatgatcaaggccctcaccgaagaggtggagaagttttacaagctctgcgaccctgaaaaggagaacttgtgcctttacggatatcctaatgagacatgggaggtgaccttgccagctgaggaagtacccccagagatccctgaaccagcactaggaatcaactttgctagggatggaatgaatgagaaggattggttagcgctagttgcagttcacagtgattcctggttactggcagttgcattctactttggagcccgctttgggtttgacagagaaactaggaggcgactctttaacatggtaaacaacttacccactatatatgaggtagtgacaggagttgccaagaaacaggcgaaggagaagactcccaacagtagtagcaagagcaacaagcctacttcaaaagttgtgtcagcccccaaggatgaagaagacagtggtgatgaggacggagatgaagtggaagaggagcatgacaacactctatgtggaacttgtggaaccaatgatggcaaggacgagttttggatctgctgtgacaactgtgagaagtggtatcacgggaagtgcgtcaagatcacgcccgcacgtgcggagcatatcaagcactacaggtgccctgagtgcaccaacggcaacagcaacaagaggctcaagccatgagcgacaaagcattggaattggaggaagttgctacaaggaaagccatcttcgctcaggtgtcaaagtcttcagatattatcaccatggcttagttttctagtctgtaagcgtgttttctatttaaaacaacttcacattttcgtgtgtttgacatcagcctttctggtgtttgtaatcgctgtcaactgagggtaccgccaactgaccatttcttcattattcgtgtatcttgtagttcgtgactgttatcatcattcggtctgaaatcttgcactg

SEQ ID NO: 1212 - DNA, 1074 bp, Echinochloa colona
cccgccgcgcgggcatgatcaaggccctcaccaccgatgtggacaagttcttcaagctctgcgaccccgaaaaggagaatttgtgcctttatggatatcccaatgaaacgtgggaggtgaccttgccagctgaggaagtacccccagagatcccagaaccagcattaggaatcaactttgctagggatggcatgaatgagaaggactggctggcactagttgcagttcacagtgattcctggttactgtcagttgcattctacttcggtgcccggtttgggtttgacaaagaagctaggaggcgactctttagcatgataaacaacgtgcctaccatatttgaggtagtgacaggatcggccaagaaacagaccaaggagaagacacctaacagcagcagcaagagcaacaagcctagttcgaaagtgcagtcaagagcagagtctcgttcaaaggccaaggtccccaaagatgaagaagagagcggtgatgatgacggggatgaggaggcggaagagcacgacaacaccctgtgtggaacttgcgggaccaacgacggaaaggaccaattctggatctgctgcgataactgcgagaagtggtaccatgggaagtgcgtcaagatcacgcccgcccgagctgagcacatcaagcagtacaagtgcccggattgcactaacaagagggccagggcgtgagtaaccgagcatcatcggcgaacttgtcaggaggaaatcgtctcctggtgtcgagatccctagatatggcatagcttcctagcctgtaaacctgtgtttctatttatggttttcttgtgtcgagtgttgacgtgagcctctagtctgtaaaccttgtcgctgaaggtaactctcaactgaccatttcttcattattcgtgccgtgcagtagtgactagtgactgtagcctatgctgtcttgtctgttcctactacccagcatctgcttgtcgtagccaggatttgtactggttctgaattgctgaaggttgtatcttactgtgcaagtgtgctggtacatgaatggtgaacaacattccttccccagtcgtcgtgt

SEQ ID NO: 1213 - DNA, 1150 bp, Secale cereale
ttgcccacgcccccatggacggcgccggcgcaggaggggcgtacgtcgcgcgcacggcggaggaggtcttccgcgacctccgcggccgccgcgccggcatgatcaaggccctcaccgaagatgtggacaagttcttcaagctctgcgaccctgaaaaggagaacttgtgcctttatggatatcccaatgagacatgggaagtgaccttgccagctgaggaagtgcccccagagatccctgaaccagcattaggaatcaacttcgctagggatggaatgaatgagaaggattggttggcactagttgcagttcacagtgattcctggttactgtctgttgcattctactttggagcccgctttggcttcgacaaagaaaataggaggcgactgttcaacatgataaacaacctgcccactatatacgaggtagtgacaggaatcgccaagaagcagtcaaaggagaagactcccaacagcagtagcaagagcagcaagcccagtatgaaagtgctctcgagagccgagccccgtgcaaaggcgaaggtgccagtccccaaggacgaggaggagagtggcgaggacgagggcgacgacgaggaggaggagcacgacaacaccctgtgcgggacctgcggcaccaacgacggcaaggacgagttctggatctgctgcgacaactgcgagaagtggtaccacggcaagtgcgtcaagatcacgcccgcccgggcggagcacatcaagcactaccggtgcccggagtgcaccaacggcggctccaacagcaacaagagggtcaagacatgagggggcggcgccggcgccggaggggaggaaagctgcgctgcgctgcgcttgctgcgaggaaaaccaagcaatcttcgcccagcctctagatatcatttattcatggcttagtttccttcctagtctgtaagcgtgtttcatcatcatgttttaaaaaaacttgagattttcgtgtgtgttgacatcaaccagcctttctttctagcatgtaaactctgtctgtcgactgccaccaactgaccatttcttcgttattccgtggatcctttgtagtccgtgactctgttgccgtcattcgtgttgaatttgctactgactccgtgggttcgtcgtttgtaccgggg

SEQ ID NO: 1214 - DNA, 1263 bp, Triticum aestivum
cccgtagacgccattgcccacgcccccatggacggcgccggcgcaggaggggcgtacgtcgcgcgcacggcggaggaggtcttccgcgacctccgcggccgccgcgccggcatgatcaaggccctcaccgaagatgtggacaagttcttcaagctctgcgaccctgaaaaggagaacttgtgcctttatggatatcccaatgagacatgggaagtgaccttgccagctgaggaagtgcccccagagatccctgaaccagcattaggaatcaacttcgctagggatggaatgaatgagaaggattggttggcgctagttgcagttcacagtgattcctggttgctgtccgtcgcattctactttggagcccgctttggcttcgacaaagaaaataggaggcgactgttcaacatgataaacaacttgcccactatatacgaggtagtgacaggaatcgccaagaagcagtcaaaggaaaagactcccaacagcagtagcaagagcagcaagcccagtatgaaagtgctctcgagagccgagccccgcgcaaaggccaaggtgccagtccccaaggacgaggaggagagcggcgaggacgagggcgatgacgaggaggaggagcacgacaacaccctgtgcgggacctgcggcaccaatgacggcaaggacgagttctggatctgctgcgacaactgcgagaagtggtaccacggcaagtgcgtcaagatcacgcccgcccgggcggagcacatcaagcactaccggtgcccggagtgcaccaacggcggctccaacagcaacaagagggtcaagacatgagcgcgcggcgccggagaaggaaaagctgcgccgcgcttgctgcgaggaaaaccaagcaatcttcgcccagcctctagatatcatctattcatggcttagtttccttcctagtctgtaagcgtgcttcatcgtgttttaaaaaactatgagattttcgtgtgtgttgacatcaaccagcctttctttctagcatgtaaactctgtcgactgccagctgaccattgcttcattattcgtggatcctctgtagttcgtgactctgttgccgtcattcgtgttggaatttgcactgatcctgggttgcccagagaaggcacaaatatcatgtttggcatgtgttggtgatccaaagaaccaggggggggaaaagaaggggttagaaccagaaaaaggcctggcccggctaacggttccaagggcaaggagttcttaaaggcccaagaa

SEQ ID NO: 1215 - DNA, 918 bp, Hordeum vulgare
ccttccaggctgcctgcccctcccttctccttctctctccccctcctgccgctcccaccaccgcctccctcctccccgtcgccgcgctcgcccggagccccagacgccattgccgacgcccccccatggatggcgccggcgcaggaggggcgtacgtcgcgcgcacggcggaggaggtcttccgcgacctccgcggccgccgcgccggcatgatcaaggccctcaccgaagatgtggacaagttcttcaagctctgcgaccctgaaaaggagaacttgtgcctttatggatatcccaatgagacatgggaagtgaccttgccagctgaggaagtgcccccagagatccctgaaccagcattaggaatcaacttcgctagggatggaatgaatgagaaggattggttggcgctagttgcagtgcacagtgattcctggttactgtcggtcgcattctactttggagcccgctttggcttcgacaaagacaataggaggcgactgttcaacatgataaacaacttgcccactatatacgaggtagtgacaggaattgccaagaagcagtcaaaggagaagactcccaacagcagtagcaagagcagcaagcccagtatgaaagtgctgtcgagagccgagccccgtgcaaaggcgaaggtgccggcccccaaggacgaggaggagagcggcgaggacgagggcgacgacgaggaggaggagcacgacaacaccctgtgcgggacttgcggcaccaacgacggcaaggacgagttctggatctgctgcgacaactgcgagaagtggtaccatggcaagtgcgtcaagatcacgcccgcccgggcggagcacatcaagcactaccggtgcccggagtgcaccaacggcggctccaacagcaacaagagggtcaagacatgag

SEQ ID NO: 1216 - DNA, 1116 bp, Cenchrus ciliaris
tgccttcggacacccctcgtccccctcgtctccgccgccgccgcctcctcctcgccggaaccctaaatggaccccggcgccggcgcgcactacacagcccgcaccgcggaggaggtcttccgcgacttccgcggccgccgcgcgggcatgatcaaggccctcaccaccgatgtggagaagttctaccagctctgcgaccccgaaaaggaaaacctgtgcctttatggctaccccaatgaaacatgggaagtaactctgccagcggaggaagttcctccggagatccctgaaccagcactgggaataaactttgcaagggacggcatgaacgagaaggattggttggcactagttgctgttcacagcgattcctggttactagctgttgcattctactttgctgcccggtttgggtttgacaaagaggccaggaggcgactcttcaatatgataaataacttgcccacgatatttgaagtggtgactggggctgccaagaaacaaacaaaggagaagggccccaatagtaccagcaaaagcaacaaaccaagttcgaaaatgccatcaagacccgagtctcattcgaaggcgacaaaaggggcggcgccccccaaggatgatgatgatgagagtggtgaagaatacgaagaggaggaagaacgtgataacaccttatgcgggtcctgcggaacaaatgacggcaaggatgagttttggatctgctgcgacagttgtgaacgatggtaccatgggaagtgtgtcaagatcacacctgctcgagctgagcatatcaagcactacaagtgcccagattgcagcaacaagagggcaagagcctagcagcaagctctgtgagatccgggagggaagcaagtgccagaatcgcggatgcctgcagatatggcctagctgtctagcttgtagacttgcttttcatttcgaatgaacgctgttaattcactcggttgcccagcagctcatgttgctcgggcttaattgtgtttaatgtttcaaacggttgttgtagtaataccagattatctggtgaggctgtctttgcagatgtgtgatagacgttcttgaactgaaagacttgaaaactgaccgtttttccat

SEQ ID NO: 1217 - DNA, 1548 bp, Pennisetum glaucum
cagggctggggcggcaactggtgtggagcagacactgctgaagcacagcagcagacgctaccgatcgagcccgggagaaggagaagacgaagaaaaggctggaaaggtgccgtggccgtcctctacaactgacgcattcccccaaggacaggcggcgcagacgtcggcgaagcggcgcacgggtgcggtcctccgtcctcgccacgcgtcgccctcggtggcggcggccctccggacgaaaggcgacgtgggagcggggatcgatcccgactctgcgaccctgtctcctcctcccacctccacgccttcacacacctctcctcccctcgtctccgccgccgcctcctcctcgccggaaccctaaatggaccccggcgccggcgcgcactacacagcccgcaccgcggaggaggtcttccgcgacttccgcggccgccgcgcgggcatgatcaaggccctcaccaccgatgtggagaagttctaccagctctgcgaccccgaaaaggaaaacttatgcctttatgggtatcccaatgaaacatgggaagtgaccttgccagctgaggaagttcctccggagatccctgaaccagcattgggaatcaactttgcgagggatggcatgaacgagaaggattggttggcactagtcgcagttcacagcgattcctggttactagctgttgcattctactttgcggcccggtttgggtttgacaaagaagccaggaggcgactcttcaatatgataaataacttgcccacgatatttgaagtggtgactggggctgccaagaagcaaacgaaggagaagggccccaatagtaccagcaaaagcaacaaaccaagttcgaaaatgccatcaagacccgagtcccattcgaagccgacaaaaggggcggcaccccccaaggacgacgatgatgagagtggtgaagaatacgaagatgaggaagaacgtgataacaccttatgtgggtcctgtggaacaaatgacgggaaggatgagttttggatctgctgcgacagttgtgaacggtggtaccatgggaagtgtgtcaagatcacacctgctcgagctgagcatatcaagcactacaagtgcccagattgcagcaacaagagggcaagagcctagcaggctctgtgagacccgagagggaagcaagcgccagaatcatggatgtctgcagatatggcctagctgtctagcttgtagacttgcttttcatttcgaatgaatgaacgctcttaattcactcggttgcccagcagctcatcttgctcaggcttaattgtgtttaatgtttcaaacggttgttgtagtaataccagattctctggtgaggctgtctttgcagatgtgtgatagacgttcttgaactgaaagacttggaaactgaccggtttttccatagcttgtctgtaaactccatgcatgggttaagttgttatttaagtacaatacatgagtggcagttttggaaataaaaaaaaaaaaaaaaaaaaaaaaaaaagtactactgcgttagatacactgcttgtatc

SEQ ID NO: 1218 - DNA, 1311 bp, Panicum virgatum
gggctcaaatctcccagaaatgcccgcaactttctcccaaataaaacctcacccctcctgcgactctgcgaccctgtctcctcctcccacctcgccttcacacctccttcctcccctcgtctccgccgccgcctcatcctcgccggaaccctaaatggaccccggcgccggcgcgcactactccgcccgcaccgcggaggaggtcttccgcgacttccgcggccgccgcgcgggcatgatcaaggctctcaccaccgatgtggagaaggtctaccagctctgcgaccccgaaaaggaaaatttatgcctttatggctaccctaatgaaacatgggaagtaactttgccagcggaggaagttcctccggagatccctgaaccagctttgggaataaactttgctagggatggcatgaatgagaaggattggttggcactagtagccgtccacagcgattcctggttactagctgttgcattctactttgcggcccggtttggatttgacaaagaggcaaggaggcgactcttcaacatgataaataacttgccaacgatatttgaagtagtgactggggctgctaagaaacaaaccaaggagaagggccccaatagtaccagcaaaagcagcaaaccaagctcgaaaatgccatcaagaccggaatctcattcgaaagcgacaaaagtggcggcaccccccaaagatgatgatgagagtggtgaagaatacgaggaagaggaagagcgtgataacaccctatgtggatcctgcggaacaaatgacggtaaggatgagttctggatctgctgcgacagttgcgagcggtggtaccatggcaagtgtgtcaagatcacacctgctcgagccgagcatatcaagcactacaagtgcccagattgcagcaacaagagggcaagagcctagcagcaagctctggagacacccgggagggaagcaagtgccagaatcatcaatgcctgcagatatggcctagctgtctagcttgtagacttgcttttcatttcgaagaatgctgttaattcactccgttgccccagcagctcatattgctcgggcttaattgtgttcaatgtttgaaacggttgttgtagtgataccagattctctggtgaggctgtcttgcagatgtgtcatagacgttcgtgaactgaaagacttgaaaactgaccgtttctccaccgcttgtttcgttccagcatcgcttgttgcgatgttgccatgctttctgaccctcgaaaccttttcatgagtgttatgcaaaaatttctttgatgttcttgaccatacct

SEQ ID NO: 1219 - DNA, 1087 bp, Echinochloa colona
gaccctgtctcctcccacctcctcgccttcgccccctcctcccatcgtctccgccgccgtctcctcctcgccggaaccctaaatggaccccggcgccggcgcgcactacacagcccgcaccgcggaagaggtcttccgcgacttccgcggccgccgagcgggcatgatcaaggccctcaccaccgatgtggagaagttctaccagctctgcgaccccgaaaaggaaaacttatgcctttatggataccccaatgaaacatgggaagtaactttgccagcagaggaagttcctccggagatccctgaaccagctttgggaataaactttgctagggacggcatgaacgagaaggattggttagcactagttgccgtccacagcgattcctggttattagctgttgcattctactttgcagcccggtttggatttgacaaagaggccaggaggcgactcttcaacatgataaataacttgccgacgatatttgaagtagtgactggggttgccaagaaacaaaccaaggagaagggccccagtagtaccagcaaaagcaacaaaccaagctctaaaatgccatcaagaccagagtctcattcaaaggcgacaaaagtggcggcaccccccaaggatgatgatgatgagagcggtgaagaatacgaagaggaggaagagcgtgataacaccttgtgtggatcctgcggaacaaacgacggcaaggatgagttctggatatgctgcgatagttgcgaacggtggtaccatgggaagtgtgtcaagatcacgcctgctcgagcggagcatatcaagcactacaagtgcccagattgcagcaacaagagggcaagagcctagctagccgcaagctctggtaagaccccgggagggaatcaagcgccagaatcggcgatgtctgcagatatggcgtagctgtctagcttgtagacttgcttttcatttcgaatgaacgctgttaattcacacggttgcccagcacctcgtgctgctgggtcttaattgtgtttatgtttcgaacggttgttgtagtaataccagattatctggtgaggctgtcttgcagatgtg

SEQ ID NO: 1220 - DNA, 969 bp, Echinochloa colona
gaccctgtctcctcccacctcctcgccttcgccccctcctcccatcgtctccgccgccgtctcctcctcgccggaaccctaaatggaccccggcgccggcgcgcactacacagcccgcaccgcggaagaggtcttccgcgacttccgcggccgccgagcgggcatgatcaaggccctcaccaccgatgtggagaagttctaccagctctgcgaccccgaaaaggaaaacttatgcctttatggataccccaatgaaacatgggaagtaactttgccagcagaggaagttcctccggagatccctgaaccagctttgggaataaactttgctagggacggcatgaacgagaaggattggttagcactagttgccgtccacagcgattcctggttattagctgttgcattctacttcgcagcccggtttgggtttgacaaagaggccaggaggcgactcttcaacatgataaataacttgccgacgatatttgaagtagtgactggggttgccaagaaacaaaccaaggagaagggccccagtagtaccagcaaaagcaacaaaccaagctctaaaatgccatcaagaccagagtctcattcaaaggcaacaaaagtggcggcacccctgaaggatgatgatgatgagagcggtgaagaatacgaagaggaggaagagcgtgataacaccttgtgcggatcctgcggaacaaatgacggcaaggacgagttctggatctgctgcgatagttgcgaacggtggtaccatgggaagtgtgtcaagatcacacctgctcgagcggagcatatcaagcactacaagtgcccagattgcagcaacaagagggcaagagcctagccgcaagctctggtaagacccgggagggaagcaagcgccagaatcggcgatgtctgcagatatggcgtagctgtctagcttgtagacttgcttttcatttcgaatgaacgctg

SEQ ID NO: 1221 - DNA, 1167 bp, Sorghum bicolor
taaaaccgcacccctcctcctgtctcctccaaccctcttgcctgcgccccctcctcccttcgtctccgccgccgccgccgcctcctcctcgccggaaccctaaatggaccccggcgccggcgcgcactactccgcccgtaccgcggaggaggtcttccgcgacttccgcggccgccgcgcgggcatgatcaaggccctcaccaacgatgtggagaagttctaccagctgtgcgaccccgaaaaggaaaacttgtgcctttatggctaccccaacgaaacatgggaagtaactttgccagcagaggaagttcctccggagatccctgaaccagctttgggtataaactttgctagggatggcatgaatgagaaggattggttggcgctagttgctgttcatagcgattcctggttactagctgttgcattctactttgcggcccggtttgggtttgacaaagaggccaggcggcgactcttcaacatgataaataacttgcccacgatatttgaagtagtgactggggttgccaagaaacaaaacaaggagaagggccccaatagtaccagcaaaagcaacaaaccaagttcgaaaatgacatcaagacccgagtctcattcgaaggcgacaaaagtggcagcgccccccaaggatgacgatgatgagagcggtgaagaatatgaagaagaggaagagcgtgataacaccttatgtggatcctgtgggacaaatgatggcaaggatgaattctggatctgttgtgatagttgtgagcggtggtaccatgggaagtgtgttaagatcacacctgcgcgtgccgagcacatcaagcactacaaatgcccagattgcagcaacaagagggcaagagcctagcgtcaagcccttttgtgaccttggagtgaagtaagcgccaaatcattgatgtctgcagatatatgcctaggcctagctgtctagcttgtagacttgcttttcatttcaaatgaacgctgttgattgactcggttgcccgcagcagctcatgttgcttgggcttaattgtgtttaatgttttataagcggtggttgttgtagtaccaggcagtcttgcagacgtgtgatagacgtttttggacttaactgaccgtttctacattgctaatctagttccagttgatcgttga

SEQ ID NO: 1222 - DNA, 1180 bp, Saccharum officinarum
aaacctcacccctcctttggtctgcggccctgtctcctgtctcctcccaccctcttgcctgccccctcctcccttcgtctccgccgccgccgcctcctcgccggaaccctaaatggaccccggcgctggcgcgcactactccgcccgtaccgcggaggaggtcttccgcgacttccgcggccgtcgcgcgggcatgatcaaggccctcaccaacgatgtggagaagttctaccagctgtgcgaccccgaaaaggaaaacctgtgcctttatggctaccccaatgaaacatgggaagtaactttgccagcagaggaagtgcctccggagatccctgagccagctttgggtataaactttgctagggatggcatgaatgagaaggattggttggcgctagttgctgtccacagcgattcctggttactagctgttgcattctactttgcggcccggtttgggtttgacaaagaggccaggcggcgactcttcaacatgataaataacttgcccacgatatttgaagtagtgactggggttgccaagaaacaaaacaaggagaaaggccccaatagtaccagcaaaagcaacaaaccaagttcgaaaatgacatcaagacccgagtctcattcgaaggcgacaaaagtggcagcgccccccaaggatgacgatgatgagagcggtgaagaatatgaagaagaggaagagcgtgataacaccttatgtggatcttgtggaacaaatgacggcaaggacgaattctggatctgttgtgatagttgtgagcggtggtaccatgggaagtgtgtcaagatcacgcctgcacgagccgagcacatcaagcactacaaatgcccagattgcagcaacaagagggcaagagcctagcgtcaagccctggtgtgaccctggagttaagcgccaaatcattgatgtctgcagatatatgcctagctgtctagcttgtagacttgcttttcatttcgaatgaacgctgttgattgactcggttgccctcagcagctcatgttgctcgggcttaattgtgtttaatgttttataagcggttgttgttgtagtaccaggcagtcctgcagacgtgtgatggacctttttggactcaaaggactcaactgaccgtttctacatcgctagtctagttccagttgatcgtgccaaaaa

SEQ ID NO: 1223 - DNA, 1006 bp, Hordeum vulgare
ctgccgcaagcccaaaaggcaccgccggggctcaaatcctcccggaaacgaacgcaaatctcctcttcccaaaataaaaacctcaccactccttgtctgtctccctctctctgtgtcctccacctcctcgtgctctcgcctccctcccagcacccttctcgccgccgccgccgccgccccctcgccggaaccctaaatggacgtcggcgccggcgccggcgcgccctacgcctcccgcacggcggaggaggtcttccgcgacttccgcggccgccgcgccggcatgatcaaggccctcacccaagaagtggacaagttctaccagctctgcgaccccgaaaaggagaacttgtgcctttatgggtaccctaatgaaacatgggaagtgacgttgccagctgaggaagtccccccagagattcctgaaccagcacttggaatcaactttgctagggatggcatgaacgagaaggattggttagcactagttgctgttcacagtgattcctggttgttggctgtttcattctacttcgcggcacggtttggatttgacaaagaggcaaggaggcgtctctttaacatgataaataacctgcctacaatatttgaagtcgtgactggtgctgcaaagaagcagaccaaggagaaggcccccaacaccaacactacgcacaagagcaataataacaagccaagcatgaaaactctatcaaggcctgagtcccagtcaaagcccccaaagatggcagcgcccccaaaggatgaagacgagagcggcgaggactatggagaagaagaggaggaagagcgcgacaacaccttgtgtggtacctgtggaacaaacggcggtaaggatgagttctggatttgctgcgacaactgcgagcgttggtatcatgggaaatgcgtcaagatcacgcctgctcgagccgagcacatcaagcactacaagtgcccagactgcagcaacaagagggcgagggtgtaacggcgacaaaaagca

SEQ ID NO: 1224 - DNA, 949 bp, Zea mays
cccacccttgcctccgagtcacctcctcccttggtctccgccgtcgctgcctccttgccggaaccctaaatggaccccggcgccggcgcacactactccgtccgtaccgcggaggaggttttccgcgacttccgcggccgccgcgcgggcatgatcaaggccctcaccaacgatgtggagaagttctaccagctgtgtgaccccgaaaaggaaaacttgtgcctttatggctaccccaacgaaacatgggaagtaactttgccagcagaggaagttcctccagagatccctgaaccagctttgggtataaactttgctagggatggcatgaatgagaaggattggttagcgctagttgctgtccacagcgattcctggttactagcagttgcattctactttgcagcccggtttgggtttgacaaagaggccagacggcggctcttcaacatgataaataacttgcccacgatatttgaagtagtgactggggttgcaaataaacaaaacaaggagaagggccccaatagtaccagcaaaagcaacaaaacaagttcaaaaatgacatcaagacccgagtctcattccaaggcgacaaaagtggcagtgccccctaaggatgacgatgatgagagcggtgaagaatatgaagaggaagagcgtgataacaccttatgtggatcatgtggaacaaatgacggcaaggacgaattctggatctgttgtgatagttgtgagcggtggtaccatgggaagtgtgtcaagatcactcctgcacgtgctgagcacatcaagcactacaaatgcccagattgcaacaacaagagggcaagagcctagcgtcaagccctggtgtgaccctggagtgaaggctgatagaacatattatactcagaggggtagctatacttcaatatgctgatgacaccattatttgtgtaaagcatga

SEQ ID NO: 1225 - DNA, 1332 bp, Musa acuminata
ccctctctcctctctctctctctcgtaattgagccgggagttgaatctctccatcgctcgaagtctcccaccctaatctaatcttctcgtcgatgaaatcaaagccctagtctctctcctcactcgagccctttctccgtcatctcgtggactatatcccgcttgaatcattgtttcgtggcctcgatttctctgccgttggcttgtacccgattcgagccatggagggtggcggagggcctcacagttctcgcaccgcggaggaggtcttccgcgacttcagaggccggagagccggcatgatcaaggcgctcacaaccgatgtggagaagttctaccagctgtgcgatccagaaaaggagaacttatgtctttatgggcttcctaacgagacttgggaagtaaccttgcctgctgaggaagtacctccagaacttcctgagccagccttgggaattaactttgccagagatggcatggaagaaaaggactggcttgccctagttgcagtccacagtgatgcatggttacttgctgttgccttctattttggggcacgctttggatttgataaggaatccaggaggaggcttttcaatatgattaacaatctccccaccatatttgaagttgtaactggaactgccaagaagctgtctaaggagaagacctctaatagcagcagcaagaacaagcccaactcaaagacgcagtcaagaccggctgagtcccaaacccgggcttcaaagatgcattctccaaaagaagatgaagatagtggtgcagacgaggaggaggaagaagaagaggatcacgagaacactctatgtggtgcatgtggagacaattatgccaatgatgagttttggatatgctgtgacatgtgtgaaagatggttccacgggaagtgtgtcaggatcacccctgcccgagctgagcacatcaaacagtacaagtgcccaagttgcagcaataagagggcaagagtatgaaacaagcgtttgttttgggtaatttgctaattcttcaatgacgttggaaaacaattccaaacagcagacatgcaaagcctgagttgtttaggttctagacttttgtttctcgtgtccttgttcactattttgttagtcgtctctttgaacgagagctcgagtgtgtgtgtgagtgtgttagagaatctttaatttgcttaatataacttggtagttaatgttaggggctcagatttagtggtgttgtatttttaaaatgaaaactaaattaggattagtgtggtggtgatgagaacctttgttctaatgttttttcctccctctgttttcctgacacccc

SEQ ID NO: 1226 - DNA, 889 bp, Zea mays
cctgtttcctgtctcctaccctcttgcggtcttgccagcgccccttcctcccttcgtctccgccgccgcggactcctcgccggaaccctaaatggaccccggcgccggtgcacactactccgcccgtaccgcggaggaagtcttccgcgatttccgcggccgccgcgcgggcatgatcaaggccctcaccaacgatgtggagaagttctaccagctgtgcgaccccgaaaaggaaaacttgtgcctttatggctaccccaacgaaacatgggaagtaactttgccagcagaggaagttcctccagagatccctgaaccagctttgggtataaactttgctagggatggcatgaacgagaaggattggttggcgttagttgctgtccacagcgatgcctggttactagctgttgcattctactttgcagcccggtttgggtttgacaaagaggccaggcggcgactcttcaacatgataaataacttgcccacaatatttgaagtagcgactggggttgccaagaaacaaaacaaggagaaggaacccaataataccagcaaaagcaacaaaccaagttcgaaaatgacaacaagacccgagtctcatttgaaggcgacaaaagtggcgccccctaaggatgaagatgatgagagcggtgaagagtatgaagaagaggaagagcgtgataacaccttatgtggatcctgtggaacaaatgacggcaaggacgaattctggatctgttgtgatagttgcgagcggtggtaccatgggaagtgtgtcaagatcacgcctgcacgagctgagcacatcaagcactacaaatgcccagattgcagcaacaagagggcaagagcctagcaccaagccctgctgtgactctggagt

SEQ ID NO: 1227 - DNA, 4764 bp, Brachypodium distachyon
gagcgcctgcgcctcctccgaaaacgaaagcccaaaacgtcaaaactagccgagcggagcggccatctcaaatcgaaatcccgctcactctctctctcctcccccgctccgctccccatttcgtccacttcaccgccgcagatcacaagccctaaccctagccggagacgaggggcgagggcctcctcatctcgctgctgctccgccatgaacaacttccatgtatacgaggccatcggccgcggcaagcactcgacggtgtacaaggggaggaagaagaagaccattgagtacttcgccgtcaagagcgtcgacaagtcgcagcgctccaaggtcctcaacgaggttcggatgcttcattctttagatcatgcaaatgttctaaaattttattcctggtatgaaacctcagcacatttttggctggtattggaatattgtgtcggtggagacctaaagggcttgcttgagcaggatgagaagctgcctgaaagtgctatgcatgacctggcttatgatcttgtcaaagccctcctgttcttgcattcacaaggaattatatattgtgacctgaagccatcaaacattttgcttgatgagtttggatgtatgaagctgtgtgattttggattagcaaggcgtttaaaagacattgagaagaccactcctggagatgttccacaacctatgagggggacaccatgctatatggctcctgagttattccgagagggaggggtccactcatacgcttctgatttctgggcgctcggttgtgtgctgtacgagtgctatgccggaaaacctcctttcgtgggtagtgaatttacccagttagtcaagtccatactttcagatcctacaccacttttgcctgataacccatcaaggtccttccaaaatctgatcaattgcttactcatgaaagacccggctgaaagactacagtggtccgaactctgtgagcacaacttttggagaagcagtatgccattgattcctttgcctcctcaacctgcctttgacaagatggttggactttctagtacaccatatttggctgagagaaatggggataaactctccagacagctgacaccacccaagacccgtgaatacaacggcttgcggaagaaagatgaaaactctggtcaggggttcactaccccagttaagaatgtgcaaagtagtaagaaaaatagtgcaaaaccttcctgcaaggctgatggtggtctcaagggtgtaaatgtcctcaggatgtctcgcatagctaagataaatttgcaaagggaaagggacaaggagaactacaggcgtggtcccacagacacatatgaaaatgaggctgaagttaagatagaaaataatgacatggagctggattttggtgaaaatccagaaggtgatgcacctgatgataatgatggatcagataatactgcatccacagcagatgaaaagcaaatggctcaaggcgctgatggcaatgaagagaattgcatgataaatcagatggatatgctcacagatgagtgttctgttaagcctgacaccgtgcagaaaactgagcagaactgctcagaggttcttgacgtggtggccactccacctagctttggtatgaggaaagcacgtgcaaagataacttctggtgctgcaactggttctgagccattgaacatctttgaagcattctggcatccagcagatcttgcagttaaaccagttatgccaagtaaaaaaggagataaagctacagaggtggttcctgtgcttccttttgaagctcttcccgctggtgattatattaagttgccacgagaacagatgaatgcattcaatagtcagataattcagagtttgagtggaacttttcaggtctcagagaaacagaatataatcagatacctggaaatgctaagcatgaactctgatgctgcgaatataatcactaatggcccaattatgtcgctgcttataaagatgctccgattgtcaaaaacttcggttttgcgtgtacaggttgcttcacttatggggctgttgatacgatactccactatccttgatgcagagttagcaagttcaggaattgttaatgccttatcagatggtttaagggaccgtcatgataaacttaggagatcatgtatggcaacactgggggaattactgttctacatatcaactcagtctgatgaagataacaaagaaagcaatgcccaagaatctcctctgaaggacaacaaatctgctgcttcatggcaggttccgagtgctgtaattgcactggtgtcatctatcttgcgtaaaggtgaagatgacctagcccagctttatgctttgcgaacaattgataacatctgtagccaaggtacagattggacatcaaggtttgcttcacaagatgtaattgggcatctttgctacatctataaagcaaccgggaaacaggagaatacgaggcttattgcagtatcttgtttgagtcgcttagctcgcttcagttcatcatgcattcatttaatattggagaagctatcattcaaggatatggcatgcacactgattaagggcaatccacgtgagcagcagaccactctgaatctcctgaactcggcattagttaacagtcataacatagcaaatatgaatcgctatattctgtccttaactgaggagaaacaattggtccctggactcatttcgctgatagaacagggaactgatgttctgcgtggaaaagccctcttatttgttgctcttctttgcaaaaacagtcgaaggtggcttccacatttcttttgcaatgcaaaattactatcagcagtcgatagattgggaaaggagaaggttggcttcattcatcaatgtatggaagcatttgttcagctagttgcttctttggtcccaggcattcttgacactgtgtgcagtgacatacagcaggtcatgggtggcaaacgtcatggacccgttactgctttaactgggcgttctcatccaaaaagcacaattcatttgtttcctgttattcttcatcttcttggaagtgtatccttcaaccacagagttgtgacaagtcatgtattgctccagttggctaatcttatgaagattttggagacgccgtttcaggcccgggatgatttccaaatgacattgcttcgagttcttgaggcagctacagaggagccttctgttatacttaaggaacacaaaatattcacaactcgtttcctcccaagcttatccatcttatacaagggcaataaagattgcgatgccagattcctgtgtttgaagatactatctgatgtgatgattgtgatcttcagtgattcttcattgactgcggatgagcgaacagtagctgacctgaaaacaatctctcataaatattttctcccgatgtatccttcatttgcagaggacgaagatccaatacctatatatgcacagaaacttctagtgatgctgatggaacatgattgtgttaaagtctctgatatcctgaatgaagcaacagtatcccagtgctttgaatttttgcttggagatctgtcaaatgcaaacgtaagcaatgtcaagctttgttttgctctggcttctgctcccgacatggacacaaatattctttcacagcttcaagttgtcagaagaataggaaatctactcgagtttgtgactgcaaaagatatggacgattttctcgagccaaccttggaactttgccgagccttcattatccgtggaattggcagcaacagaagtatcgcccttaccaaagaacctgctctccttgttgacagcgccttcagcatgagcattgctgttgatcaacaatcttgtatcatggatatatgcgaccttggtggcagcatgggtatattccttgaggtagttggaaattcagatccacagataagtgatttggcatctgactgtttggtattattgctcaaggcagcacctcgagaggctacaatgggcttgttgaccaatcttcccaaattgagtactgttctggatgtgctgaagaatgacgcttgtctgcggctgactcgcctgctatatggcctagcattctcttgcaggcagtatctagcccaaggaatgatcctgtcaatatcagtaccggccttgatgcgagtagaagcgcttgtcttggctttcaagggtgcacatgatagccgccttgtcgatgctgcttcctacttgggtgcagaactgcagcgcttgcctcgctgtggttgagcagaaatgtggtcaaggagccactcagctggctgccattgcacaagtgatcttaattaggagggccttggcttggtagttctggcaccaattgtgtgcagagggccatggcctcatcatcagcgggcagcgtactgatcccaatggctactcgccggcataaactgctgcctggtatcttcattcgtcggtgtgcagggcgctgtcgtgtaatcgtttgcctccgtcgatgcggggctgctgtacatgtttatttttcccctcaaaatatgggaggtggctggaggccagcatcctcttctgtatttgcttgccaatttttgttggcatgtaagttttcagtttcatgtaattttctagtatgtatacaaggtcttctttctgttacaaaccaacaactggtaggggatttctattaagatggatgtatgggatcggtactattctccaataagcaacttttacttcaattattatgcttgttgggaacaagaaacagccaataag

SEQ ID NO: 1228 - DNA, 4876 bp, Setaria italica
gcggccatctcaattcaaaatcccgcccactctctcacgcactccccatcccttcttcctctccccatttcttccaccgcttcgccccccgaatctcaaaaaaccctaatcaacctcaccggcggcgaccggcgggagggggagccccgcctccgcctccttctcctactcctccgccatgaacaacttccacgtctacgaggccatcggccgcggcaagcactcgacggtgtataaggggcggaagaagaagaccatcgagtacttcgccgtcaagagcgtggacaaatcgcagcgctccaaggtcctcaacgaggtccggatgctccattctttagaccatgccaatgtcctgaaattttactcctggtatgagacctctgcacatttctggttagtgttggagtattgcgttggtggagacctgaagggcttgcttgagcaggataagaagcttcctgaaagttctattcatgacctggcttacgatctcgtcaaagctcttcagttcttgcattctcaaggaattatatattgtgatctgaagccatcaaacattctacttgatgaatttggatgcatgaagctgtgcgattttggattagcaaggcgcttaaaagacattgagaaaaccaatcctggagatgtgccacaacccatgaagggaacaccatgctatatggctcctgaattatttcgagagggaggagtccactcatatgcttctgatttctgggcacttggttgtgttttgtatgaatgctatacaggaaggcccccttttgtgggtagagaatttacacagttagtcaaatctataatttcggatcctactccacctttacctgataatccatcaaggtctttacaaaatctaattgattgcttactcatgaaagatccggcagaaagattacagtggtctgaattgtgtgagcacaacttttggagaacaagtatagcgatgattcctttaccacctcagcctgcttttgacaacatgattgaactttctgctacaccatacctagctgagagaaatggtgacaaaccttccagacagttgacaccacccaagcaccgtgagcataatggccttaggaagaaggatgaaaattctaccaaggggttcgtgacacctgtaaagaatgtgcaaagtggcaagagaaatagtgcaaaacctaaggctgatggtttcaaaggtgtaaatatcctcaggatgtctcgcatagctaagttgaatttgcaaagggaaaaggacaaggaaaactacaggcgtcctcctgcagaaacatctgagaatgagactgaagttaagatagaaaataatgacatggagcttgattttggtgaaaatccagagggagatgcgcctgatgacactgatggatctgatcatccaggacccgcagcacatgaaaagcctcaagccactaatggtaatgaagagaattgtatggcaaatcaggttgacatgcttacagatgaggggttggttaagcctgatatcatgacgaaaactgagcagaattcttgttcagataacctggatgtggtggccactccacctagtatctgtatgcgaaaagcacaacgtgcaaaggtaactccatgttctgcaactggttctgagccaactaacatctttgaagcattctggcatccaacagatctcgcagttaaaccagttatgcctagtaggaaagcagataaagctgtggacacggttcccacacttcctttcgaagctcttacagcatgcgattatattaagttaccacaggagcagttgaatgcattcaacagtcagatacttcagagtttaagtggaacttttcaggtttcagaaaaacaaaatactatcagatacctagagatgttaagcatgaactcagatgctgcgaacaaaataactaatggcccaattatgttgcttcttataaagatgcttcgactgtcaaaaactgcggtcttacgtgtccaaattgcctcgcttatgggtttgctgatacgctattccactgctcttgatgtggagctggcaagttcgggaattgtcaatgcattatcagatgggttgagggataagcatgataaactcaggagattctgtatggcaacactaggagagttattattttacatttctacccagtctgatcaagataccaaagagatcaatacccaagaatcccctttgaaggataacaggcctgcaacttcatggcaggttcctagtgctgtaattgcgctggtgtcatctatcttgcgaaagggcgaagatgatctggctcagctatatgccttacggacaattgataacatatgtagccaaggaacagaatggacatcccgctttgcttcccaggatgcgattggacatttgtgctacatctataaagcaactggaaagcaggagagtacaaggctcattgcaggatcttgtttggctcgcctctctcgcttcagtccatcatgtattcatttaatcctggagaagatatcattcaaggatattgcatccacactcatcaagggaaatccacgtgaacagcagattagtcttaatattctcaattcagcattagttaacagtcagactgtaacaaatatgaaccgctatattctttcattatcggatgacaaacaattggtccctgggctcatctctctgatagaacagggaactgatgttctgcgtgggaaagcccttttgtttgttgctctactttgcaagaacagtcgaagatggcttccccatttcttttgcaatgcaaaattaatatcagcggttgatagattgggaaaggagaaggagggtttcattcatcaatgtacagaagcatttgtgcagttggtcgcttctttggtacctgctattcttgacacagtctgcagtgatatacagcaggttctggctggcaaacgccatgggcctgttactgctttagctgggcgagctcatccaaagagcacaattcatctgtttccagttattcttcatcttctgggaagtgcatccttcaggcacagagtcatgacaagtcatgtattgcttcagctggcaaatcttattaagattctggaggcaccgtttcaggctagggatgatttccagatgacattgttgcgagttcttgaggctgctacagaggagccttctgttatactcaatgaacacaaaatattcaccagtcgtatcatcccaagcttatccatcttatacaagggcaataaagatggtgatgccagatttctgtgtttgaagatactctctgatgtgatgattgtgatcttcagtgactcttcgttaactgctgacgagcaaacaataagtgatttgaaattgatctctcaaaagcattttctgccgctgtacccttcttttgcagaggatgaagatcccatacccatatatgcacagaaactgctagtaatgctaatggaacatgattgtgtgaaagtctgtgatattctgcacaaagcaacagtatcccagtgctttgaatttttactaggagatctgtcaaatacaaatgtaagcaatgtcaagctttgctttgcccttgcatctgctcctgagatggacacccatattctttctcagcttcaagttgttcgaagaatagggaacctacttgagtttgttgctgcaaaagacatggatgattttcttgaaccaaccctggaactttgcagagctttcattatccgtggcattggcagcaacagaagtgccgccctctcccaaaacccagcactccttgttgacagtgccttcagcatgagcattgctgttgatcaacaaacttgcgtcatggatatatgtgactttggtggcaacatgggtatttttcttgagctagttggcagttcagatccacagataagtgatttagcatcagattgtatggtgttgttgctcaaggcagcacctcgagaggcaacagtgggcttgttgacgaatcttcctaaattgagtgctgtcatggacttgctgaagcatgacagcagcctacggctgactcgcttactatatggcctaggcttttcatgcagacaatatctagcccagggaatgatcctgtcgatatcagtgtcggctttgatgcgagttgaagcactcgtttcagctttcaagggttccaatgataactttcttgctgatgctgcttcttatttgggcgctgaactgcagcggttacctcggtgtggttgagctgcaacgcggccaaggaggcaggctggctgctattctacaagtgatcttaataggatgcccttgcattccttcactcttcatgtaccatgcacatgcgctgagcaagtgggcaggacctcatcaagtgcaggtattttacatcagtggccatctggttgatctcaattgccactctgccacgattgccaataggtaccttcactcgttgatgtgtaggatgttttatgttattatttatgtgcgattcggggctgctgtatatgtcacttttaaccatatctggaaggtggcaagaagcatataccccttcattgcctcgccaattttggttggcaattacttttcagttccatgtaattctgtagcacctgtaatttctgcgagaatactgtagtccaatatcataatgtgtacatcatcgataaacgcctgttgagtttcatgtaacattaaaaaagttccctggctcctgaatcttggtactagtctgtacattttacaacagtgataagttggttccacggactaaagtttagtacatgtcacaccgaatgtttagatatattaacatagactaattacaaaaccaatcgcacaaatggaggctaattcgcgagacgaatctattaagcctaattaatccatgattagcac

SEQ ID NO: 1229 - DNA, 4664 bp, Aegilops tauschii
ccccaaaccagtccaaactagccgagcggcggccatctcaaatccaaatcccgctccccgtctctctctctcccctctccgccccgctccccatttcgtccacttccccgcccgcctcagatcacaagccctaacctagccggagaccagaggaggagccctcttcctcctcccgacctcccccctccagctggtgctgctccgccatgaacaacttccacgtctacgaggccattggccgcggcaagcactcgactgtctacaaagggcggaagaagaaaaccatcgagtacttcgccgtcaagagtgtcgacaagtcgcagcgctccaaggtcctcaacgaggtccggatgcttcattctttagatcatgcaaatgtcctgaaattttactcttggtatgaaacttcagcacatttttggctggtactggaatattgtgttggtggagacctcaagggcttgctcgagcaggataagaagctgcctgaaagtgccatgcatgacctggcttacgatcttgtcaaagccctcctgttcttgcattcacaaggaattatatattgtgatctgaagccatctaacatcctacttgatgagtttggatgcatgaagctgtgtgattttggattagcaagacgtttaaaggacatcgagaagaccgaccctggagatgtgccacaacctatgagggggacaccatgttacatggctcctgagttgttccaagagggaggggtccactcatatgcttctgatttctgggctcttggttgtgtgctatacgaatgctatgtaggaagacctcctttcgtgggccgtgaatttacccagttagtcaaatccatactttcagagcctgcaccacctttacctgataactcgtcaaggtctttccagaatctgatcaactgcttactcatgaaagacccagctgaaagactacagtggtctgaactatgtgcacacaacttctggagaaacagtatgccaatgattccgttacctcctcaacctgccttcaacaacatggttggacttcccactacaccatatctagctgagcgaaatggggataagccctccggacagctgacgccacccaagactcgtgaacacctacgcaagaaagatgaaaattctgccaaggtgttcacgacccctgttaagaatgtgctaactggtaagaaaaataatgcaaaaccttgtaaggctgatggtttgaagggtgtaaatgtccttagaatgtctcgcatagctaagaaaaatttgcaaagggaaaaagacaaggagaactacaggcgtcctcccacagaaacaaacgaaaatgaggctgaagttaagatagaaaataatgacatggagcttgattttggtgaaaatccagaaggcgatgcacctgatgataatgatggatcagataatgctggatccacagcagatgaaaagcatacgaccgaaggaactgatggaaatgaagagaactgcataaatcaggtggatatgctcacggatgagtgttctgttaagcctgataccatgttgaaagctgagcagaactgctcagagaatcttgatgtggtggccactccacctagtttctgtatgaggaaagcacgtccgaagataacttctggtgctgcaacgggttctgagccgtctaacatctttgaagcattctggcatccaacagatcttgctgttaaaccagttatgcccagtaaaaaaggagataaggctaccgagactgtcactgtgcttccttttgaagctctccctgctgctgattacatcaggttaccacgagaacagatgaatgcattccatagccagataatgcagagtttgagtggatcttttcaggtttcagaaaaacagaatatcatcagatacctggagttgttaagcatgaactctgatgctgcaaatataatcactaatggcccaattatgtcattgcttataaaaatgcttcgactatcaaaaacttcagtcttgcgtgtccaggttgcttcacttatgggactgttgatacgctactccactatccttgatgcagagctagctagttcaggaattgttaatgccttgtcagatggcttaagggaccggcatgataaactgaggagattctgtatggcaacacttggagaattactgttctacatatcaactcaatctgatcaggatagcaaagaaagcaatgcacaagaatctcctatgaaggacaacaaagttagtgctttgtggcaggtccctagttctgtaatcgcactggtgtcatctatcttgcgtaaaggggaagacgatctagcccagctttatgccttacggacaattgataatatatgtagccaaggaacagattggacatcacggtttgcttcccaagatgtaattggtcatctttgctacatctataaagcaactgggaagcaggagaacacaaggcttattgcaatttcttgtttgagccgcctagctcgattcagttcgtcatgtactcatttaatactggagaagctaacatttaaggatattgcatgcacactccttaagggcaatccacgtgagcaacagataagtctgaatcttctgaactcggcattagggaacagtcatatcataccaaatatgagccgctatattctgtcattaactgaggagaaacagttggtccctggacttatttctctgatagagcagggaactgacattctgcgtgggaaagcccttctatttgttgctcttctttgcaagaacagtcgaaggtggcttccacaattcttttgcaatgcaaagctactatcagcagtcgatagattgggaaaggagaaggatggtttcattcatcaatgtacagaagcatttgttcagttagttgcttcgttggtcccaggcattcttgacactgtatccagtgatatacagcaagtcatgggtggcaaacgtcatggacctattactgctttaactggacgtgctcatccaaagagcacaattcatttgttccctgtcatccttcatcttcttgggagtgtatccttcaatcacagagttgtgacaagtcaagtattgctccagttggctaatcttatgaagatattggagacaccatttcaggctcgggatgatttccaaatgacattgctgagggttcttgaggcagctacggaggagccttctgttatacttagggaacacaaaatattcacaagtcgattccttccaagcttatccatcttatacaagggcaataaagattgtgatgccagattcctgtgtttgaagatactgtctgatgtgatgattgtgatcttcagtgattcttcattgactgcagatgaacaatgtttagctgacctgaaaacaatctctcacaaatattttctcccaatgtacccttcatttgcagaggatgaagatccaatacctatgtatgcacagaaacttctagtgatgctgatggaacatgattgtgttaaggtatctgatatcctgaatgaagcgacagtatcccagtgctttgaattcttgcttggagatctttcaaatgcaaacgtaagcaatgtcaagctttgttttgctctggcatctgctccggacatggactccaatatcctttcgcagcttcaagttgtcagaagaatagggaatctacttgagtttgtgactgccaaagatatggatgattttctggaaccaaccttggaactctgcagagctttcatcatccgtggcaccggcagcaacagaagtatcgttctcagcaaagaacctgcactccttgttgatagcgccttcagcatgagcattgctgttgatcaacaatcttgcatcatggacatatgcgaccttggtggcagtatgggtatatttctggaggtggttggaaattcagatccacagataagcgatttggcgtcagattgcgtggtgttgctgctcaaggcagcacctcgagaggccacaatgggcctgctgacaaatcttcctaagctgagcgctcttctggactcgttgaagcatggcgtccccctgccgcggactcgcctgctatacagcctagcattctcttgtaggcagtacctaacccaaggaatgatactctcaatatcagtgccagctctgatgcgagtagaagcgctcgtctcgtctttcaagtgctcccaggatagctgtcttgctgatgctgcttcctgtgtgggcgccgaactgcagcgcctacctcgctgtggttgagcagagatgtggtgaaggagcccgtcagttggctgccgttgcataagcgatcttaatataggagggtcttggcttggcttggtatctctggcgccaagagtttgagcagggccattgcctcatcatcatagggcatggtgctggcctcagttgctactgtctggcacgcgagtgctgtccgcaggacaccgttacatgttatgtaatctttatccgcgatgatgtggggctgctgtatatggtacttttggccaaatctgtatttgccttgccagttttggttggcatgtaggttttcagtttcatgtaattccctagtgtatacaacaatacatttgtcttatttctgttaccaagcaagtggtggaaatttccattattcagatctctgtacttagtccgtataagcaagttttgcttcag

SEQ ID NO: 1230 - DNA, 4488 bp, Secale cereale
ttctccgcccgcctcagatcacaagccctaacctagccggagactagaggaggagccctcctcctcctcctcccccctccagctgctgctgctccgccatgaacaacttccacgtctacgaggccattggccgcggcaagcactcgactgtctacaaagggcggaagaagaaaaccatcgagtacttcgccgtcaagagtgtcgacaagtcgcagcgctccaaggtcctcaacgaggtccggatgcttcattctttagatcatgcaaatgtcctgaaattctactcttggtatgaaacttcagcacatttttggctggtactggaatattgtgttggtggagatctcaagggcttgctcgagcaggataagaagctgcctgaaagtgccatgcatgacctggcttacgatcttgtcaaagccctcctgttcttgcattcacaaggaattatatattgtgatctgaagccatctaacatcctacttgatgagtttggatgcatgaagctgtgtgattttggattagcaagacgtttaaaggacatcgagaagaccgaccctggagatgtgccacaacctatgagggggacaccatgttacatggctcctgagttgttccaagagggaggggtccactcatatgcttctgatttctgggctcttggttgtgtgctatacgaatgctatgtaggaagacctcctttcgtgggccgtgaatttacccagttagtgaaatccatactttcagagcctgcacctcctttacctgataactcgtcaaggtctttccagaatctgatcaactgcttactcatgaaagacccagctgaaagactacagtggtctgaactatgtgcacacaacttctggagaaacagcatgtcaatgattccgttacctcctcaacctgccttcgacaacatggttggacttcccactacaccatatctagctgagcgaaatggggataaaccctccagacagctgacgccacccaagactcgtgaacacctacgcaagaaagatgaaaattctgccaaggcgttcatgacccctgttaagaatgtgctaactggtaagaaaaataatgcaaaaccttgtaaggctgatggtttaaagggtgtaaatgtcctcagaatgtctcgcatagctaagaaaaatttgcaaagggaaaaagacaaggagaactacaggcgtcctcccgcagaaacagacgaaaatgaggctgaagttaagatagaaaataatgacatggagcttgattttggtgaaaatccagaaggcgatgcacctgatgataatgatggatcagataatgctggatccacagcagatgaaaagcatacgaccgaaggaactgatggaaatgaagagaactgcataaatcaggtggatatgctcacggatgagtgttctgttaagcctgataccatgttgaaagctgagcagaactgctcagagaatcctgatgtggtggccactccacctagtttctgtatgaggaaagcacgtccgaagataacttctggtgctgcaacgggttctgagccgcctaacatctttgaagcattctggcatccaacagatctttctgttaaaccagttatgcccagtaaaaaaggagacaaagctaccgagactatcactgtgcttccttttgaagctctccctgctgctgattacatcaggttaccacgagaacagatgaatgcattccatagccagataattcagagtttgagtggatcttttcaggtttcagaaaaacagaatatcatcagatacctggagttgttaagcatgaactctgatgctgcaaatataatcactaatggcccaattatgtcattgcttataaaaatgctccgactatcaaaaacttcagtcttgcgtgtccaggttgcttcacttatgggactgttgatacgctactccactatccttgatgcagagctagctagttcaggaattgttaatgccttgtcagatggtttaagggaccggcatgataaactgaggagattctgtatggcaacacttggagaattactgttctacatatcaactcaatctgatcaggatagcaaagaaagcaatgcccaagaatctcctatgaaggacaacaaagctggtgctttgtggcaggtccctagttctgtaatcgcactggtgtcatctatcttgcgtaaaggggaagacgatctagcccagctttatgccttacggacaattgataatatatgtagccaaggaacagattggacatcacggtttgcttcccaagatgtaattggtcatctttgctacatctataaagcaactgggaagcaggagaatacaaggcttattgcaatttcttgtttgagccgcctagctcgattcagttcgtcatgtactcatttaatactggagaagctaacatttaaggatattgcatgcacactccttaagggcaatccacgtgagcaacagataagtctgaatcttctgaactcagcattagggaacagtcatatcataccaaatatgagccgctatattctgtcattaactgaggagaaacagttggtccctggacttatttctctgatagaacagggaactgacattttgcgtgggaaagcccttctatttgttgctcttctttgcaagaacagtcgaaggtggcttccacaattcttttgcaatgcaaagctactatcagcagtcgatagattgggaaaggagaaggatggtttcattcatcaatgtacagaagcatttgttcagttagttgcttcgttggtcccaggcattcttgacactgtatccagtgatatacagcaggtcatgggtggcaaacgtcatggacctgttactgctttaactggacgtgctcatccaaagagcaccattcatttgttccctgtcatccttcatcttcttgggagcgtatcgttcaatcacagagttgtgacaagtcaagtattgctccagttggctaatcttatgaagatattggagacaccatttcaggctcgggatgattttcaaatgacattgctgagggttcttgaggcagctacagaggagccttctgttatacttagggaacacaaaatattcacaagtcgattccttccaagcttatccatcttatacaagggcaataaagattgtgatgccagattcctgtgtttgaagatactgtctgatgtgatgattgtgatctttagtgactcttcattgactgcagacgaacaatgtttagctgacctgaaaacaatctctcacaaatattttctcccaatgtacccttcatttgcagaggatgaagatccaatacctatgtatgcacagaaacttctagtaatgctcatggaacatgattgtgttacggtatctgatatcctgaatgaagcgacagtatcccagtgctttgaattcttgcttggggatctttcaaatgcaaacgtaagcaatgtcaagctttgttttgctctggcatctgctcccgacatggactccaatatcctttcgcagcttcaagttgtcagaagaatagggaatctacttgagtttgtgactgcaaaagatatggatgattttctggaaccaaccctggaactgtgcagagctttcattatccgtggcaccggcagcaacagaagcatcgtcctcaccaaagaacctgcactccttgttgatagcgccttcagcatgagcattgctgttgatcaacaatcttgcatcatggacatatgcgaccttggtggcagtatgggtatatttctggaggtggttggaaattcagatccacagataagcgatttggcgtcagattgcgtggtgttgctgctcaaggcagcacctcgagaggccacaatgggccttctgacaaatcttcctaaactgagcgctcttctggactcgttgaagcatggcgcccccctgccgatgactcgcctgctatacagcctagcattctcttgtaggcagtacctaacccaaggaatgatactctcaatatcagtgccagctctgatgcgagtagaagcgcttgtgtcgtctttcaagggctcacaggatagctgtcttgctgatgctgctacgtgtgtgggtgccgaactgcagcgcctacctcgctgtggttgagctgagcagagatgtggtgaaggagccggtcagctggccgccattacataagtatgagcagggccattgccttaccatcatactcatagggcatggtgctgacctcagctgctactgtctggcacgggattgctgtccgtgcgcaggacaccgttacatgttatccgcgatgatgtggggctgttgtatatggtacttttggccaaatctgcatttgccttgccagttttggttggcatgtaggttttcagtttcatgtaattccctcgttgcacatcatgatcatgtatacaacaatacatttgtcttatttctgttaccaagcattgtcgagatctctgaatgaagtcggtaa

SEQ ID NO: 1231 - DNA, 4475 bp, Triticum aestivum
aaaaatcaacaggagcgtctcctccgaaaccgaaaccccgctcgctctcctcctctccccatttcgcgcacttctccggccgccgcctcagaccacaagccctcaacctagccggagaccagagggggagccctcctcctcctcccccctccagctattgccgctccgccatgaacaacttccacgtctacgaggccattggccgcggcaagcactcgacggtgtacaaggggcggaagaagaaaaccatcgagtacttcgccgtcaagagcgtcgacaagtcgcagcgctccaaggtcctcaatgaggtccggatgcttcattctttggatcatgcaaatgtcctgaaattttactcttggtacgaaacttcagcacatttttggctagtattggaatattgtgttggtggagacctcaagggcttgctcgagcaggataagaagctgcctgaaagtgccatgcacgacctggcttacgatctaagccctcctgttcttgcatcacaaggaattatatattgtgatctgaagccatctaacatcctacttgatgagtttggatgcatgaagctgtgtgattttggattagcaagacgtttaaaggacatcgagaagaccgaccctggagatgtgccacaacctatgagggggacaccatgttacatggctcctgagttgttccaagagggaggggtccactcatatgcttctgatttctgggctcttggttgtgtgctatacgaatgctatgtaggaagacctcctttcgtgggccgtgaatttacccagttagtcaaatccatactttcagagcctgcaccacctttacctgataattcgtcaaggtcttttcagaatctgatcaactgcttactcatgaaagacccagctgaaagactacagtggtctgaactctgtgcacacaacttctggagaaacagtatgccaatgattccgttacctcctcaacctgccttcgacaacatggttggacttcccactacaccatatctagctgagcgaaatggggataaaccctccagacagctgacgccacccaagactcgtgaacacctacgcaagaaagatgaaaattctgccaaggtgttcacgacccctgttaagaatgtgctaactggtaagaaaaataatgcaaaaccttgtaaggctgatggtttgaagggtgtaaatgtccttagaatgtctcgcatagctaagaaaaatttgcaaagggaaaaagacaaggagaactacaggcgtcctcccacagaaacagacgaaaatgaggctgaagttaagatagaaaataatgacatggagcttgattttggtgaaaatccagaaggcgatgcacctgatgataatgatggatcagataatgctggatccacagcagatgaaaagcatacgaccgaaggaactgatggaaatgaagagaactgcataaatcaggtggatatgctcacggatgagtgttctgttaagcctgataccatgttgaaagctgagcagaactgctcagagaatcctgatgtggtggccactccacctagtttctgtatgaggaaagcacgtccgaagataacttctggtgctgcaatgggttctgagccgtctaacatctttgaagcattctggcatccaacagatcttgctgttaaaccagttatgcccagtaaaaaaggagataaagctactgagactgtcactgtgcttccttttgaagctctccctgctgctgattacatcaggttaccacgagaacagatgaatgcattccatagccagataattcagagtttgagtggatcttttcaggtttcagaaaaacagaatatcatcagatacctggagttgctaagcatgaactctgatgctgcaaatataatcactaatggcccaattatgtcattgcttataaaaatgcttcgactatcaaaaacttcagtcttgcgtgtccaggttgcttcacttatgggactgttgatacgctactccactatccttgatgcagagctagctagttcaggaattgttaatgccttgtcagatggcttaagggaccggcatgataaactgaggagattctgtatggcaacacttggagaattactgttctacatatcaactcaatctgatcaggatagcaaagaaaagcaatgcccaggaatctcctatgaaggacaacaaagctggtgctttgtggcaggtccctagtgctgtaatagcaccagtgtcatctatcttgcgtaaaggggaagacgatctagcccagctttatgccttacgaacaattgataatataggtagccaagggacagattggacatcacggtttgcttcccaagatgcaattggtcatctttgctacatctataaagcaactgggaagcaggagaatacaaggcttattgcaatttcttgtttgagccgcctagctcgattcagttcgtcatgtactcatttaatactggagaagctaacatttaaggatattgcatgcacactccttaagggcaatccacgtgagcaacagataagtctgaatcttctgaactcggcattagggaacagtcatatcataccaaatatgagccgctatattttgtcattaactgaggagaaacagttggtccctggacttatttctctgatagaacagggaactgacattctgcgtgggaaagcccttctatttgttgctcttctttgcaagaacagtcgaaggtggcttccacaattcttttgcaatgcaaagctactatcagcagtcgatagattgggaaaggagaaggatggtttcattcatcaatgtacagaagcatttgttcagttagttgcttcgttggtcccaggcattcttgacactgtatccagtgatatacagcaggtcatgggtggcaaacgtcatggacctattactgctttaactggacgtgctcatccaaagagcacaattcatttgttccctgtcatccttcatcttcttgggagtgtatccttcaatcacagagttgtgacaagtcaagtattgctccagttggctaatcttatgaagatattggagacaccatttcaggctcgggatgatttccaaatgacattgctgagagttctagaggcagctacggaggagccttctgttatacttagggaacacaaaatattcacaagtcgattccttccaagcttatccatcttatacaagggcaataaagactgtcatgccagattcctatgtttgaagatactgtctgatgtgatgattgtgatcttcagtgattcttcattgactgcaaacgaacaaaggttagctgacctgaaaacaatctctgacaaatattttctcccaatgtacccttcatttgcagaggatgaagatccaatacctatgtatgcacagaaacttctagtaatgctgatggagcatgattgtgttaaggtatctgatatcctgaatgaagcgacagtatcccagtgctttgaatttttgcttggagatctttcaaatgcaaacgtaagcaatgtgaagctttgttttgcactagcatctgctcctgacatggactccaatatcctttcacagcttcaagttgtcagaagaatagggactctggttgagtttgtgactgccaaagatatggatggttttctggaaccaaccttggaactttgcagagctttcattatctgtggcatcggcagcagcagaagtaccgcccttaccaaagaacatgcactccttgttgacagcgccttcaacatgagcattgctgttgatcaacaatcttgcatcatggatatatgcgacctcggtggcagtatgggtatatttcttgaggtggttggaaattcagatccacacataagcgatttggcgtcagattgcgtggtgttgctgctcaaggcagcacctcgagaggccacgatgggcttgctgacaaatcttcctaaactgagcgctcttttggactcgttgaagcatggtgtctccctccagctgactcgcctgctatacagcctagcattctcttgtaggcagtacctaacccaaggaatgatactctcaatatcagtgccagctctgatgcgagtagaagcgcttgtctcggctttcaagggctcacatgatagctgccttgctgatgctgcttcgtatctgggtgccgaactgcagcgcctacctcgctgtggttgagcagaaatgtggtcaaggagccagtcagcttgctgctactgcacacaggtgatctcaataggagggtcttggcttggtatttctggcgccaagtgtatgagcagagccatcgcctcatcatgagaggcacggtgctgatttcaattgctactgtctggcatgggagtgctggggatttcaaaggtgatattctgagcttgagctcagttattctcgttatctacctcgtccttccactccgaaattctcaactggcagcgtacaagcccaggtat

SEQ ID NO: 1232 - DNA, 4774 bp, Panicum virgatum
gctatcccaaaagccaaaaactagccgagagaacggccgtctcaattcaaaatcccgcccactccctttctctctcgctcccccatcccctcttcctccccgtttcttccaccgcttcgccccccgaatctcaaaccctagtcaaacctcaccggcggcgagaggggagccccgcctccgcctccttcgcctactcctccgccatgaacaacttccacgtctacgaggccatcggccgcggcaagcactcgacggtgtataaggggcggaagaagaagaccatcgagtacttcgccgtcaagagtgttgacaagtcgcagcgctccaaggtcctcaacgaggttcggatgctccattctttagaccatgcaaatgtcctgaaattttactcatggtatgagacctctgcacatttctggttaatattggagtattgcgttggtggagacctgaagggcttgcttgagcaggataagaagcttcctgaaaattctattcatgacctggcttatgatctcatcagagctcttcagttcttgcattctcaaggaattatatattgtgatctgaagccatcaaacattctacttgatgaatttggatgcatgaagctgtgcgactttggattagcaaggcgcttaaaagacatcgagaaaaccaatcctggagatgtgccacaacccatgaggggtacaccatgctatatggctcctgaattatttcgagagggaggagtccactcatatgcttcggatttctgggcacttggttgtgttttgtatgaatgctatacaggaaggcccccttttgtgggtagagaatttacacagttagtcaaatctataatttcggatcctacaccgcctttgcctgataatccatcaaggtccttacaaaatctgattgattgcttgctcatgaaagatccggcagaaaggttacagtggtctgaattgtgtgaacacaacttttggagaaccagtataccgatgattcctttaccacttcagcctgcttttgacaacatgatcgaactttctgctacaccatatctagctgagagaaatggtgacaaaccttccagacagttgacaccacccaagcaccgtgagtatattggccttggccttaaaaagaaggatgagaattctgccaagggtttcacaacacctgttaagaatttgcaaagtggcaagagaaatagtgcgaaacctaaggctgatggtttcaaaggtgtaaatatcctcaggatgtctcgcatagctaagttgaatttgcaaagggaaagggacaaggagaactacaggcgtcctcccacagaaacatctgagaatgaaactgaagttaagatagaaaataatgacatggagcttgattttggtgaaaatccagagggagatgtgcctgatgacactgatggatctgatcatccaggatcagcagcacatgaaaagcctcaagccactgatggtaatgaagagaattgtatggcaaatcaggttgacatgcttacagatgaggggtcagttaagcccgatatcatgatgaaaactgagcagaattcttgttcagataacctggatgtggtggccactccaccaagtatctgtatgcgaaaagcacaacgtgcaaaggtaactccatgttctgcaaatggttctgagccaactaacatctttgaagcattctggcatccaacagaccttgcagttaaaccagttatgcctagtaggaaagcagatagagctgtggacacggttcccacacttcctttcgaagctcttacagcatgtgattatattaagttgccacaggagcagttgaatgcattcaacagtcagatacttcagagtttaagtggaacttttcaggtttcagaaaaacaaaatacaatcagatacctagagatgttaagcatgaactcagatgctgcaaacaaaataactaatggcccaattatgttgcttcttataaaaatgcttcgactgtcaaaaacttcagtcttacgtgtccaaattgcctcacttatggggttgctgatacgctattccacggctcttgatgtggagctggcaagttcaggaattctcaatgcgttatcagatggattaagggataagaatgataaactcaggagattctgtatggcaacactgggagagttgttattctacatttctaccaagtctgatcaagataccaaagaaatcaataaccaagaatcccctttgaaggataacaggcctgcaacttcatggcaggttcccaatgctgtaattgcactggtgtcatctatcttgcgaaagggtgaagatgatctagctcagttatatgccttacggacaatcgataacatatgtagccaaggaacagaatggacatcccgctttgcttcccaggatgcgattgggcacttgtgctacatctataaagcaactggaaagcaggagagtacaaggctcattgcgggatcttgtttggcccgcctttctcgcttcagtccatcatgtattcatttaatcctggagaagatatcattcaaggatattgcatccacactcatcaagggaaatccacgtgaacagcagattagtcttaatattctcaattcggcattagttaacagtcatactgtaacaagtatgaaccgctatattcattcattatcggatgacaaacaattggtccctgggctcatttctctgatagaacagggaactgatgttctgcgagggaaagcccttttgtttgttgctctactttgcaagaacagtcgaaggtggcttcctcatttcttttgcaatgcaaaattaatatcagcggttgatagattgggaaaggagaaggagggttttattcataaatgtacagaagcattcgtgcagttggtggcttctttggtcccttctattcttgacacagtctgcagtgatatacagcaggttatgactggcaaacgccatggacctgttactgctttagctgggcgagctcatccaaagagcacgatttatctgtttccagttattcttcatcttctgggaagtgcatccttcaggcacagagtcgtgacaagtcatgtattgcttcagctggcaaaccttattagaattttggaggcaccgtttcaggctagggatgatttccagatgacattgttgcgaattcttgaggctgctacagaggagccttctgttgtacttgatgaacacaaaatattcatcagtcgtatcatcccaagcttatccatcttatacaagggcaataaagatggtgatgccagatttctgtgtttgaagatactctctgatgtgatgattgtgatcttcagtgattcttcgttaactactgatgagcaaacgataagtgatttgaaatcgatctctttgaagcattttctgccactgtacccttcttttgcagaggatgaagatcccatacccatatatgcacagaaactgctagtaatgctactggaacatgattgtgtgaaagtctctgatattctgcacaaagcaacagtatcccaatgcttcgaatttttattaggagacctgtcaaatgcaaatgtaagcaatgtcaagctttgttttgccctggtatctgctcccgagatggacacccgtattctttctcagcttcaagttgttcgaagaatagggaacctgcttgagtttgttgctgcaaaagacatggatgattttcttgaaccaaccctagaactttgcagagctttcattatccgaggcattggcagcaacagaagtaccgccctctccaaaaacccagcactccttgttgacagtgccttcagcatgagcattgctgttgatcaacaaacttgtgttatggatatatgcgactttggtggcaacatgggtatttttcttgagatagttggcaattcagatccacagataagtgacttagcatcagattgtgtggttttgttactcaaggcagcacctcgagaggcaacagtgggcttgctgacgaatcttcctaaattgagtagtgtcatggacttgctgaagcatgacagctgcctacggctgactcgcttactatatggcctaggcttctcatgcagacaatatctagcccagggaatgatcctgtcaatatcaatgtcagctttgatgcgagttgaagcgcttgtttcagttttcaagggctccaatgataactttcttgctgatgctgcttcttatttgggcgctgaactgcagcgcttacctcgctgtggttgagctgcaacgtggccagggaggcaggctggctgcaattgtacgagtgatcttaataggatgcccttgcattccttcacctttcatgcaccatgcacatgagttgagcaagtgagcacaggacctattaagtgcaggttttctacatcagtggccagctggttgatctcaattgccactctttgccacgaccgattggtaccttggcttgttgatgtgcaggatgttcatggtgtcatttatcatctgtgatttggggctgctgtatatggtactttgtgaccatatctgaaaggtggcaagaagaaaataccccttatttcttcgccaattttggttggcaattacttttcagttctatgtaattctgcagtacctgtaatttatgtgaaaaactgtagtccagtatcataatgtgtacattatagataatcgcctgttatgtttcatgtcactgttaaaaaatccttggctcctgaatcttgatactatttgtgtagtcttttttctttttacaatagtgataa

SEQ ID NO: 1233 - DNA, 4718 bp, Sorghum bicolor
cgaaaactagccgagcgagagcggccgtctcaattcaaaatcccgcccccactctctctcacccccatatccctccccgtcttcctcccccattcctcccacaggcttcggcctcccgaatctcaaaccctaacctcaccggcgacgagaggggagccctgcctccgcctccgctcctgcttctctgctatgaacaacttccatgtctacgaggccatcggccgcggcaagcactcgacggtgtataaggggcggaagaagaagaccatcgagtacttcgctgttaagagtgtcgacaagtcgcagcgctccaaggtcctcaacgaggtccggatgctccattccttagaccatgccaatgtcctgaaattttactcttggtatgagacctctgcacatttctggttagtgttggagtattgcgttggtggagatctgaagggcttgcttgaacaggataagaagcttcctgaaaattctatacatgacctggcttatgatctcgtcaaagctcttcagttcttgcattctcaaggaattatatattgtgatctgaagccatcaaacattctgcttgatgaatttggatgcatgaagctgtgtgattttggattagcaaggcgcttaaaagacatcgagaaaaccaatcctggagatgtgccacaacccatgaggggaacaccatgctatatggctcctgagttatttcgtgagggaggagtccactcatatgcttctgatttctgggcacttggatgtgttttgtatgaatgctatacaggaaggcccccttttgtaggcagagaatttacacagttggtcaaatctataatctcggatcctacaccacctttacctgataatccatcaaggtccttccaaaatctgattgattgcttgctcatgaaagatccggcagaaagattacagtggtctgaattgtgtgaacacaacttctggcgaacaagtatcccgatgatttctttacctcctcagcctgcttttgacagcatgattgaactttctactgcaccatatctagctgagagaaatggtgacaaaccttctagacagttgacaccacccaagcaccgtgaatatagtggccatcggaagaaggatgaaaattctacaaaggcattcatgacacctgttaaaaatgtgctaagtggcaagaaaaacagtgcaaaaccaaaagctgagggtttcaaaggtgtaaatatcctcagaatgtctcgcattgctaagttaaatttgcaaagggaaagggataaggagaactacaggcgtcctccaacagaaacaactgagaatgagactgaagttaatatagaaaataatgacatggaacttgattttggtgaaaatccagagggtgatgtacctgatgacaccgatggatcggataatcctggatctgcaggaaatgaaaagcctcaaagcactgatgctaatgaagagaattgtatggcaaatcaggttgacatgcttacagatgaggggtcagttaagcctgatatcatggtgaaaactgagcagaattcttgttcagataatatggatgtggcggctacaccacctagtagcatgcgaaaagcacagcgtgcaaaggtagctccatgccctgcaactggttctgagccatctaacatctttgaagcattctggcatccaacagatcttgcagttaaaccagttatgcctagtaggaaagcagataaagctgtggacatggtccccacacttccttttgaagctcttacagcaagtgattatgttaagttaccacaggaacagatgaatgcattcaacagtcagatacttcagagtttaagtggaacttatcaggtttcagaaaaacaaaatactatcaggtacctggagatgttaagcatgaactcagatgccgcgaacaaaataactaatggaccagttatgtcgctactaataaaaatgcttcgactgtcaaaaacatcagtcttgcgtgtccaaattgcctcacttatggggttgctgatacgctattccactgctcttgatgtggagctagcaagttcaggaatttttaatgcactatcagatgggttaagggataaacatgataaactcaggcgattctgcatggcaacactaggagagttattattctatatttctacccagtctgatcaagatacgaaggaaatcaatacccaagaatcccctttgaaggataacaggtctgcaacatcttggcaggttcctagtgctgtaattgcactggtgtcatctatcttgcgaaagggcgaagatgatctagctcagctatatgccttacggacaatcgataatatatgtagccaaggaactgaatggacatcccgttttgcatctcaggatgcgattggacatctgtgctacatctataaagcaactggaaagcaggagagtacaaggctcattgcaggatcttgtttggcccgcctctctcgcttcagtccatcatgcattcacttaattctggaaaagatatcattcaaggatattgcatccacactcatcaagggaaatccacgtgaacagcagattagtcttaatattctcaattcggcattagttaacagtcacactgtgacaagcataaaccggtatattctttcattatcagatgacaaacaattggtccctgggctcatttctctgatagaacagggaactgatgtcctgcgtgggaaggcccttttgtttgttgctctgctttgcaagaatagtcgaaggtggcttccacatttcttttgtaatgcaaaattaatatcagctgttgatagattgggaaaagagaaggagggtttcattcatcaatgtacagaagcatttgtgcagttggttgcttcattggtccctggtattcttgacactgtctccagcgatatacagcaggttatggctggcaaacgccatggacctgttactgctttagctgggcgagctcatccaaagagcacaattcatttgttccctgttattcttcatcttctgggaagtgcatccttcaagcacagagttgtgacatgccatgtattgcttcagttggcaaatcttattaagattttggaggcaccatttcaggctagggatgatttccaaatgacattgttgcgagttcttgaggctgctacagaggagccttctgttatacttgatgaacacaaaatattcaccagtcgtatcattccaagcttgtctgtcttatacaagggcaataaagatggtgatgccagatttctgtgtttgaagatactctcagatgtgatgattgtgatcttcagtgactcttcattaacttctgatgaacagacaataactgatttgaaatcaatctctcagaggcattttttgccactgtacccttcttttgcagaggatgaagatcccatacccatatatgcacaaaaactgctagtaatgctaatggaacatggttgtgtaaaagtctctgatattctgcataaagcaacagtatcccagtgctttgaatttttgctaggagatctgtcaaatgcaaatgtaagcaatgtcaagctttgctatgccctggcatctgcacccgagatggacacccatattctttctcagcttcaagttgttagaagaatagggaacctacttgagtttgttgctgcaaaagacatggatgattttcttgaaccaaccctggaactctgcagagctttcattattcgtggcactgggagcaacagaagtattgccctctccaaaaacccagcacttcttgttgacagtgccttcagcatgagcattgctgttgatcaacaaacttgtgtcatggatatatgcgacttcggtggcaacatgggtatttttcttgagctagttggcaattcagatccacagataagtgatttagcgtcagactgtgtagtcttgttactcaaggcagcacctcgagaggctacagtgggcttgttgacaaatcttcctaaattgagcactgtcatggactttctgaagcatgacagctccctacatctgattcgcttattgtatggcctagccttctcatgcagacaatacttagcccagggaatgatcctgtcaatatcagtgtcagctttgatgcgagttgaagcacttgtttcagttttcaagggctccaatgatagccttctttctgatgccgctgcttatttgggcgctgaactgcagcgcttacctcgctgtggttgaagctgcaacttggccaaggaggcaggctggctggctattgttcaaggatgtcattgtattccttcacccttcgtgcaccatgtacatgagctgagcaagtgagcaggacgtcatcaagtgcagttcgtggctgctgtatatggtgcttctgattctgaaccatatctggaaggtggctagaagcaaagaacacttcatttcctcgccaattttggttggcaattacctcttcagttccatgtctgtagtacatgtaatttctttgagaatactgtagtccaatatcatgtgtacatcatctataaacacctgtgaagtttcatgtagctgttaaagggtccccttagctcctgaatcttggtacagtttttactttttttttgcaatagtgataacgtggtccattttgaagcattttgccatcatattttgtacaaattcgtggtaactagctattatgtcgattattgttgtctgctttggttcagttg

SEQ ID NO: 1234 - DNA, 4471 bp, Zea mays
accaggcacccccattccctccccgtcttcctcccccatttctcccacggcctcggcatcccaagtctcaaacgtcaaacccttacctcatcagcgacgagaggggagccccgcctccgcctcctgcttctctactatgaacaacttccatgtctacgaggccatcggccgcggcaagaactcgacggtgtataaggggcggaagaagaagaccatcgagtacttcgctgttaagagcgtcgacaagttgcagagctccaaggtcctcaacgaggttcggatgctccattccttagaccatgccaatgtcctgaaattttactcttggtatgagacaaccgtacatttctggttagtgttggagtattgcgttggtggagacctgaagggcttgcttgaacaggataaaaagcttcctgaaaattctatacatgacctggcttacgatctcgtcaaagcacttcagttcttgcattctcaaggaattgtatattgcgatctgaagccatcaaacattctgcttgatgaatttggatgcatgaagctgtgtgattttggattagcaaggcgcttaaaagacattgagaaaaccaatcctggagatgtgccacaacccatgaggggaacaccatgctatatggctcctgagttatttcgagatggaggagttcactcatatgcttctgatttctgggcacttggatgtgttttgtatgaatgctatacaggaaggcccccttttgtaggtagagaatttacgcagttggtcaaatctataatttctgatcctacaccacctttacctgataatccatcaaggtccttgcaaaatttgattgattgcttactcatgaaagatccggcagaaagattacagtggtctgaattgtgtgaacacaacttctggagaacaagtatcctgatgattcctttacctcctcagcctgcttttgacaacatgattgaactttctgctacaccatatctagctgagagaaatggtgacaaaccttccagacagttgacaccacctaagcatcgtgaaaatattggccttcggaagaaggatgaaaattctactaagccatccatgacacctgttaaaaatgtgcaaagtggcaagaaaaatagtgcaaaaccaaaagctgtgggtttcaaaggggtaaatatcctccgaatgtctcgcattgctaaattgaatttgcaaagggaaagggataaggagaactacaggcgtccgcccacagaaacaactgaaaatgagactgaagttaatatagaaaataatgacatggaacttgattttggtgaaaatccagagggtgatgcacctgatgacaccgatggatcagataatcctggatctgcaggaaatgaaaatcctcaaagcactgacgctaatgaagagaattatatggaaaatcaggttgacatgcttacagatgagggatcagttaagcctgatatcatggtggaaactgagcagaattcttgttcagataacctggatgtggcggcaagtccacctagtagcatgcgaaaagcacatcgtgcaaaggtaactccatgtcctgcaactggttctgagccatctaacatctttgaagcattctggcatccaacagatcttgcagttaaaccagttatgcctattaggaaagcagataaagctgtggacatgatccccacacttccttttgaagctcttacagcaggtgattatactaagttaccaaaggaacagatgaatgcattcaacagtcagatacttcagagtttaagtggaacttatcaggtttcacaaaaacaaaatactatcagatacctggagatgttaagcatgaactcagatgctgcgaacaaaataactaatggaccaattatgttgctactaataaaaatgcttcgactgtcaaaaacttcagtcttgcgtgtccaaattgcctcactcatggggttgctgatacgctattccactgctcttgatgtggagctggcaagttcaggaatttttaatgcactatcagatgggttaagggataaacatgataaactcaggcgattctgtatggcaacactaggagagttattattctatatttctacccagtctgatcaagataacaaggaaatcaatacccaagagtctcctttgaagggtaacaggcctgcaacatcttggcaggttcctagtgctgtaattgcactggtgtcatctatcttgcgaaagggcgaagatgatctagatcagctatatgccttacggacaattgataatatatgtagccaaggaactgaatggacatcccgttttgcatctcaggatgtgattggacatctgtgctacatctataaagcaactggaaagcaagagagtacaaggctcattgcaggatcttgtttggcccgcctctcccgcttcagtccatcatgcattcatttaattctggaaaagatatcattcagggatattgcatccacacttatcaagggaaatggacgtgaacagcagattaatctcaatattctcaattcggcattagttaacagtcacactgtgacaagcatgaaccggtatattctttcattatcagatgacaaacaattggtccctgggctcatttctctgatagaacagggaactgatgttctgcgtgggaaggcctttttgtttgttgctctgctttgcaagaatagtcgaaggtggcttcctcatttcttttgcaatgcaaaattaatatcagctgttgatagatttggaaaagagaaggagggtttcattcatcaatgtacagaagcatttgtgcagttggttgcttctttggtccctggtatccttgaaactgtctccagtgatatacagcagattatgtgtggcaaacgccatggacctgttactgctttagctgggcgagctcatccaaagagcacaattcatctgttccctgtcattcttcgtcttctgggaagtgcatctttcaagcacagagttgtgacaggccatgtattgcttcagttggcaaatcttattaagattttggaggcaccgtttcaggctagggatgatttccaaatgacattgttgcgagttctagaagctgctacagaggagccttctgttatacttgatgaacacacaatattcacaagtcgtatcattccaagcttatctgtcttgtacaagggcaataaagatggtgatgccagatttctgtgtttgaagatactctcagatgtcatgattgtgatcttcagtgactcttcattaacttctgacgaacaaatattaactgatttgaaatcaatctctcagaggcattttctgccactgtacccttcttttgcagaggatgaagatcccatacccatatttgctcaaaaactgctagtaatgctaatggaacatggttatataaaagtctctgatattctacacaaagcaacagtatcccaatgctttgattttttgctaggagatctgtcaaatgcaaatgtaagcaatgtcaagctttgctttgccctggcatctgcacctgagatgaacacccatattctttctcagcttcaagttgttagaaggatagggaacctacttgagtttgtcgctgcaaaagacatggatgattttcttgaaccaaccctggagttttgcagagctttcattattcgtggcactggcagcaacagaagtgtcgccctctccgaaaacccagcacttcttgttgacagtgccttcagcatgagtattgctgttgatcaacaaacttgtgtcacggatatatgcgactttggtggcaacatgggtacttttcttgagctagttggcaattcagatccacagataagtaatttagcgtcagactgtgtagtgttgttatccaaggcagcacctcgagaggctacagtgggcttgttgacaaatcttcctaaattaagcactgccatggacttgctgaagcatgagagctccctacgtctgattcgcttattatacggcctagccttctcatgcagacaatacttggcccagggaatgatcctgtcaatatcagtgtcagctttgatgcgagttgaagcacttgtttcagttttcaagggctccaatgatagccttcttgctgatgctgcttcttatttgagcgccgaactgcagcgcttacctcgctgtggttgaagctgcaacttgtccaaggaggcaaggatgcacttgtttttgctgtggttgaagctgcaacatgagctgagcaagtgagcaggacatcaagtacagttcggggctgctgtatatggtgcttttgaaccatatttggaaggtggctagaaggaaagaacactttgtttcctcgcgactttggttggcaattaccccagtttcatgtaattctgtaatacctgtaatttctctgagaatactgtagttcaatatcatgtgtaaataaatcatctataaatgcatgtgaagttcatgtac

SEQ ID NO: 1235 - DNA, 4353 bp, Triticum aestivum
aggtccggatgcttcattctttagatcatgcaaatgtcctgaaattttactcttggtatgaaacttcagcacatttttggctggtactggaatattgtgttggtggagacctcaagggcttgctcgagcaggataagaagctgcctgaaagtgccatgcatgacctggcttacgatcttgtcaaagccctcctgttcttgcattcacaaggaattatatattgtgatctgaagccatctaacatcctacttgatgagtttggatgcatgaagctgtgtgattttggattagcaagacgtttaaaggacatcgagaagaccgaccctggagatgtgccacaacctatgagggggacaccatgttacatggctcctgagttgttccaagagggaggggtccactcatatgcttctgatttctgggctcttggttgtgtgctatacgaatgctatgtaggaagacctcctttcgtgggccgtgaatttacccagttagtcaaatccatactttcagagcctgcaccacctttacctgataactcgtcaaggtctttccagaatctgatcaactgcttactcatgaaagacccagctgaaagactacagtggtctgaactatgtgcacacaacttctggagaaacagtatgccaatgattccgttacctcctcaacctgccttcgacaacatggttggacttcccactacaccatatctagctgagcgaaatggggataagccctccggacagctgacgccacccaagactcgtgaacacctacgcaagaaagatgaaaattctgccaaggtgttcacgacccctgttaagaatgtgctaactggtaagaaaaataatgcaaaaccttgtaaggctgatggtttgaagggtgtaaatgtccttagaatgtctcgcatagctaagaaaaatttgcaaagggaaaaagacaaggagaactacaggcgtcctcccacagaaacaaacgaaaatgaggctgaagttaagatagaaaataatgacatggagcttgattttggtgaaaatccagaaggcgatgcacctgatgataatgatggatcagataatgctggatccacagcagatgaaaagcatacgaccgaaggaactgatggaaatgaagagaactgcataaatcaggtggatatgctcacggatgagtgttctgttaagcctgataccatgttgaaagctgagcagaactgctcagagaatcttgatgtggtggccactccacctagtttctgtatgaggaaagcacgtccgaagataacttctggtgctgcaacgggttctgagccgtctaacatctttgaagcattctggcatccaacagatcttgctgttaaaccagttatgcccagtaaaaaagagataaggctaccgagactgtcactgtgcttccttttgaagctctccctgctgctgattacatcaggttaccacgagaacagatgaatgcattccatagccagataattcagagtttgagtggatcttttcaggtttcagaaaaacagaatatcatcagatacctggagttgttaagcatgaactctgatgctgcaaatataatcactaatggcccaattatgttattgcttataaaaatgcttcgactatcaaaaacttcagtcttgcgtgtccaggttgcttcactaatgggactgttgatacgctactccactatccttgatgcagagctagctagttcaggaattgttaatgccttgtcagatggcttaagggaccggcatgataaactgaggagattctgtatggcaacacttggagaattactgttctacatatcaactcaatctgatcaggatagcaaagaaagcaatgcccaagaatctcctatgaaggacaacaaagctggttctttgtggcaggtccctagttctgtaatcgcactggtgtcatctatcttgcgtaaaggggaagacgatctagcccagctttatgccttacggacaattgataatatatgtagccaaggaacagattggacatcacggtttgcttcccaagatgtaattggtcatctttgctacatctataaagcaactgggaagcaggagaatacaaggcttattgcaatttcttgtttgagccgcctagctcgattcagttcgtcatgtactcatttaatactggagaagctaacatttaaggatattgcatgcacactcctcaagggcaatccacgtgagcaacagataagtctgaatcttctgaactcggcattagggaacagtcatatcataccaaatatgagccgctatattctgtcattaaccgaggagaaacagttggtccctggacttatttctctgatagaacagggaactgacattctgcgtgggaaagcccttctatttgttgctcttctttgcaagaacagtcgaaggtggcttccacaattcttttgcaatgcaaagctactatcagcagtcgatagattgggaaaggagaaggatggtttcattcatcaatgtacagaagcatttgttcagttagttgcttcgttggtcccaggcattcttgacactgtatccagtgatatacagcaggtcatgggtggcaaacgtcatggacctattactgctttaactggacgtgctcatccaaagagcacaattcatttgttccctgtcatccttcatcttcttgggagtgtatccttcaatcacagagttgtgacaagtcaagtattgctccagttggctaatcttatgaagatattggagacaccatttcaggctcgggatgatttccaaatgacattgctgagggttcttgaggcagctacggaggagccttctgttatacttagggaacacacaatattcacaagtcgattccttccaagcttatccatcttatacaagggcaataaagattgtgatgccagattcctgtgtttgaagatactgtctgatgtgatgattgtgatcttcagtgattcttcattgactgcagacgaacaatgtttagctgacctgaaaacaatctctcacaaatattttctcccaatgtacccttcatttgcagaggatgaagatccaatacctatgtatgcacagaaacttctagtaatgctgatggaacatgattgtgttaaggtatctgatatcctgaatgaagcgacagtatcccagtgctttgaattcttgcttggagatctttcaaatgcaaacgtaagcaatgtcaagctttgttttgctctggcatctgctcccgacatggactccaatatcctttcgcagcttcaggttgtcagaagaatagggaatctacttgagtttgtgactgccaaagatatggatgattttctggaaccaaccttggaactgtgcagagctttcattatccgtggcaccggcagcaacagaagtatcgtcctcagcaaagaacctgcactccttgttgatagcgccttcagcatgagcattgctgtcgatcaacaatcttgcatcatggacatatgcgaccttggtggcagtatggctatatttctggaggtggttggaaattcagatccacagataagcgatttggcgtcagattgcgtggtgttgctgctcaaggcagcacctcgagaggccacaatgggcctgctgacaaatcttcctaagctgagcgctcttctggactcgttgaagcatggcgcccccttgccgctgactcgcctgctatacagcctagcattctcttgtaggcaatacctaacccaaggaatgatactctcaatatcagtgccagctctgatgcgagtagaagcgcttgtgtcgtctttcaagggctcacaggatagctgtcttgctgatgctgcttcgtgtgtgggtgccgaactgcagcgcctacctcgctgtggttgagcagagatgtggtgaaggaacccgtcagttggctgccattgcataagtgatcttaataggagggtcttggctcggcttggtatctctggcgccaagagtatgagcagggccattgcctcagttgctactgtctggcacgggagtgctgtccgtgcgcagggcaccgttacatgttatgtaatctttatccgcgatgatgtggggctgctgtatatggtacttttggccaaatctgtattcgccttgccagttttggttggcatgtaggttttcagtttcatgtaattccctagttgcgcatcatgatcatgtatacaacaatacatttgtcttatttctgttaccaagcaagtggtggaaatttccattgtttagatcgctacgaagtccgtataagcaacttttgcttcagtgtctataatgaagcatgcaatttatctgtagttgggttttgc

SEQ ID NO: 1236 - DNA, 4344 bp, Aegilops tauschii
atggcaatcccgctagcgtcgttgtgctcccagagtgcattgcaaagctggatgctggcatggacgactgaagcttctctggaagagcgcgaggaattgagagcggcgcaggatctttgcgtcaagacccccatccctaccctagtggagcgctggctcaaggccaacgaccatggcgtcacgtccaagatgcgagagaagagtggtgcaggagtggtgatgcgcgatcacgatggcacctttcgggcagctgcatggcactacttctcaactacctccgatccagagctagtggagatccttgtgtctcggagggcaatgcaattcgttgtcgagatgggtgtcacggagatcattgtggagcttgatagcaaaagcgtggcaagcatgatcagcgactcaaccaaaaacctctcggcagctgggccggttattgaagatcaaaaaatgctcaagtcttttgagaatcacaaaatcaaatgggtccggatgcttcattctttggatcatgcaaatgtcctgaaattttactcttggtacgaaacttcagcacatttttggctagtattggaatattgtgttggtggagacctcaagggcttgctcgagcaggataagaagctgcctgaaagtgccatgcacgccctggcttatgatctaagccctcctgtaaagtttatttggttcttgcattcacaaggaattatatattgtgatctgaagccatctaacattctacttgatgagtttggatgcatgaagctgtgtgattttggattagcaagacgtttaaaggacattgagaagaccgatcctggagatgtgccacaacctatgagggggacaccatgttacatggctcctgagttgttccaagagggaggggtccactcatatgcttctgatttctgggctcttggttgtgtgctttacgaatgctatgcaggaagacctcctttcgtgggccgtgaatttacccagttagtcaaatccatactttcagagcctgcaccacctttacctgataacacgtcaaggtctttccagaatctgatcaactgcttagtcatgaaagacccagctgaaagactacagttgtctgaactatgtgcacacaacttttggaggaacagtatgccgatgattcctttacctcctcagcctgcctttgataacatggttggacttcccactacgccatatttagctgggcgaaatggggagaaaccctccagacagctaacgccacccaagactcgtgaacacctacgcaagaaagatgaaattctgccaaggtgttcacgactcctgttaagaatgtgcaaaccaggtgtaaatgtccttagaatgtctcgcatagctaagagaaatttgcaaagggaaaaggccaaggagaactacaggcgccctcccacagaaacagacgaaaatgaggctgaagttaagatcgaaaataatgacatggagcttgattttggtgaaaatccagaaggcgatgcacctgatgataatgatggatcagataatgctggatccaaagcagatgaaaaacataggactcaaggaactgatggagatgaagagaactgcataaatcaggcggacatgctcatggatgagtgttctgttaagccggataccttgttgaaagctgagcagaactgttcagagaatcttgatgtggtggctactccacctagtttctgcatgaggaaagcacgtccaaagataacttctggtgctgcaacgggttctgagccgtctaacatctttgaagcattctggcatccaacagaccttgcagttaaaccagtcatgcccagtaaaaaaggagataaagctacagagaccatctccgtgcttccttttgaagctcttcctgccgctgattacatcaagttaccacgagaacaggtgaatgcattcaatagccagataattcagagtttgaatggatcttttcaggtttcagagaaacagaatatcatcagatatctggagttgttaagcatgaactctgatgctgcaaatataatcactaatggcccagttatgtcgttgctcataaaaatgctccgactatcaaaaacttcagtcttgcgtgtgcaggttgcttcacttatgggactgctgatacgctactccactatccttgatgcagagctagctagttcaggaattattaatgccttgtcagatggcttaagggaccggcacgataaactgaggagattctgtatggcaacacttggagaattactgttctacatatcaactcaatctgatcaggatagcaaggaaagcaatgccgaagaatctcctatgaaggacaacaaatctggtgctttgtggcaggtccctagtgctgtaatagcaccggtgtcgtctatcttgcgtaaaggggaagatgatctggcccagctttatgccttacgaacagttgataatatatgtagccaagggacagattggacatcacggtttgcttcccaagatgcaattggtcatctttgctacatctataaagcaactgggaagcaggagaatacaaggcttattgcaatttcttgtttgagccgcctagctcgattcagttcgtcatgtactcatctaacactggagaagctatcgttcaaggatattgtatgcacactctttaagggcaatccacgtgagcaacagataagtctgaatcttctaaattcggcattagtgaacagtcataccataccaaatatgaaccgctatattcagtcattaaccgaggagaaacagttggtccctggacttatttctctgatagaacagggatctgacattctgcgtggaaaaactcttctatttgttgctcttctttgcaagaacagtcgaaggtggcttccacaattcttttgcaatgcaaagctgctatcagcagtcgatagattgggaaaggagaaggatggtttcattcatcaatgtaccgtagcatttgttcagttagttgctttgttggtcccaggcattcttgacactgtatccagtgatatacaacaggtcatgggtggcaaacgtcatggacctattactgctttaacgggacgtgctcatccaaagagcacaattcatttgtttcctgttatccttcatcttcttgggagtgtatccttcaatcacagagttgtgacaagtcaagtattgctccagttggctaatcttacgaagatattggagacaccatttcaggctcgggatgatttccaaatgatattgctgcgagttctagaggcagctatggaggagtcttctgttatacttatggaacacaaaatattcacaagtcgattccttctgagcttattcatcttatacaagggcaataaggactgtgatgccagattcctatgtttgaagatactgtctgatgtgatgattgtgatcttcagtgattcttcattgactccagacgaacaaacgttagctgacctgaaaacaatctctcacaaatattttctcccgctgtacccttcatttgcagaggatgaagatccaatacctatgtatgcacaaaaacttctagtaatgctggtggagcatgattgtgttaaggtatctgatatcctgaatgaagcaacagtatcccagtgtttcgattttttgcttggagatctttcaaatgcaaacgtaagcaatgtgaagctttgttttgcactagcatctgctcctgacatggactccagtttcctttcacagcttcaagttgtcagaagaatagggactctggttgagtttgtgactgccaaagatatggatggttttctggaaccaaccttggaactttgcagagctttcattatctgtggcatcggcagcagcagaagtaccgcccttaccaaagaacatgcactccttgttgacagcgccttcaacatgagcattgctgttgatcaacaatcttgcatcatggatatatgcgacctcggtggcagtatgggtatatttcttgaggtggttggaaattcagatccacacataagcgatttggcgtcagattgcgtggtgttgctgctcaaggcagcacctcgagaggccacgatgggcttgctgacaaatcttcctaaactgagcgctcttttggactcgttgaagcatggtgtctccctccagctgactcgtctgctatacagcctagcattctcttgcaggcagtatctagcccaaggaatgatactctcaatatcggtgccagctctgatgcgagtagaagcgcttgtctcggctttcaagggctcacatgacagctgccttgctgatgctgcttcgtatctgggtgccgaactgcagcgcctaccttgctgtggttga

SEQ ID NO: 1237 - DNA, 3021 bp, Setaria italica
gtgacctgtgacatggtcacatactcacattgatgctcccacgcacgcagaatctgctgcgatgatcacctttggatcaagcgaactctgaaaggcatatcttggcgagatcacacggcggtaatacgatcgacacacacacacaacttggaggtacagtgtggatgaggttagagtgagaaagcgtgtgcatttgatcttcgatcccctccgttgggaaaggagtaaaaagcaaaggaaaccagcagctccgaaccccaagaaggccaccggaagaaaaagcgaaagaagaacagtgtggaagggaggagagagagagcgcgctcagagaggccggcgacggggcccgtgattccgttcaggcgttcagcccttcacctctttcccttccgccctttccccccctcctctcccaatccctctctgcagctagccgccttctctgacgctcatcctctcccaatccctcccaatccacaaaacgaccaccatgagcgtcgaaggaaggtgatggcaacccgcggctagccgcctgtccagggtaacccaactcaatggcgctgcagatggagcctccagtgccaccgccgcgccggtcggtgagcaccacctgcgatctccaccccggggagtccttcacgggcttctgcgccgcctgcctccgcgagcgcctggccgggctcgaggcctccgccgccgtggccgccgcgccgggccgcaagtccacctccgccatccgctccctcttctcccggccgttcaacgccgccgccgccgccggtggtggcccctcgggctccgccgcctccacgctgccggacctacgccgctgcaaatccttctcctgcgggcgcgggggcgacgccctggccgccgccgtcgccggcgccggcggggcgtacgagccgcaacggcggtcctgcgacgtgcgcgggcggagcacgctctgggcgctcttccaccaggacgaccgcgagcgggtccgcgacggcacggcgttcggcgccttcccggcctcatcctccgctgccgcggcggcgctcgccgccgaggtccttccgccccctcagccgccgcctcctccgccggcgtgcgtcccggaggtgttcctggaggaggagatcgctgtggccgaggattccgacgagattgttccggtggtggagcccgtcttggtggtggatacgtctggggagatggagaccgaggcctacgccgcggtgcgggacgtcagggccatgaaggatcacatagatctcgagtcctcgcagtcgcagcagcccaagaagccgccgcccaaggacctcaaggagatcgccgggagcttctggctcgccgcctcggtgttcagcaagaagtggcagaagtggaggcgcaagcagaagatcaagaagcaggaggccgccggcagcaaggctgcggcggcggcaatgcccccaccggagaagccgtccaagccctcattcctccggcggagccgcttccaccgtggcggagccggctctgagttcgctggcggccggcgctcgtgcgacacagacccaagattctccgttgacgccggccgcatgtccgtcgatgatgtgggcttctcctgggacgagccccgcgcgtcgtgggacggctacctgttcggcgccggcaccggcattggcctcggccgcgcgccgccgccggtctcccgcctacctcccatcctctccgcgctggaggactcccccgccggcatcgtcgagcgctccgacggccaaatccccgtggaagacgactcccagcccgagcccgacgccgacgccaacatccccggcggttcggcgcagacgcgagactactacatggacacgtcaagccggcggcgccggagccttgaccggtccagctccgtgcgcaggtccttcgaggtcaccgacccaaagccagttcctgtgcccgtgcccgtaccagtgccagtggccgcgccggccgccactgccaacggcaaggagtcccctctcatgggcagctcggagttctaccacttccagcacgcggaagacctgctcgaccaccaccgcttcagcaccagctccctcgtcgaggacttctccgccagcctggacggcgcgttccacggccccgcgaagaagccgcggcggtggagcaaagcgtggagcctctggggcctgatccaccgccgggccgccgggcgccgctccgccgcctcggacgcggcggaccgcgcgttctcggagccctggccggaactgcgcgtccgcgggtacaacggccggatgcagcggtgcaacagcaacgcgagcgcgcggagctcgttcagcagcaacagcggcgggctgggcagctcgaggcacagctacgtggacccccagggcaatgtcaagcggcggcgcgaggagtgcgcggcgctggagcggaaccgcagcgcgcggcactcgccggggcacgcggacaacggcatgctgcggttctacctaacgccgatgcggagcgccagcggccgccggacggccgtcctcccggcggcggccggcagctgaggtcgctgtcgttcgcgcggaccatgctggggctgtactgagtacgatgacggcgaggtgcagatgaagctgttacagtttcagtagttgatggattagatgttcaggggtttgggcagtggtggcataaccataaatcgtttacatccatgtgtagcgcagtgatgattttgttcattcgggggctggataacatgaagtttaatctcatgatctcgtcgtactactcggtgctgcttttctgtgaatccgttctcccatcggtactgtcctgtgttgctgcagtttgctcttttgctgtaatgctcgatggagggaaacaatcaaacaatcgagtagtcaagaagggaaaatttgttccagagcactccctgaaatggcgacatgctggagcaggcggccatggtcgacctcccgccttcttctccacaaggaacactagtgccttcttttcaaaaaaaaaaaaaaaggaacactagtagactac

SEQ ID NO: 1238 - DNA, 2786 bp, Zea mays
acagtggtacggagtgaaggttgagagcgtgtgcgcgcgtttcgatccccactcccttgggataggagtaaaagcgcacgagaagcagagcaagagagagagagaaagacatcacggtgtggtgtggaagaagcgaggcgttgggccccgtgattcccttcaactttcgctttctccccctcgggcctcgcctcctctctctctctctctctctctctctctctctctgcgccagtgcgccccacgctgcatcctcaaaaccattctccatcgaatccgtcgcgctcaaagcacgcccttcacagcacagctgcgagtgtgcgtgccaccgccgtgcgagccaagaaacgtgatgccgcgccgcggctaagaatcaggtgtattcttcaggctaacaagcgcgcgagacgacgcaatgacgctgcagatggagccgccggtgccgccgccgcggcggtcggtgtcgacgacctgcgacctccacccaggagaaaccttcacgggcttctgcgccgcctgcctccgcgagcgcctcgcggggctcgagtccaccggcggctccgccgcggccgccgcgccgggccgcaggtccacctccgccatccgctcgctcttcacccgcccgttcgccgccgccgccggcggggctccgtcgggatccggcgccgccgcgctgccggacctccgccgctgcaagtccttctcctgcgggcgcgggggcgacgcgctggccgccgcgggcgagccgcagcggaggtcgtgcgacgtgcgcgggcggagcactctctgggcgctgttccaccaggacgaccgccagcgggttcgcgacggcaccgcgttcggcgccttcccggcctcgtcctccgccgccgcggccgcgctcgccgccgaggtcctcccgcccccgcagccgccacctcccgcgtgcgtccctgagatgttctcggaggaggagatcgctgtggccgaggactctgacgagattgtcgcggtgatggagcccgtctcagtcgtgggcacctctggggagatggagacggaggtgagtgcggcgcgggacgttagggccatgaaggatcacatagatctcgaggcctcgcagtcgcagcagcccaggaagctgccgcccaaggacctcaaggagatggccgggagcttctggcttgccgcctccatgttcagcaagaagtggcagaagtggaggggcaagcagaagctcaagaagcaggaggccgcgggcagcaaggcggcggcggcggcaatgcccccgccggagaagccatccaagccctcgttcctccggcgtagccgcttccgccgtggcgaagccggctccgagttcgccggcggccggcgctcgtgcgacaccgacccacgattctccttggacgccggccgcatgtccgtcggtgacatgggcttctcctgggacgagccccgtgcgtcgtgggacggctacctgttcggcgccggcaccggcattggtctcggccgcgcgccgccgctctcccgtcttcctcctatcctctcggctatggaggactcccccgccggcattctggagcgctccgacggccaaatccccgtggaggacgactcccagccggagcccgaccacgacgcaaacgtccctgggggctcggcccagacgcgagattactacatggacacctcaagccggaggcgccggagccttgacaggtcgagctctgtgcggaggtcctttgaagtcaccgacccaaagccagtgccagtgccagtaccagtacctgttccagtgaccgcaccggccgccattgtcaacggcaaggaatcccctgcaatgggcagctcggagttctaccacttccaccacgccgaagacctgttcgaccaccgcttcagcaccaactcactcgtcgaggacttctccgccagcctggacgctgccttccacggccccgcgaagaagccgccgcggtggcgcaaggcgtggagcctctggggcctgatccaccgccgcgccgcggggcgcagggacggcgcgtccgacgccgccgaccgcgcgttctcggagccatggccggacctgcgcgtccgcgggtacaacggcaggatgcagcggtgcaacagcaacgccagcgcgcggagctcgttcagcagcaacagcggcggtctgggcagctccaggcgcagctacctggacgcccacgggaagcggaggcgcgaggagtgcgcggcgctggagcggaaccgtagcgcgcggcactcgccgggcaacgcggacaacggcctgctgcggttctacctcacgccgattcgtagcgccagcggccgccggacaggcgtcctcccggtgaaaggcggtcggcagctgaggtcgcagtcgttcgcgcggacgatgctggggctgtactagagtattgacgacggccacctgattgctggtcaagctgcttcatttcagtaggcagtagctgatggcttacatgttgagtagtttgggcgggtggtataaccaaaatcgtttacatctttgtgtagtgcagtgatccttttgttcattcggagggctggataaaatgaagtttaatctcgtaatcacgacttgactctgttgttgttctatgtctccgttgtcagtcgcaagtgtgcttcgtatctgcagcttgtcatcctatcatgcggccatcgccggctcattcatatttctttgtgtcaatgcataggatcgtgactccctggacaaggagatacaaaggtcgcaatggcgatatggggtagtcacatggtgcgccgcggcgttt

SEQ ID NO: 1239 - DNA, 2600 bp, Zea mays
gtggtggcgttcgcctgagacgaggacgccaaacgccgcggcgcaccatgtgactaccccatatcgccattgcgacctttgtatctccttgtccagggagtcacgatcctatgcattgacacaaagaaatatgaatgagccggcgatggccgcatgataggatgacaagctgcagatacgaagcacacttgcgactgacaacggagacatagaacaacaacacagagtcaagtcgtgattacgagattaaacttcattttatccagccctccgaatgaacaaaaggatcactgcactacacaaagatgtaaacgattttggttataccacccgcccaaactactcaacatgtaagccatcagctactgcctactgaaatgaagcagcttgaccagcaatcaggtggccgtcgtcaatactctagtacagccccagcatcgtccgcgcgaacgactgcgacctcagctgccgaccgcctttcaccgggaggacgcctgtccggcggccgctggcgctacgaatcggcgtgaggtagaaccgcagcaggccgttgtccgcgttgcccggcgagtgccgcgcgctacggttccgctccagcgccgcgcactcctcgcgcctccgcttcccgtgggcgtccaggtagctgcgcctggagctgcccagaccgccgctgttgctgctgaacgagctccgcgcgctggcgttgctgttgcaccgctgcatcctgccgttgtacccgcggacgcgcaggtccggccatggctccgagaacgcgcggtcggcggcgtcggacgcgccgtccctgcgccccgcggcgcggcggtggatcaggccccagaggctccacgccttgcgccaccgcggcggcttcttcgcggggccgtggaaggcagcgtccaggctggcggagaagtcctcgacgagtgagttggtgctgaagcggtggtcgaacaggtcttcggcgtggtggaagtggtagaactccgagctgcccattgcaggggattccttgccgttgacaatggcggccggtgcggtcactggaacaggtactggtactggcactggcactggctttgggtcggtgacttcaaaggacctccgcacagagctcgacctgtcaaggctccggcgcctccggcttgaggtgtccatgtagtaatctcgcgtctgggccgagcccccagggacgtttgcgtcgtggtcgggctccggctgggagtcgtcctccacggggatttggccgtcggagcgctccagaatgccggcgggggagtcctccatagccgagaggataggaggaagacgggagagcggcggcgcgcggccgagaccaatgccggtgccggcgccgaacaggtagccgtcccacgacgcacggggctcgtcccaggagaagcccatgtcaccgacggacatgcggccggcgtccaaggagaatcgtgggtcggtgtcgcacgagcgccggccgccggcgaactcggagccggcttcgccacggcggaagcggctacgccggaggaacgagggcttggatggcttctccggcgggggcattgccgccgccgccgccttgctgcccgcggcctcctgcttcttgagcttctgcttgcccctccacttctgccacttcttgctgaacatggaggcggcaagccagaagctcccggccatctccttgaggtccttgggcggcagcttcctgggctgctgcgactgcgaggcctcgagatctatgtgatccttcatggccctaacgtcccgcgccgcactcacctccgtctccatctccccagaggtgcccacgactgagacgggctccatcaccgcgacaatctcgtcagagtcctcggccacagcgatctcctcctccgagaacatctcagggacgcacgcgggaggtggcggctgcgggggcgggaggacctcggcggcgagcgcggccgcggcggcggaggacgaggccgggaaggcgccgaacgcggtgccgtcgcgaacccgctggcggtcgtcctggtggaacagcgcccagagagtgctccgcccgcgcacgtcgcacgacctccgctgcggctcgcccgcggcggccagcgcgtcgcccccgcgcccgcaggagaaggacttgcagcggcggaggtccggcagcgcggcggcgccggatcccgacggagccccgccggcggcggcggcgaacgggcgggagaagagcgagcggatggcggaggtggacctgcggcccggcgcggcggccgcggcggagccgccggtggactcgagccccgcgaggcgctcgcggaggcaggcggcgcagaagcccgtgaaggtttctcctgggtggaggtcgcaggtcgtcgacaccgaccgccgcggcggcggcaccggcggctccatctgcagcgtcattgcgtcgtctcgcgcgcttgttagcctgaagaatacacctgattcttagccgcggcgcggcatcacgtttcttggctcgcacggcggtggcacgcacactcgcagctgtgctgtgaagggcgtgctttgagcgcgacggattcgatggagaatggttttgaggatgcagcgtggggcgcactggcgcagagagagag

SEQ ID NO: 1240 - DNA, 3539 bp, Panicum virgatum
atgccgcccacatgccgcctcatggctctcacattggcgccggcctgttgatggctcccccctgatgcttttttatggtttcctccgtcccctctccacccaagtattgcctcgtcatctctgatctcggcagcacaaaactctgagatcttggcgtgctggtgataagattctcccgcacaagcacaagaccagagtgagcaagtggttcttggtctctccattgcctcccccatatcgcatttaaaatagatgctcgatgtctcctggctcaaccagttcagagcaccactaacgtttgtttttgccgttgctgctgcagagatcgctgagagagatcatacttggggaatggtgtggcgaggaatgtggactagttgtttactttgataatgcattggacacaagatcctctgtgaactcggcattttttcgagcaagtgcagtgaagaaaactggaggcccgaaggaattatactaatcttttcacagatcaagaaggaccggcaattaacaagtagcaggggaaggtgggggtgtgtcagctttgtgctttgtgggtgtccctcctctggttcactgccccccctctccactccactccactccatatagtttacttctcctgtagtttacttctcctgaggcgcttgtgctcctccccctctggcctcactgcctacgatagcagcagcaccggccgcataagtaggttgggggtggagtgtgcttgaagcaggagttgctgttgctgcatcgcaaccgatcccattatttgtttgttttcgttgtacgagcgatctcctggccggctccggcacgttgcaatattcggtcttctcggcgcagcaacttgttcttgtactgctgctctgctctgagccgtttgccgttgctgctctggacaagtatgggatagtgaagctgtgttgcagcagttcttgcttcttacaagtggtggtctttggtgctctctgtgcctgcattggtggtctatagaggggcacaagctgtgcggctcttctttcgtgtttcaagatgaagttcatgaagcttggatcaaatccggatacctttcagggtgatgggaatgaagtcagtattgtggcatctgaactggtgagcgacatcactgttcgtatagggactacaaagttttaccttcacaagtttccactcttgtccaagtgttctcgctttcaaaagttgatcccaaccactggtgatgaaaatattgacatccacatccatgacattcctggtggtgcaaaagcttttgagatctgtgccaagttttgctatggcatgatagtcacactcaatgcctacaatgtgattgctgcacgctgtgctgcagaatacttggagatgaatgagactgttgacaagggcaatctgatctacaagatcgatgtcttcctcagctcaagcatattgcgaagctggaaagactctataattgttcttgggacaacaaaggctcatttaccttgggcagaagatcttaagctggtcagccactgcattgattctgttgcttcaaaagcctctattgatgtttcaaaggttgaatggtcgtacacctacaaccgaaagaagctcccaactgagaatggcaatgattctccatggaatggagtcaaacagcagcagttagttccaaaggattggtgggttgaagatctgacggatctcgacattgatgcctacaagcaagtcatcacagcaatcaaagccaagggtatggtgcccaaggatgtgattggtgaggcaatcaaagcctatacttacaagaagcttccatcgttgagcaaggtatcaatgatccatggtgatgcaaaggttcgggcgatgctagttaccatcacatgcctgctgccatctgagaaaggttcagtctcatgcagcttcctcttaaagctactgaaggcaacaaatctgttgaagtgcggagagatgtgcaggaaagagcttatgaagcgtattgcccggcaactggaagaagcatcagtgtccgatcttctgatccctacagtggatggggataccactgtttacgacattgacctgattcttagcattgttgaagaatttgtcagacaagattgtaagaatgcccagaaacataatggtggggaggtgaatgatcatgtttccgctcctagtgcatcaatgattacagtggccaaaattgttgatggatatcttgcagaggttgcgaaggacccaaacataccagtttataagtttttcagtctagctgagatggtttccggcaattcaaggccagttcatgatgggttatatcgtgccattgatatgtatctcaaggagcacccagggttgggcaagagcgataagaagaggctctgtgccctaatggactgcaagaagttgtcgcctgatgcatgtgctcatgctgtgcagaacgagcgcctacctctgagaattgtggtgcaggtgctataccacgagcagacacgggcttcagcagcagccaccatccgagctgacagcatcggcatcggctcctacgagagctcaagatcaggtgccacaacaaacactgaagacgagtgggatggcgtcatggctgtggaagacctcagcctctccaagaccacaaagctcgacaaatgtgacaccgctggtactgacgctgagaagaaccatggtggcaagaaggcagccaacggcagggtgaaaggcggcgcgacgccgaagaaggcgctggggaagatgatgtcgagcaaagggcaggccggggagcgcagcagctcggattcgtcggacagcgccatcttgccgagccaggagcaccccaagaggacccccgcgagaagcaccaccaagtcagcagctgcgtagctgcggccctcactgaatgaaagcttcaggagggcactaggttttagcagtcgtctgttctttcttatgaatgttgcatagaagcaaggactgatgtttttacacgtctgtaggggatgtcataatgccagttcttttcttaggtgatgctgttagagtgtgtaggcttgccacgaaacctgtgaaatctggggttctatgtgttataagaagaagcctactgtactttgttagagttgaagcgtaactgttatggagctgtgcattcttgcgttccagtccgatatctgtcagatcttttgacgtgttagtgttactgtgcaatcgtgagcaaagaaaccttggcgagaatcatacaggatcgacgtctcaactctgaactagtacctcagatcacacaggatggtatggtatggtatcctattcagattcaggcaccaggtacccacaggcctcacaggaaacacatgagctaggccaacaataacgtactagccttgccgccaatttagtgtagctgaagagatgcaaagggatgcgaatgtgaacttgtgcaggcaggagatcaaaatgcctgggcccgggcatctgctaatttgaaatatcagcccggggcccggcccactcgatcaggttccctcactcaaatcagtgctggatcatgggcagtg

SEQ ID NO: 1241 - DNA, 3857 bp, Setaria italica
cgcaggaccgcgcgcggctagagagagagagaaggcgagctttctattccctcttcaaagcgccgcgccgctcagcgagcgaaccagtaacgagagcgaacagaccagcaaaggcagacgggggtagcaaaggcgagcaggaaagccttccgccaaagcgcccgctgctccctcgctcgctgtttgctagctgctgcttcttggcttcttgcggtgaggctcttcttgcccctttcttctccgccgatctcctctcgcttttctcttttctttcgctgttggatgttgcgtcacctcactagcttagcctgactgcttgagaagttgagatagagagagagagggtgtggccggcatgggtgctcgagaagagggaggcatgctgggggccgcctcttgagtccagcagcgctgccattggagggggagaaggacacctgcaagactgaggtctgcccgttgccctcgccaccgtctttttccccatcccaacaccggaggacgagcacaagcgcaagcaggggcggcagagcgacagccgcatgtgcacgcgaccggcgcatgcacacccttgcgtggccgcatctggggcgcactccccgtccccgtcttcccgagccggtacgtcgtccttgggtggctccattgctcgggggccgacgagggaagtctttttttctcggggtgggtctcacactgttcctctttctcgggtcatgcctgatgctggccctctgctttgcctttgttcttgcgtgccttgttgggtaccctgttttgttgccttccctctggtttgctataaacccttgatgccgcccacatgccgcctcatggctctcacattgttgatggcctcctgatccttcttttttatggtttcctccgtccccggccctctccccacacgtatttgtgtagcgtctctctctctctctctctttctccctcgtcatctgatctcggcagcacaaaactctgagatcttggcgtgctggtgataagattctcccgcacaagcacggaccggagtgagcaagtggttcttgagatcgctgagagagagcgagagaggggatcatacttggggaatggtgtggcgaggaatgtggactagttgtttactctgataatgcattgggcacaagatcctctgtgaatcttggcattttttagagcaagtgcagtgaagaaaactggagggctgaaggaattatactaatcttttcctggatcaagaaggacaggcaattaacaagtagcagggggaggtgggggtgtgtcagctttgtgctttgtgggtgtccctcctctggttcactgccccctctccactccatatagtttactcctcctgaggcgcttgtgctcctccccttctggcctcactgcctacgatagcagggctgcaggggcaccggccgcataggttggggttggagtgtgcttgaagcaggagttgctgttgctgcattggaaccgatcccattatttgtttgttttcgttgtacgagcgatctcctggccggctccggcacgttgtaatattcggtcttctcggcgcagcaacttgttcttgtaccgctgctctgctctgagccgtttgccgttgctgctgtggacaagcatgggatagtggtgctgtgctgtggcagttcttgcttcttacaagtgttggtggtggtgttgggtgctcactgtgcctgcattggtctagagcggaagctgtgggcctcttcttccgtgtttcaagatgaagttcatgaagcttggatcgaatccggatacctttcagggtgatgggaatgaagtcagtattgtggcatctgaattggtgagcgacatcactgttcgtattgggactacaaagttttaccttcacaagtttccactcttgtccaagtgtgctcgctttcaaaagttgatcccaaccactggtgatgaaaatattgacatacaaatccatgacattcctggtggtgcaaaggcttttgagatctgtgccaagttttgctatggcatgatagtcacactcaatgcctacaatgtgattgctgcacgctgtgctgcagagtacttggagatgaatgagactgttgacaagggcaatctgatctacaagattgatgtcttcctcagctcaagcatatttcggagctggaaagactctattattgttcttgggacaacaaaggctcatttgccttgggcagaggatcttaagttggttagccactgcattgattctgttgcttcaaaagcctctattgacgtttcaaaggtcgaatggtcatacacgtacaatcgaaagaagctcccaactgagagtggcaatgattctccctggaatggagtcaaacagcagcagttagttccaaaggattggtgggttgaagatctgactgatcttgacattgatgcctacaagcaagtcataacagcaatcaaagccaaatgtatggtatccaaggatgttattggtgaggcaatcaaagcctatacttacaagaagcttccatcattgagcaaggtatcaatgatccatggtgatgcaaaggttcgggcaatgctagttaccatcacatgcctgttgccatctgagaaaggttcagtctcatgcagcttccttttaaagctactgaaggcaacaaatctgctgaagtgtggagagatgtgcaggaaagagcttatgaagcgtattgcccgacaactggaagaagcatcagtgtctgatcttctgatccctacagtggacggtgataccactgtttatgacattgacctgattcttagcattgttgaggaatttgtcagacaagattctaagcatgcccagaagcataatggtggggaagtgaatgatcatgtttcagctcctagtgcatcaatgattacggtggccaaaattgtcgatggatatcttgcagaggttgcaaaggacccaaacatacctgtttataagtttttcagtctagctgagacagtttcaggcaattcaaggccagttcatgatgggctataccgtgccattgatatgtatctgaaggagcacccaagcttgggcaagagcgataagaagaggctctgcgccctcatggactgcaagaagttgtcgcctgatgcatgtgctcatgctgtgcagaacgagcgcctacctctgaggattgtggtgcaggttctataccacgagcagacaagggcttctgcagcagccaccatccgagctgacagcatcggcattggttcctacgagagctcaagatcaggtgccacaacgaacactgaagacgagtgggacggagtcatggccgtggaagacctcagcctgtccaagaccacaaagctcgacaaatgtgacaccgctggtactgacgctgagaagaaccatggaggcaacaaagcggccaatggcagggcgaaaggcggtgcaacgccgaagaaggcgctggggaagatgatgtcgagcaaaggacaggctggggagcgcagcagctcggattcatctgacagcgccatcttgccaagacaggagcaccccaagaggactcccgcaaggagtaccaccaagtcggcagccgcgtagctgcagccttcgctgaatgaaagcttcaggaggcactaggttttagcagtcgtctgttctttcttatgaatgttgcatagaagcaaggactgatgtttttacacgtctttagggatgttataatgccaggtctgttcttaggttgtgttggtagagtgtaggcttgccatgaaacctgtgaaatctgggggttctatgtgaggtcttatgtgtgaactcgaagtagtgttataagaagcctactttgttagagttgaaggataactgttctgca

SEQ ID NO: 1242 - DNA, 3478 bp, Panicum virgatum
ggtgggtctcacactgttcctctttctcgggtcatgcctgatgctgcctgcccttcgctttgcctttgttcctgcgcgccttgttgggtagcctgttttgttgccttccctctggtttgctataaacccttgatgccgcccacatgacgcctcatggctctcacattggcgccggcctgttgatggctcccctgaggcttttttatggtttcctccgtcccctctcgacccaagtattgccctcgtcatctctgatctcggcagcacaaaactctgagatcttggcgtgctggtgataagattctcccgcacaagcacagaccagaagatcgctgagagagagagagagagggaggacggatcatacttggggaatggtgtggcgaggaatgtggactagttgtttactttgataatgcattggacacaagatcctctgtgaatctcggcattttttagagcaagtgcagtgaagaaaactggaggcccgaaggaattatactaatcttttcacagatcaagaaggacaggcaattaacaagtagctgggggaggtgggggtgtgtcagctttgtgctttgtgggtgtccctcctctggttcactgcccccctctccactccatatagtttacttctcctgaggcgcttgtgctcctccccgtctggcctcactgcctacgatagcagcagcaccggccgcataagtaggttgggggtggagtgcgcttgaagcaggagttgctgttgctgcatcggaaccgatcccattatttgtttgttttcgttgtacgagcgatctcctggccggctccggcacgttgcaatattcggtcttctcggcgcagcaacttgttcttgtactgctgctctgctctgagccgtttgccgttgctgctctggacaagtatgggatagtggtgctgtgctgcagcagttcttgcttcttacaagtggtggtctttggtggtttctgtttctgcattggtggtctgtagaggggcggaagctgcgggactcttctttcgtgtttcatcaagatgaagttcatgaagcttggattgaatccggatacctttcagggtgatgggaatgaagtcagtattgtggcatctgaattggtgagcgacatcactgttcgtatagggactacaaagttttaccttcacaagtttccactcttgtccaagtgtgctcgctttcaaaagttgatcccaaccactggtgatgaaaatattgacatccacatccatgacattcctggtggtgcaaaggcttttgagatctgtgccaagttttgctatggcatgatagtcacactcaatgcctacaatgtgattgctgcacgctgtgctgcagagtacttggagatgaatgagactgttgacaagggcaatctgatctacaagattgatgtcttcctcagctcaagcatattccggagctggaaagactctataattgttcttgggacaacgaaggctcatttaccatgggcagaagatcttaagctggttagccactgcattgattctgttgcttcaaaagcatctattgatgtttcaaaggttgaatggtcatacacgtacaaccgaaagaagcttccaactgagaatggcaatgattctccctggaatggagtcaaacagcagcagttagttccaaaggattggtgggttgaagatctgacggatctcgacattgatgcctacaagcaagtcatcacagcaatcaaagccaagggtatggtgcccaagcatgtgatcggtgaggcaatcaaagcatatacatacaagaagcttccatcgttgagcaaggtatcaatgatccatggtgatgcaaaagttcgggcaatgctagttaccatcacatgcctgttgccatgtgagaaaggttcagtctcatgcagcttcctcttaaagctactgaaggcaacaaatctgctgaagtgtggagagatgtgcaggaaagagcttatgaagcgtattgcccggcaactggaagaagcatcagtgtctgatcttctgatccctacagtggatggggataccactgtttatgacattgacctgattcttagcattgttgaagaatttgtcagacaagactgtaagaatgcccagaaacataatggtggggaggtgaatgatcatgtttcagctcctagtgcatcaatgattacagtggccaaaattgttgatggatatcttgcagaggttgcgaaggacccaaacataccggtctataagtttttcagtctagctgaaatggtttccggcaattcaaggccagttcatgatgggttatatcgtgccattgatatgtatctcaaggagcacccaggcttgggcaagagcgataagaagaggctctgtgcgctcatggactgcaagaagttgtcgcctgatgcatgtgctcatgctgtgcagaacgagcgcctacctctgagggttgtggtgcaggtactataccacgagcagacaagggcttctgcagcagcgaccatccgagctgacagcatcggcatcggctcctacgagagctcaagatcaggtgccacaacaaacactgaagacgagtgggatggcgtcatggccgtggaagacctcagcctctccaagacgacaaagctcgacaaatgtgacaccgctgttactgacgctgagaagaaccatggtggtaacaagacagccaatggcagggtgaaaggcggcgtgacaccgaagaaggcggcgctggggaagatgatgtcgagcaaagggcaggccggggagcgcagcagctcagattcgtcagacagcgccatcttgccgagccaggagcaccccaagaggacccccgcgaggagcaccaccaagtcggcagccgcgtagctgcagccctcactgaatgaaagcttcaggagggcactaggttttagcagtcgtctgttctttcttatgaatgttgcatagaagcaaggactgatgtttttacacgtctgtaggggatgtcataatgccaggtctgttcttaggtgacgctgttagagtgtgtaggcttgccatgaaacctgtgaaatctggggttctatgtgaggtcttatgtcgaactcgaagtagtgttataagaagcctactactttgttagagttgaagcattactgttgtggagctgtggattcttgcattccagtccgatatgtgacacatcttttgacatgtttgtgatgtgcaatcgtgagcaaagaaaccttcctcgagatcacaacaggatcggcgtctgaactctgaactatctcagatcacacagggtgaaatggtatcctattcagattcgggcaccaggtacccaaaggcctcgcaggaagcaaatgagctagtgctaggccaacggtaatgtactagctgaacagatgcaagggaatgcgagtgtggaatatctgtgcttgtaattttcaaaaaagaatatctgtgcttgtcatatggtcgagttttagag

SEQ ID NO: 1243 - DNA, 2186 bp, Pennisetum glaucum
ctcattcatgtagtgtgtggttgcgtgctatgtggagttcgtgtgcctgtgttagtgagctagctgtgtgggctcttcgtccgtgttccaagatgaagttcatgaagcttggatcgaatccggatacctttcagggtgatgggaatgaagtcagcattgtggcatctgaattggtgagcgacatcactgttcgtatagggacgacaaagttttaccttcacaagtttccactcttgtccaagtgtgctcgctttcaaaagctgatcccaaccactggtgatgaaaatattgacatccacatccatgacattcctggtggtgcaaaggcttttgagatctgtgccaagttttgctatggcatgatagtcacactcaatgcctacaatgtgattgctgcacgctgtgctgcagagtacttggagatgaatgagactgttgacaagggcaatctgatctacaagattgatgtcttcctcaactcaagcatattccggagctggaaagactctattattgttcttgggacaacaaaggctcatttaccttgggcagaggatcttaagttggttagccgctgcattgattctgttgcttcaaaagccactattgacgtttcaaaggttgaatggtcgtacacgtacaatagaaagaagctcccgactgagagtggcaatgattctccctggaatggagtcaaacagcagcagttagttccaaaggactggtgggttgaagatctgactgatcttgacattgatgcctacaagcaagtcataacagcaatcaaagccaaaggtatggtgtccaaggatgttattggtgaggccatcaaagcctatacttacaagaagcttccatcgttgagcaaggtatcaatgatccatggtgatgcaaaagttcgggcaatgctagttaccatcacatgcctgttgccgtctgagaaaggttcagtctcatgcagcttcctcttaaagctattgaaggcaacaaatctgctgaagtgtggagagatgtgcaggaaggaacttatgaagcgtattgcccgacaactagaagaagcgtcagtgtccgaccttctgatccctacagtggacggtgataccactgtttatgacattgacctgattcttagcattgtcgaagaatttgtcagacaagattctaagcatgcccagaagcataatggtggggaaatgaatgatcatgtttcagttcctagtgcatcaatgattacagtggccaaaattgtcgatggatatcttgcagaggttgcaaaggacccaaacataccagtttataagtttttcagtctagctgagacagtttcaggcaattcaaggccagttcatgatgggctataccgtgccattgatatgtatctgaaggagcacccgaatttggggaagagtgataagaagaggctatgtgccctcatggactgcaagaagttgtcgcctgatgcatgtgctcatgctgtgcagaacgagcgcctacctctgaggattgtggtgcaggttctataccatgagcagacaagggcttcagcagcagccaccagcatccgagctgacagcatcggcattggctcctacgagagctcaagatcaggtgccacaacgaacactgaagacgagtgggatggcgtcatggctgtggaagacctcagcctgtccaagacaacaaagctcgacaaatgtgacaccgctggtaccgatgctgagaagaaccatggaggtagcaaggcggccaatggcagggcgaaaggtggtgcaacaccgaaggcgctgggaaagatgatgtcgagcaaaggacaggctggggagcgcagcagctcggattcatctgacagcgccatcttgccaaggcaggagcaccccaagaggactcccgcaaggagtaccaccaagtcggcagctgcgtagctgcagccttcgcttcctgaagcttctggaggcactaggttttagcggtcgtctgttctttcttatgaatgttgcatagaagcaaggactgatgtttttacacgtctgtagggatgttataatgccaggtctgttcttaatcttaggtgatgttggtagggtgtaggcttgccatgaaacctgtgaaagctaggggttgtatgtgaggtccttaagtctgaactcgaagtagtgttataagaagcctactttgttagagttgaa

SEQ ID NO: 1244 - DNA, 3369 bp, Zea mays
ccccacccaaatccggcccgccggcgcccctcgggttcaaactgatctaccagctggtgtaatctattgcattgcaccagacaaaggagacgagtgcacggctggctactcctctgcgcattccattccatgtactgtagcgtgcgtgcagctggaaagacggagacccgtaccgcgtagcatacaattacacacggactgccggccggccaccctgcacttgcagcaggaaagcaagctaggtgtggcgggtggcgcgcagggacgcagggtgggtgcgtgctttcagttcccctcttcattcaaagcgggcggagagtgcaacgagctactactactagagagcaaacagggcaaaggcgagcaggaaagccttccattccatcaaagggttcgctgctccctgcctcctcctcctccttcttcttggcatcttccgtcaaaggagaccgttgagagatcatactcggggaacggtacgctgtggcgaggaatgtggactactactagttgcttaataatatgacaacgcattggacgcaagatcccctctgaatcttggcagtatttttttcttatgagaagagggagtgaagagagctggactggagggtgcaaggaactattatacctattatactaatctttttcccagatcaacaaggacacgcaattaaacaagcagcagcagggggaggtgggggtgtgtcagctttgtgctttgtgggtgtccctcctctggctcactgcccccctctctctcactccatattgtttacttctcctgaggtacttgtgctcctgctctcccctcctggcctcactgcctacgatagcagcagcggcaccggccgcataagtaggttgggggggagggctggagtgcgcttcaagcacgagagcgctgttgctgcgtctgaaccgatcccattatttgtttggtttcgttgtacgagcgatctctctcctggccgggctccggcacgttgtaatattcggtcttctcggcgcagcagcaacttgttcttgtgcactgctacttcgctgctctgggccgtttgccgttgatgctgcggacaagtatgggatagtgctgctgtgctgtgcagttcttgcttcttacaactggtagtggtggtggtggtctggtctccgtgtgagcatttggtctagaagagcgtgaagctgcgcggctcttctttcttgttcaagatgaagttcatgaagcttggatcgaatccggatacctttcaggacgatgggaatgaagtcagtattgcggcatctgaattggtgagcgacatcactgttcgtatagggactacaaagttttaccttcacaagtttccgctcctctccaagtgtgctcgctttcagaagttgattccaaccactggtgatgaaaatattgagatccacatccatgatattcctggtggcgcaaaggcttttggggtctgtgccaagttttgctacggcatgattgtcacactcaatgcctacaatgtgattgcagcccgctgtgctgcagagtacttggagatgaatgagactgttgacaagggcaatctgatctacaagattgatgtcttcctcagctcaagcatattccggagctggaaagactctattattgttcttggtacaacaaaggctcatctaccttgggcagaggatcttaagctggttagccaatgcattgactctgttgcttcaaaagcctctatcgacgtttcaaaagttgaatggtcatacacatacaatcggaagaagctcccaactgagaatggtcatgattcgccgtggaatggagtcaaccagcggcaggttgttccgaaggattggtgggtagaagatctgacggatctcgacattgatgcctacaagcaagtcataacagcagtcaaaaccaagggtatggtggccaaggacgtgatcggtgaggcaattaaagcctacacttacaagaagctgccgtcactaagcaaggtctcaatgatccatggcgacgcaaaagttcgggcgatgctagttacaatcacatgcctgttgccatctgagaaaggctcagtttcatgcagcttcctcttgaagctactgaaggcaaccaatttgctgaagtgcggcgatatgtgcaggaaagagcttatgaagcgcattgcacggcaattggaagaagcatcagtgtcagatcttctgatccctgcagtggatgaggacaccagtgtttacgacattgacctgattcttagcattgttgaagaatttatcagacaggatagtaagaatgcccagagacataatggtggcgaagtgaatgaccatgtatcagctcctagtgcatcaatgattacagtggcaaagattgttgatgggtatctggcagaggttgcgaaggacccaaatataccggtctacaagtttttcagtctcgctgagacagtctcggccaattcaaggccagtccatgacgggctctatcgcgccattgatatgtatctgaaggagcacccaagcttgggcaagagcgacaagaagaggctctgtgccctcatggactgcaggaagttgtcgcccgatgcatgcgctcacgctgtgcagaacgagcgcctgcctctgagggttgtggtgcaggtgctgtaccacgagcagacgagggcttctgcagcagccaccgtccgagctgacagcatcggcatcggctcctacgagagctcaaggtcaggggccacaacaaacacagaagacgagtgggacggcgtcatggccgtggaagacctcagtctgtcgtccaagacgacgaagctagagaaatgtgacgcagctagcaccgtctcggagaagaaccacggcggcaacaagggtgccaacggcagggcgaaaggtggcgtgatgccgaagaaggcggtcgggaggacgacgatgtcaggcaacaaagggcaggctggggagcgcagcagctcggactcatccgacagcgccattttgccttgccagctggagcatcccaagagggccgcagcaaggagcaccaccaagtcagccgctgtgtagtagtagctgcccggccctttgctcagtgagatgctcaaggagcactaggttttagcagtcgtcgtccgttcttttctttgcgttatgaatgttgcatagaagcaaggaccatgttcttaaacgtcttgtaggccgggagcccgggatggtacgcgtacgttgttaggtgatgttgttagcatgtaggcttgccatgaaacctatgagaccttgggttgtgctgtgagggtttatgtcataagaagcctactttgttagagagttgaagcacgactgttctgcagctgtgaattcttggtgttctgctgtgagatc

SEQ ID NO: 1245 - DNA, 2966 bp, Zea mays
cacattgtgcagtgcctggtgcctcagtgcctgccctgccctgccctttgatatggtttctggttatttttattattccctcccttctgctggcccggcgcgcgcgtctctctcccttgccatctgatcgatctcggcaaaaaaactgcgagatcttggcgtgctgccggcgataagattctccccggcgcaagcacatcaccagagcgagcaagtggttcttgagatcgccgggagagagggacagatcatgctcggggaacggtgtgtggcgaggaatgttgactagttgtttaatatgagatcaagaaggacaaagcaattaaacaagcagcaggctttgtgctttgtgggtgtccctcctctggttcactgccccgctctccactccagctccatacaatagtttactcctcctgaggtactttgtgctcctcccccttctggcccctcactgcctacgatagcagcagcaccggccgcataagtaggttgggcgggcgctggagtgcgcttcaagcagcaggcgctgttgctgcatcggaacccatccccactatttgtttgttttcgctgtacgagcgatctcctggccggctccggcacgttgcaatattcggtcttctcttctcggcgcagcagcaacttgttcttgtgcgctgcctcgctgctctgagccatttgccgttgctgcggtggacaagtatgggatagtggttgtggtgctgtgcagttcttgcttcttacaagtggtggtggtctggtctctgcgtgagcattggactagaggagcgggaagctgtgcggctcctctttcgtggtcaagatgaagttcatgaagcttggatcaaatccggatacatttcagggagatgggaatgaagtcagtattgcggcatctgaattggtgagcgacatcactgttcgtatagggactacaaagttttaccttcacaagtttccgctcctatccaagtgtgctcgcttccagaagttgattccaactactggcgatgaaaatattgagatccacatccatgatattcctggtggtgccaaggcttttgagatctgtgccaagttttgctatggcatgattgtcacactcaatgcctacaatgtgattgccgcccgctgtgccgcagagtacctggagatgaacgagactgttgacaagggcaatctgatctacaagatcgatatcttcctcagctcaagcatacaccggagctggaaagactccataattgttcttggtacaacaaaggctcatttaccttgggcagaggatcttaagctggtcagccactgcattgactctgttgcttcaaaagcctctattgacgtttcaaaagttgaatggtcatacacatacaaccgtaagaagctcacagttgagaatggtcatgattcgccatggaatggagtcaagcagcagcagtttgttccaaaggattggtgggtcgaagatctgacagatctcgacattgacgcctacaagcaagtcataacagcagtcaaaaccaagggtacggtgcccaaggatgtgatcggtgcggcgattaaagcctacacttacaagaagctcccgtcactaagcaaggtctcgatgatccatggcgacgcaaaagttcgggctatgctagttaccatcacatgcctgttgccatccgagaaaggttcggtttcgtgcagcttcctcttgaagttactgaaggcaacaaacttgctcaagtgtggagagatgtgcaggaaagagcttatgaagcgcatcgcacggcaactggaagaagcgtcagtgtcagatcttctgatccctacggtggatggggataccaccgtttacgacatcgacctgattcttagcattgttgaagaatttgtcagacaagatagcaagaatgcccagagacataacggtggtgaggtgaacgaccacgtatctgctcctagtgcgtcaatggttgcagtggccaaaactgtcgatggatatctcgcagaggttgcaagggacccaaatataccggtctacaagtttttcagcctagctgagacggtttcggccggttcaaggccggttcatgatggactgtatcgtgccattgatatgtatctgaaggagcacccaagcttgggcaagagcgacaagaagaggctatgtgccctgatggactgcaagaagttgtcgcccgacgcgtgcgctcatgccgtgcagaacgagcgcctgcctctgaggatcgtggtgcaggtgctgtaccacgagcagacaagggcctgtgccgcagccaccgccatccgagccgacagcatcggcatcggctcctacgagagctcaaggtcaggcgccacaacgaacacagaggacgagtgggacggcgtcatggccgtggaggacctcagcctgtccaagacgacgaagctggtggacaaatgcgacacggcggccagtacggtcgtcgtggggaaggacaaggaccacggtggcaacaagggcgccaccggcagggtggccaaaggtggcgctggcgcggcgacaccaaagaaggcgctcgggaaaacggtgtccggcaaagggcagaccggggagcgcagcagctcggactcatccgacagcgccgtcgccgtcgcagtcttgaccagccaggagcatcccaagaggacgacccgcgcaaggaacgccgccaagtcggctgctgcgtagcccttccgctgagagaaatgctcaaggagcactagctaggttttagcagtcgtctgttctttgttattacgagtgttgcatagaagccaggaccatgttttttacacgtctgtagctgcctgtagggatggtgtaataccaggtacgtgcgttgttaggtgatgctgttagcacgtaggttccaaacctatgagaccttgggctctgctgggtttatgtcgaactcgcagttgtgttataagaatcctactttgatagacttaaa

SEQ ID NO: 1246 - DNA, 2930 bp, Hordeum vulgare
ggattcgtagggcctgaggaacggcgtgggaggaggaatgtggacgcgttgtttatggtactagcgcgagcgctggacacgagacactgcgtgattctttctttctttctcggtttaccggtgggcgctgcggcgagggagagcaaggaaatttattacggaagatctccctccgtcaggatcaaggaggacaggcggcggattaagaaatagcggcagggtggggaggagggggtggggctgtgtcagctttgtgctttgtgggtgtccgtccctccccgccattgtttactccccctgaggcgcttgtgctctcctcgccgccacaccagcccgcataagtaggccggggtggggtgggagtgtgcctccctcaaggaccgatccttgccgctattgtttccgttgtacgagcgccgggccgggcacgttgccatattccatcttcccccccttccgccgcccaccaccccaacctgcccaccggcctagctactcaagttgcttctgttccttgtacttgctgttcctttgccgtctggtcctggagccgttgttgccgttccttccctggacaagtagtatgatgggttagcacacaaagtcttctttttcttccccctcctcctcctcctgcagtggtgctctggtctgtgtgtgtgagcgcattggcctgggggagtgagaggctgcaaggtggtgcgcatactctgtttctttcaagatgaagttcatgaagcttggatcgaacccggacacctttcaggacgatgggggcgaagtcagaattgtggaatctgaattggttagcgatatcactgttcgtctagggaacacaaagttttaccttcacaagtttccacttctatccaagtgtgctcgctttcagaagttgatcccaactactggtgatgaaaatattgatatccacatccatgacattcctggtggctcaaaggcttttgagatatgtgccaagttctgctatggcatggttgtcacactcaatgcgtacaatgtcgttgctgcccgctgcgcagcggagtacttggagatgaatgaaactgtcgacaagggtaatctgatctacaagattgatgtcttcctcagctcaagcatattcaggagttggaaagattctattattgtccttgggacaacaaaggctcatttaccatggtcagaggatcttaagctggttagccactgcattgattccattgcttcaaaagcctctgttgacacctccaaggttgaatggtcatatacgtacaatcgcaagaagctcccaactgagactgaccttgatatgcaatggaatggagtaaagaagcagccgtccgtgccaaaggattggtgggtcgaggatctcacagatctcgacatcgattcctacaaacaagtcatatcagcaatcaaaacaatgggtatggtgcccaaggatgctgttggtgaggcaatcaaagcctacacatacaagaagctgccctcattaagcaaggtttcaatgatccatggtgatgcaaaggtgcgagcgatgctagttaccatcacatgcttgttaccatcagagaaaggctcagtctcatgcagcttcctgctaaagctactgagggcaaccaatttgcttaaatgtggagagatgtgcaggaaagagcttgtgaagagaattggacggcaactggatgaagcatccgtgtcagatcttcttattcctaccgtagatggggagacaactgtttatgacgttgacatgatcctcagtatcgtcgaagagtatgtgaagcaagatagcaaaaatgctcagaaacataatgctgaagtgaacggtcatgtgcaagcccctagtgcatctatgatcacagtagcaaaagtcgttgatggttatctcaccgaggttgcaaaggacccaaatacccctgttttgaagttcatcaatcttgcggaggcaatttcaggcaattcaaggcctttccatgatgggctataccgcgccattgacatgtatctgaaggagcacccaagcctaagcaagagcgataagaagaagctttgctgcctcatggactgcaagaagttgtcccctgacgcatgcgctcacgccgtccagaacgagcgcctccctctgaggaccgtggttcaggtgctataccacgagcagacaagggcatcggcggcagcgaccgtccgagctgacagcatctgcatcggctcctacgagagctcgaggtcaggcgccacaaccaacactgaagacgagtgggatggagtcatagcggtggaagacctcagcctttcatcaaagaccacgaagctagagaaatgccacagcaccgagaagagccacggcagcagcaagagcaccgccaacggcaaggccaagggcggcgcgacgccgaagaaggtcctggggaagatgctatcgagcaaagcgctgaccggggagcggagcagctcggactcgtcggacagcgccatcttgcggagccaggaccatcccaagaggactccgtccaggagcaccaagccgtcggctgctgcctagtccctgcatctcatctaaagagtggtgcttgcctagtccctgcacctcatctaaagggtggtgcttggggttttagctgctgctgctgctgctctcttcttctttatgaatgttgcatagaagcaagaactaatgtttttacaagtctgtagggatgttataatgtcaggtctgcttttagggggatcttgttgattagcatgtaggccttgccatgaaacctgtgagacctttggcgctgctgtgaggttttatgccattcactcctggtagttataagaggcctaatgtgttggaaccataagtttctttggccactgcgacgagcagacgacgtggttttagagcaccaccaggtcgaacacgttttactcttggttctgga

SEQ ID NO: 1247 - DNA, 3356 bp, Brachypodium distachyon
cccatactgttccataaatacgcatatactgtgttgccaaaagagccgctgagagagaaaaaagaaaaggaaaagcaagggcagggcactcctgcagcaggcgatcgagagagctttctattccctctcctgttgaaagcaaagcaggacgacccacgcacagaggcagctcctgtgggcaccgcgcaaacgagccaaccaacaaacagagaaaaccaaacaagacccaaaagcgatcgcagccccggctccctcaactcaaagcgcgaggaggccggccggcagctccgcgcgcccgctgctcccttgccgctcgctgcttgcttcccttccttcttggacacttgcgaggacggcggtggtggtgtgggtagtatacttggggagaggaggcacgcagcatcactcgctcctggcctggtgaccgcgctgccattggagggcgaggagaggaaggagaaggacacctgcctgcaactgcaagtgcaaggtcactctcgcttgatcgctactcgctggtgctgagagatttgtagccggatacgtggtttggggaatgctgtggggaggaatgtggaccagttgtttattgtgatggcgcgttggacacaagatcctgcgtgattcttggtttatcaaatcaaacggtaccggccggtgtgtgtgagagagaggaaataggtggggagttatacaaacaaatcttgatcagatcaaggacaggagattaacaaatagcaggaggaggtgggtttgtgtcagctttgtgctttgtggccgggtgtccctcctggttcattgcccccccttccccacaagtactccttatagtttactcctcctgaagccgcttgtgctcctccccgtctctcgctcgcctcactgcctacgctagcagcaacaactgcccgcataagtaggggctccggtggagtgtgctcgaagaacccatcctattgtttggttttctttcttcccgttgtacgaagtatctccgcgccgggcagggcacgttgcaatattccatctcgccgccgcagccaccggcctaggggtgtcaagttgcttctgcgccctgtacttgtgtcctctggagccgttgttgctgttcgtgccgtggacaaatatgggctagcaccgttgtttcttcttgtagtactggtctggaggactgagaagctgtgcatttgatcgtgctctcttgtttgtttcaagatgaagttcatgaagcttggctcgaatccggatacctttcaggatgatgggagtgaagtcagtattgtggaaagtgaactggtgagcgatatcactgttcggatagggagcacaaagttttaccttcacaagtttccacttctatccaagtgtgctcgctttcagaagttgatcccaactaccggtgatgaaaatattgaggtccctatccatgacattcctggtggcccgaaggcttttgagatatgtgccaagttctgttatggcattgttgtcacactgaatgcctacaatgtcattgcttcccgctgtgctgcggagtacttggagatgaatgaaaatgtcgacaagggtaacctcatctacaagatcgaggtcttcctcagctcaagcatattcaggagttggaaagactctattattgttcttgggacaacaaaggctcatttaccatggtcagaggatcttaagctggtaagccactgcattgactccattgcatcaaaagcttctgctgacacttccaaggttgaatggtcatatacgtacaatcgcaagaagctcccaacagagaatgatcttgatttgcaatggaatggtgtcaagaagcagcagtctgtgccaaaggattggtgggtcgaggatctcacagatcttgacattgattcctacaagcaaatcataacagcaatcaaaaccaagggtatggtaccgaaagatgttattggtgaggctattaaagcctacacatacaagaagctgccctcattaagcaaggtttcaatgatccatggtgatgcaaaggttcgagcaatgctagttaccatcacatgcttgttaccatcagagaaaggttcagtctcatgcagcttcctgctaaagctactgagggcagcaaatttgcttaaatgtggagagatgtgcaggaaagagctggtgaagcgtattgggcggcaactggatgaagctactgtgtcagatcttctgattcctacagtggacggggagaccactgtttatgacattgacatgattcttagtattgttgaagagtatgtcaggcaagatagcaaaaatgctcagaaacataatgctgctgaagtcagtggtcatatccaagcacctagtgcatctatgaatacagtaacaaaagttattgatgggtatctcaccgaggttgcaaaggacccaaatacacctgtcttgaagttcattaatcttgctgaagcagtttcaggcaactcaaggctgattcatgatgggttatatcgcgcaatcgacatgtatctgaaggagcacccaaacgtaagcaagagtgacaaaaagaagctttgcagcctcatggactgcaagaagttgtcgcccgacgcatgtgctcatgccgtgcagaacgagcgccttcccctgaggactgtggttcaggtgctataccatgagcagacgagggcttctgcagcagccacaatccgagctgagagcatctgcatcggctcctacgaaagctcaaggtcaggcgccacaacaaacactgaagatgagtgggatggagtcatggcagtggaagatctcagcctgtcgaagacaacaaaggtacacaccgccggtactaatgcagaaaagagccatggtagcaacaggagcaccagcagcaaggtgaaaggtgccgcgacaccaaagaaagctctagggaagatgttgtcgagcaagggtttgactggggagcgaagcagctcggactcatccgatagcgccatcttgcagcgccaggagcatccaaagaggactccctcccggagcacaaagccagctgccgcatagtcccctgcatttcaccaaagagaagtgatcctagattttagatgctgttggtctcttcttcttccttacgaatgttgcatagaagcaagtaatgttttacaagcctgtaggggatgtcacaatgtgaggtctgcttatagggcatcttattagcatgtaggcttgccatgaaacctatgagactctgggtgctactgtaaggttttatgtcattcgctcctagtggtttataagaagtgttagaaccataagtgcttttgccattgtgagcctgtgacgacctgatttcagatcactaccaagttaaactcagtttacctttc

SEQ ID NO: 1248 - DNA, 2577 bp, Secale cereale
accaggatcaggaaggacaggcggattaagaaattagcggcaggggaggaggaggaggtggtggtggggctgtgtcagctttgtgctttgtgggtgtccgtccctccccgccattgtttactccccctgaggcgcttgtgctcctcgccgcaacaccaccccgcataagtaggccggggtggggtggggtgtgcctccctcaaggaccgatcctatttgtttcgtcttgtttccgttgtacgagcgccgggccgggcacgttgcgatattccgtctcccctcccctccccccttgcgccgcccaccaccccaccggcctagcttactcaagttgcttctgttccttgtacttgctgtttctttgccgtctgcactctggagccgttgctgtttgttccctggacaagcatgatgggttagcatagcacacaagtcgtcctcttcttcttcctcctccggcagtgctggtctggtctctgtgtgagaagctgcaaggtggtgcgcacattttgttcttcctttgaacctctgtttccttcaagatgaagttcatgaagcttggatcgaatccggacacctttcaggacgatggcagcgaagtcagaattgtggaaactgaattggtgagcgatatcactgttcgtctagggaacacaaagttttaccttcacaagtttccacttctatccaagtgtgctcgctttcagaagttgatcccaactactggtgatgaaaatattgatatccacattcatgacattcctggtggcccaaaggcttttgagatatgtgccaagttctgctatggcatggttgtcacactcaatgcgtacaatgtcgttgctgcccgctgcgctgcggagtacttggagatgaatgaaactgtcgacaagggtaatctgatctacaagattgatgtcttcctcagctcaagcatattcaggagctggaaagattctattattgtccttgggacaacaaaggctcatttaccgtggtcagaggatcttaagctggttagccactgcattgattccattgcttcaaaagcttctgttgacacctccaaggttgaatggtcatatacgtacaatcgcaagaagctctcaactgagaatgaccttgatatgcaatggaatggagtcaagaagcagccgtctgtgccaaaggattggtgggtcgaggatctcacagatcttgacatcgattcctacaagcaagtcatatcagctatcaaaacaatgggtatggtgcccaaggatgctgttggtgaggcaatcaaagcctacacatacaagaagctcccctcattaagcaaggtttcaatgatccatggtgatggaaaggtccgagcgatgctagttaccatcacatgcttgttaccatcagagaaaggctcagtctcatgcagcttcctgctaaagctactgagggcaaccaatttgcttaaatgtggagagatgtgcaggaaagagcttgtgaagagaattggacggcagctggatgaagcatctgtgtcagatcttcttattcctacagtcgacggggagacaactgtttatgacattgacatgatccttagtatcgtcgaagagtatgtcaggcaagatagcaaaaatgctcagaaacataatgctgaagtgaacggtcacgtgcagacacctagtgcatctatgatcacagtagcaaaagttgttgatggttatctcaccgaggttgcaaaggaccccaatacccctgttttgaagttcatcaatcttgctgaggcaatttcaggcaactcaaggcctttccatgatgggctatatcgcgccattgacatgtatatgaaggagcacccaagcctaagcaagagcgacaagaagaagctttgctgcctcatggactgcaagaagttgtcgccagaagcatgcactcacgccgtccagaacgagcgcctccctctgaggactgtggttcaggtgctataccacgagcagacaagggcatccgcggcagcaacggtccgagctgacagcatctgcatcggctcctacgagagctcaaggtcaggcgccacaacaaacactgaagatgagtgggatggagtcatagcagtggaggacctcagcctttcatcaaagaccacgaagctggagaaatgtcacagcgccgagaagagccacggcagcagcaagagcaccaccaacggcaaggcgaagggcggcgcgacaccgaagaaggtcctcgggaagatgctgtcgagcaaagcactgacaggggagcgaagcagctcggactcgtccgacagcgccatcttgcggagccaggaccatcccaagaggactccctccaggagcaccaagccggcggctgcctagtcctccctgcatctcatcaaaagagtggtgctgggttgttagctgctgtctcttcttcttctttatgaatgttgcatagaagcaagaactaatgtttttacaagtctgtagggatgttataatgtcaggtctgcttttagggggatcttgttatttagcatgtaggctttgccatgaaacctgtgagacctttggtgctactgtgaggtttatgcca

SEQ ID NO: 1249 - DNA, 2229 bp, Triticum aestivum
ttgttcgtgctttgaacctctgtttctgtcaagatgaagttcatgaagcttggatcgaacccggacacctttcaggacgatgggagcgaagtcagaattgtggaaactgaattggtgagtgatatcactgttcgtctagggaacacaaagttttaccttcacaagtttccacttctatccaagtgtgctcgctttcagaagttgatcccaactactggtgatgaaaatattgatatccacatccatgacattcctggtggcccaaaggcttttgagatatgtgccaagttctgctatggcatggttgtcacactcaatgcgtacaatgtcgttgctgcccgctgcgctgcggagtacttggagatgaatgaaactgtcgacaagggtaatctgatctacaagattgatgtcttcctcagctcaagcatattcaggagttggaaagattccattattgtccttgggacaacaaaggctcatttaccatggtcagaggatcttaagctggttagccactgcattgattccattgcttcaaaagcctctgttgacacctccaaggttgaatggtcatacacgtacaatcgcaagaagctctcaactgagaatgaccttgatatgcaatggaatggagtcaagaagcagccgtctgtgccaaaggattggtgggtcgaggatctcacagatctcgacatcgattcctacaagcaagtcatatcagctatcaaaacaatgggtatggtgcccaaggatgctgttggtgaggcaatcaaagcctacacatacaagaagctcccctcactaagcaaggtttcaatgatccatggtgatggaaaggtccgagcgatgctagttaccatcacatgcttgttaccatcagagaaaggctcagtctcatgcagcttcctgctaaagctactgagggcaaccaatctgcttaaatgtggagagatgtgcaggaaagagctggtgaagagaattggacggcagctggatgaagcatccgtgtcagatcttcttattcctacagtcgatggggagacaactggttatgacattgacatgattcttagcatcgtcgaagagtatgtgaggcaagataacaaaaatgctcagaaacataatgctgaggtgaacggtcacgtgcaagcacctagtgcatctatgatcacagtagcaaaagtcgttgatggttatctcaccgaggttgcaaaggaccccaatacccctgttttgaagttcatcaatcttgctgaggcaatttcaggcaattcaaggcctttccatgatgggatatatcgcgccattgacatgtatatgaaggagcacccaagcctaagcaagagcgacaagaagaagctgtgctgcctcatggactgcaagaagttgtcgccagaagcatgcgctcacgccgtccagaacgagcgcctccctctgagaaccgtggttcaggtgctataccacgagcagacaagggcatccgcggcggcgaccgtccgagctgacagcatctgcatcggctcctacgagagctcaaggtcaggcgccacaacaaacactgaagacgagtgggatggagtcatagcggtggaggacctcagcctttcatcaaagaccacgaagctggagaaatgccacagcgccgagaagagccacggcagcagcaagagcaccaccaacggcaaggccaagggcggcgcgacgccgaagaaggtgctggggaagatgctgtcgagcaaggcgctgaccggggagcgaagcagctcggactcgtcggacagcgccatcttgcggagccaggaccatcccaagaggaccccctccaggagcaccaagccgtcggctgctgcctagccctccctgcatctcatcaaaagagtggtgctggggttttagctgctgcctcttcttctttatgaatgttgcatagaagcaagaactaatgttttttacaagtctgtagggatgttataatgtcaggtctgcttttagggggatcttgttgtttagcatgtaggctttgccatgaaacctgtgagacctttggtgctgctgtgaggttttatgccgttcactcactcctggtagttataagaggcctaatgtgtttggaccttaagttgctttggccactgcggcgacgtgattttagatcagtaccagtaccaggttggacacggtttacccttggttctggacgtggtatcctgagctaagaattgcagatta

SEQ ID NO: 1250 - DNA, 3330 bp, Oryza sativa
cgtcctactaccaccagcagcaacagcagcagcagaggcaggctggaccgcggcgagagagctttctattcccctctcgaaatcggcagcgaaagacgacgtcgtcctcgtcccacccgcgcccgcataaacgctacagtggtggtggcaccctgcaccgcccaacgaacgccaaaagcaggctgctcatttcaaaggcggaggaggaggaggagaggagacaggaaagccttccatccaaccatcgctgcccccttgccccttcttggcctcttgcgagatttgtagtagagagatcacctgcttggggaacagtgttggtggagaggaatgtggactcgttgtttatgagagagcggtgctgcattggacacaagatcttgcgtgattcttggttaattaaaacaaagttgggcgaggtggaagaagggaattatactaatcgcctctcagatcagcaaggacaggcagcaattaacaggtagcagcaggaggaggtggggttgtgtcagctttgtgctttgtgggtgttgtccctcctggctccttgcctccctctctctctctctctctctcttcatataggagtagtttacttccattgaggtgcttgtgctcctcaccattcttgcctcattgcctacgatagcagcagcatcagcccgcataagtaggttcaacttggagtgtgcttgaagcagcagtttgagtgctgtgctgctgttgctgttactggcttgctgctagccgcatcagggcctgctactatctcgtagtctgttcttgttttccgttgtacgaacgatctcccgggcacgttgcaatattcggtcgccgtctcagccgcagccaccagcagggtgcagcaagttgttctgctccttgtacttgtttgctcctgggtactagttgctgttcatcttgtgtagataaatatgggctagtagtggagttgttgcattggttgcagcgttgttgttgtgttagtggtggtggtggtggtttgtgtgtttgggcgtcgatcaggagagataagatttaagatcagcgcgtgtgcgtctgttctttgcctgtttcaagatgaaattcatgaagcttggatcgaacccggatacttttcaggatgatggcaatgaagtcagcattgtggcaactgaattagtgagcgatgtcactgttcgcatagggactacaaagttttaccttcacaagttcccacttctgtccaagtgcgctcgctttcagaagatgatcccaactactggtgatgaaaacattgagattcacatccatgatattcctggtggcgccaaggcttttgagatctgtgccaagttttgttatggtatgattgtcacgctcaatgcctacaatgtcattgcagcccgctgcgccgcagagtacttggagatgcatgaaactgtcgacaagggtaatctcatctacaagattgaggtcttcctcagctcaagcattttccggagttggaaggactctatcattgttcttggtactacaaaggctcacttgccttggtcagaggatcttaagctggttagccactgcatcgactccattgcttcgaaagcctccactgacacctccaaggttgagtggtcatattcatacaatcgcaagaagctcccaactgagaatggccttgatttggaatggaatggagtcaagaagcagcagtttgtgccgcatgattggtgggtcgaggatctcgcagatctcgacattgattcatacaagcaagtcataacagcaatcaagaccaagggtatggtgcccaaggatgtgattggggaggcaatcaaggcttacacatacaagaagctcccttccttaagtaaggtttcaatggtccatggcgacgcaaaagttcgggccatgctagttaccatcacatgcttgttgccatcagagaaaggatcagtttcatgcagcttcctcttaaagctactgaaagcaacaaatttgctaaaatgtggagagctctgcaggaaagagcttatgaagcgtattggacggcaactagatgaagcgtccgtgtcggatcttctgattcctacagtggatggggagaccacagtttatgacattgacatgatactcagtatagtggaagaatttgtcaggcaagacagtaagaatgctcagaaacataatggtggtgaagtggacagtcatgtccaagcacctagtgcatccatgatcaaagtggctaaagtggttgatgggtatcttgctgaggttgcaaaagatccaaatacacccattttgaagttcattcatctagccgagacaatgtcgataaattcaaggccagttcatgatgggctataccgcgccatcgacatgtatctgaaggagcacccaagcttgggaaagaatgagaagaagaagctgtgcagcctcatggactgcaagaaactctcaccggacgcgtgtgctcacgcggtgcagaacgagcggctgccactgaggaccgtggtgcaggtgctgtaccacgagcagacgagggcttctgcggcggtcaccatccgagccgacagcatctgcgtcggctcgtacgagagctcgaggtcaggcgccaccaccaacacggaggacgagtgggacggcgtcatggtcgtggaagacctcagcctgtccaccaagaccaccaccaagctagacggcgcagccaatagccattgcagcaacggcaaggcgaagaaaggcggcgcgtcgacgccgaagaaggcggctcaccggaggacgacgacggtgccaaccggcaaagggcagtccggtgagcgcagcagctcggactcgtcggacagtgcgatcttgcagaagctggagcttcccaagaggaccccctccaggagcacgaagccggctgctgtgtagcgttagcttcctgcatgaattctcagtggattcgtaaggatcgttaggttcttagctgctgcttcttttctttctttcttcatgaatgttgcatagaagcaagaactaatggtttacacgtctgttggtagggatgttataatgtgaggtctgcttttaggtgatcttgttagtagcattgtaggcttgccatgaaacctatgaaaatgttggttgctactttgaggttttatgccatactcagaagttagtagctgttatgaaaaaagtttagaactttgttagaacttggaagcataattcatctgctgctagcctgtttatactggtatagtggtatgatctcagttcagatcgtgcaaagtcttgtgtaatttgtaattagacaatgctgtcctgagccaagaataacagagctgcggaccaaatagg

SEQ ID NO: 1251 - DNA, 3275 bp, Aegilops tauschii
tttctattccattccccccctcctctcctctcctgtcgaaagcaaagcagaagcaggagcacagtgagctgaggctgagcgagcgagtgaggctgtgggcgcggcggcaaagaaaacccaacaaaacccaaaagcgaccgatcgatcccggcagcccggctccctcaaaggcgaggaaagccttccgtccgagcacccgctgcccccttgccgctcgctcgctcgctccttggacgcttgcgagatttgtagggtctgggaggaggaatgtggacgcgttgtttatgctaggcgcgagctttggacacgagatcctgcctgcgtgattctttctcgctttctcggtttaccggtgctgtagcggggaaagggaaatttattgcggaagatctcaatccaccgggatcaagaaggacaggcggattaagaaatagatagcggcaggggaggaggaggaggtggggctgtgtcagcttcccccccccccccccccccccccccccccccccccccccccccccccccccccccccccccccccccccccccccccccccccccccccccccccccccccccccccccccccccccccccccccccccccccccccccccccccccccccccccccccccccccccccccccccccccccccccccccccccccccccccccccccccccccccccccccccccccccccccccccccccccccccgcccccccccgccattgtttactccccatgaggcgcttgtgctcctcgccgcagcaccaccccgcataagtaggccggggtggggtggagtgtgcctccctcaaggaccgatcctgctgctgctgctgctgctattgtttccgttgtacgagcgccgggccgggcacgttgccatattccatctcccctcccccccttccgccgcccaccaccccaccggcctagcttagccaagttgcttctgttccttgtacttgctgtttctttgccgtctggtcctggagccgttgctgtttgttccctcgacaagtatgatgggttagcatagcacacaagtcttcttcttcttcttcctcctcctcctgctcctgcagtggtggtcagcgcattggcctgggggagtgagaggctgcaaggcaaggtggtgtgctgtgctgcgtacttgttcgtcctttgaacctctgtttctgtcaagatgaagttcatgaagcttggatcgaacccggacacctttcaggacgatgggagcgaagtcagaattgtggaaactgaattggtgagtgatatcactgttcgtctagggaacacaaagttttaccttcacaagtttccacttctatccaagtgtgctcgctttcagaagttgatcccaactactggtgatgaaaatattgatatccacatccatgacattcctggtggcccaaaggcttttgagatatgtgccaagttctgctatggcatggttgtcacactcaatgcgtacaatgtcgttgctgcccgctgcgctgcggagtacttggagatgaatgaaactgtcgacaagggtaatctgatctacaagattgatgtcttcctcagctcaagcatattcaggagttggaaagattccattattgtccttgggacaacaaaggctcatttaccatggtcagaggatcttaagctggttagccactgcattgattccattgcttcaaaagcctctgttgacacctccaaggttgaatggtcatacacgtacaatcgcaagaagctctcaactgagaatgaccttgatatgcaatggaatggagtcaagaagcagccgtctgtgccaaaggattggtgggtcgaggatctcacagatctcgacatcgattcctacaagcaagtcatatcagcaatcaaaacaatgggtatggtgcccaaggatgctgttggtgaggcaatcaaagcctacacatacaagaagctcccctcactaagcaaggtttcaatgatccatggtgatggaaaggtccgagcgatgctagttaccatcacatgcttgttaccatcagagaaaggctcagtctcatgcagcttcctgctaaagctactgagggcaaccaatctgcttaaatgtggagagatgtgcaggaaagagcttgtgaagagaattggacggcagctggatgaagcatccgtgtcagatcttcttattcctacggtcgatggggagacaactggttatgacattgacatgattcttagcatcgtcgaggagtatgtgaggcaagataacaaaaatactcagaaacataatgctgaggtgaacggtcacgtgcaagcacctagtacatctatgatcacggtagcaaaagtcattgatggttatctcaccgaggttgcaaaggaccccaatacccctgttttgaagttcatcaatcttgctgaggcaatttcaggcaattcaaggcctttccatgatgggctataccgcgccattgacatgtatatgaaggagcacccaagcctaagcaagagcgacaagaagaagctgtgctgcctcatggactgcaagaagttgtcgccagaagcatgcgcccacgccgtccagaacgagcgcctccctctgagaaccgtggttcaggtgctataccacgagcagacaagggcatccgcggcggcgacggtccgagctgacagcatctgcatcggctcctacgagagctcaaggtcaggcgccacaacaaacactgaagacgagtgggatggagtcataggggtggaggacctcagcctttcatcaaagaccacgaagctggagaaatgccacaacgctgagaagagccacggcagcagcaagagcaccgccaacggcaaggcgaagggcggcgcgacgccgaagaaggtgctggggaagatgctgtcgagcaaggcgctgaccggggagcgaagcagctcggactcgtcggacagcgccatcttgcggagccaggaccatcccaagaggaccccctccaggagcaccaagccgtcggctgctgcctagccctccctgcatctcatcaaaagagtggtgctggggttttagctgctgtctcttcttctttatgaatgttgcatagaagcaagaattaatgttttttacaagtctgtagggatgttataatgtcaggtctgcttttagggggatcttgttatttagcatgtaggctttgccatgaaacctgtgagacctttggtgctgctgtgaggttttatgccattcactcctggtagttataagaggcctaatgtgtttggac

SEQ ID NO: 1252 - DNA, 1737 bp, Cajanus cajan
cctctgtatgacgctgcactacatcattggttttggaaaattaagctttcggtcacagaacaaaggtttttttttcactctttcgcttccgaatcttcaacaatggtgctcgaggcgacgatgatctgtatcgacaattctgaatggatgcgtaacggggattactctcctgctcgatttcaagctcaagcagacgctgtcaatctcatttgcggtgctaaaacccagtctaatccagaaaatacagtgggagttctcacaatggcagggaaaggcgttcgtgttttggtcacccctaccagtgatctgggcaagatcttagcttgcatgcatggactagaaataggtggtgagatgaacctagctgctgggattcaggtggcacaattagctcttaagcatcggcaaaataaaaagcaacagcagaggattattgtctttgctggaagtcctgtcaagcatgaaaagaagatgttggagatgattgggagaaagttgaaaaagaatagtgttgcacttgatattgttaattttggtgaagaagatgaggggaagacagagaagctggaagcactccttgcagctgttaacaataatgataccagccacattgttcatgttccatctggtccaaatgctctttctgatgtacttataagtacacctatttttactggtgacggggaaggtggaagtggttttgctgctgctgctgctgcagcagcagctggtggtgtatctggatttgagtttggtgtggatccaaacttggatcccgaattggctcttgctctaagagtttcaatggaagaggagagagccaggcaagaagcagctgcgaaaaaggctgcagaggatgctgccaaacaagagaagggaggtgagcagccagccagctcacaagacgcaacaatgactgagcgtgccagtgcagcaacatctgaagctgagaataagacaactgatttgatggatgatgagaatgccctactacagcaggcactagcaatgtcaatggatgatcctgccattagccatgatgtaaaagatacagatatgtcagaagcatctgcaagtgaccctgagttggctctagctctccaaatgtcaatagcagatagtacaaaggatcaagcaagccagtcggacatgagcaaattgttggctgatcaatcctttgtatcttctatccttgcatcacttcctggggttgacccgaatgacccttctgtcaaggatttgctggcctccatgcaaaatcagtctgagcctcaacagaagaatgacgacaagccatcaaacgaggaggagaagaagtaatgtttagaaataagagccactttgccctgtacggttttactttgatggtagcatttttcgtggctgttactaatcgggggacctattatctcatgttccaacctttgtgcctcccagcagctaattggaatccaatgcatgtctctcgattgaatattggaagatttttaacataaaaaattctcttgattgtcatgtctgattggtgcttatcatgtgacgagggcttttaaaggactgtttctatactgaagaatgttccgactattaaatgtattttgatctcatctcgatatttatggtaatcccttttaattcagtttgttactttttcaattttaataatatagatggatgcttaggttatgttttgccggggtgtgagctttttaataccgaggaataaatattgattag

SEQ ID NO: 1253 - DNA, 1704 bp, Phaseolus vulgaris
tagaaattgttgggtgcaggaagtagaaaccttctttttgctatcagtaacagttgtaataaattaagaaaggcctccaacaagttccgtccccctttgtattacggtgcaccagattattggtttcagagaattaggccggtttggtttcacagcaaagttctttcactctttagcttctgaatcttcaacaatggtgctcgaggcgaccatgatctgtatcgacaattctgaatggatgcgtaacggggattatactccttctcgatttcaagctcaagcagacgctgtcaatctcatttgcggggcaaaaacccagtctaatccagaaaatacagtgggagttctcacaatggcagggaaaggcgttcgagttttggtcacccctaccagtgatctgggaaagatcttagcctgcatgcatggactagaaacaggtggtgagatgaacctagctgctggcattcaggtggcacaactggctcttaagcatcggcaaaataaaaagcaacagcagagaattattgtctttgctggaagtcctatcaagcatgaaaagaagatgttggagatgatagggagaaagttgaaaaagaatagtgttgcacttgatattgttaattttggtgaagaagacgaggggaagtcagagaagcttgaagcactccttgcagctgttaacaataatgatacaagccatatcgtacatgttccatctggtccaaatgctctttctgatgtacttataagtacacctatttttaccggtgatggggaaggtggaagtggttttgctgcagctgctgctgcagcagcagctggtggtgtatctggatttgaatttggtgtggatccaaacttggatccagaattggctcttgctctaagagtttcaatggaagaagagagagccaggcaggaagcagctgcaaagaaggctgcagaggatgcggccaagcaagagaagggaggtgagcagcaagccagctctcaagatgcaacaatgagtgagcgtgccagtgcatcaacatctgaagctgagaataagacaagtgttttgatggacgatgagaatgcccttctacagcaggcacttgcaatgtcaatggacgatcctgccattagccatgatgtaaaagatacagatatgtcagaagcatctgcaagtgatcccgagttggctctagctctccagttatcaatagcagatagtgcaaaggatcaagcaagtcagtcggacatgggcaaattgttggctgatcaatcctttgtatcttctatccttgcatctcttcctggggttgacccaaatgatccttctgtcaaggatttactggcgtccatgcaaaatcagtctgagcctcaacagaagaacgacgagaagccttcagaggaggaggaaaagaagtaatctttaagagccgctttgccctgtgtatggttttatgttggtagcattttcgcggctgatagtaattgggaactactttagcatgttccaatttttgtctctccgtagctaattggaactcaatgcatgtattgttgaatattactgtgtacgattaaagatggtcttcattgtcgtgtcttattcttggttggtgcatataatgtgacaagtgcttcaaagaactattattatactgaagaaagttcctacgttaaatatatttttcaatctcatctcgatatttatgctaa

SEQ ID NO: 1254 - DNA, 1608 bp, Vigna unguiculata
gtttcaaccgaagttctttcagtctttagcttctgaatcttcaacaatggtgctcgaggcgacaatgatctgtatcgacaattcggaatggatgcgtaacggggattacgctccttctcgatttcaagctcaagcagacgctgtcaatcttatttgcggtgcaaagactcagtctaatccagaaaatacagtgggagttctcacaatggcagggaaaggcgttcgagttttagtcacccctaccagtgatctgggcaagatcttagcctgcatgcatggactagaaacaggtggtgagatgaaccttgctgctggcattcaggtcgcacagctggctcttaagcatcggcaaaataaaaagcaacagcagagaattattgtctttgctggaagtcctatcaagcatgaaaagaagatgttggagatgatagggagaaagttgaaaaaaaacagtgttgcccttgatattgttaattttggtgaagaagacgaggggaagtccgagaagctggaagcactccttgcagctgttaacaataatgataccagccacatcgtacatgttccatctggtccaaatgctctttctgatgtacttataagtacacctatttttaccggtgatggggaaggtggaagtggttttgctgcagctgctgctgcagcagcagctggtggtgtatctggatttgaatttggtgtggatccaaacttggatccagaattggctcttgctctaagagtttcaatggaagaagagagagccaggcaggaagcagctgcaaagaaggccgcagaagatgcttccaatcaagagaagggaggtgagcagcaagccagctcacaagatgcaacgatgactgatcatgccagtgcagcaatgtctaatgctgagaacattacacgtgatatgatggacgatgagaatgcccttctacagcaggcactagcaatgtcaatggacgatcctgccattagccatgatgtaaaggatacagatatgtcagaagcatctgcaagtgatcccgagttggctcttgctctccagttgtcaatagcagatagtgcaaaggatcaagcaagtcagtcggacatgagcaaattgttggctgatcaatcctttgtatcttctatccttgcatctcttcctggggttgacccaaatgatccttctgtcaaggatttactggcgtccatgcaaaatcagtctgagcctcaacagaagaacgatgacaagccatcagaggaggaggaaaagaagtaactttgccatgtatggttttattttgttggtagcattttcgcggctgttagtaatcggaaactatttttagcatgttccaatttttgtgtctatccgcaggtaattggaactcaatgcatgtattgttgaatattgtgtatggttaaaaatggtcttcattctcattctcatgtcttattcttggttggagcatatcatgtgagaagtgcttcaaagaactatttttatacagaaggaagttcctacatttaaatgtattttttaacctcatctcgatatttatggtaatccgtttcactttaatgttacatttttttttatttgtatacaaatattcttaggtt

SEQ ID NO: 1255 - DNA, 1662 bp, Cajanus cajan
acgtgttacgcggccatcgaatattgcttggaaagaattgagggctacgttacggtcacacggaacaaccctttctagcaagtaaacccgattttcaacttctcttctctctctctctctctcttcacatacgatctttcgcagctgaatctccaacaatggtgctcgaggcgacgatgatctgtattgataattcggaatggatgcgcaatggggattattctccttctcgatttcaggcccaagcagatgctgtaaatcttatttgcggtgctaaaacccagtctaatccagaaaatacggttggagttctcacgatggcagggaagggcgttcgtgttttggtgacccctaccagtgatttgggcaagatcttagcttgcatgcatggactagagataggaggtgagatgaacctagctgctggcattcaggtggcacaattggctcttaagcataggcagaataagaagcagcagcaaaggattattgtctttgctggaagtcctgttaagcacgagaagaaaatgttggagatgattggcagaaaattgaaaaagaatagtgtagcacttgacattgtgaattttggtgaagaagatgagggtaagactgagaagctggaggcactccttgcagctgttaacaataatgatacaagccacatcgtgcacgttccatctggtccaaatgctctttctgatgtgctaataagtactcctatttttactggtgatggtgaaggtggaagtggttttgcagcagctgccgctgctgcggcagcaggtggtgtatctggatttgagtttggtgttgatccaaacttggaccctgaactggctcttgctctaagagtttcaatggaagaagagagagccagacaggaagcagctgcaaaaaaggcagcagaggatgcttccaaacaggagaaaggtggtgagcagcaagctagcccacaggatacaacaatgactgagcgtgccagtgcatcaacttctgaagctgagactaagaaaactgatctaacggatgatgagaatgctctactacagcaggcccttgcaatgtcgatggacgatcctgcaattagccatgatgtgagagatactgatatgtctgaagcaactgcggatgatcctgagttggcattagctctccaattgtcagtagaagatggcacaaaggactcggcaagccagtctgacgttagtaaattgttggcagatcagtcctttgtatcttctatccttgcttcgcttcctggggttgatccaaatgacccgtctgtcaaagatttgctggcttccatgcaaaatcagtctgagcctcagcagaagaatgaagacaaaccaccaaatgaagaggagaagaaataatctcgagtctggtcgctgttatatttctgttcctttgcaaggcatatcagtagcatgttggaaagtgatttgtggggcgttatttctcttgtattccatttgagtttcccctgctgattggaacgggtgtatgtctcccgattaagtatggatgattgagtatggctgatcaatgagggcattaaagcgagttaatgtttttatgattaaaaatacactatccttttaaaatgttcattagtctcattacaaaattaatatgaatcctttccttttatatttattt

SEQ ID NO: 1256 - DNA, 1641 bp, Vigna unguiculata
ccccgttacgtggcaatcgaattttgcttggaaagaatcgagggttatattattacggtcacataccaagagcaacaacctcttctgcaagtaaacttgagttcctttctttttcgtacgatacattactccctctctcattttttctgcacaaattccatttttagcttctgaatctccaacgatggtgctcgaggccaccatgatctgtattgacaattcggaatggatgcgtaatggagattacgctccttctcgatttcaagcccaagcggacgccgtcaatcttatttgcggtgccaaaacccagtctaatccagaaaatacggtgggagttctcacaatggcagggaagggcgttcgtgtcttggtcacccctaccagtgatttgggcaagatcttagcttgcatgcatggactagaaataggtggtgagatgaacctagctgcgggcattcaggtggcacaattggctcttaagcataggcagaacaagaagcagcagcaaaggattattgtctttgctggaagtcccgttaaacatgagaagaaaatgttggagatgattggtagaaaattgaaaaagaacagtgtagcacttgacattgtcaattttggcgaagaagatgaaggaaagaatgagaagttagaagcacttctctccgctgttaacaataatgataccagtcacatcgtccatgttccatctggtccgaatgctctttctgatgtactaataagtactcctatttttactggtgatggggaaggtggaagtggttttgcagcagctgccgcagctgctgcagcaggcggtgtatctggatttgagtttggtgttgatccgaacttggaccctgaactagctctcgctttaagagtttcaatggaagaagagagagctagacaggaagcagctgccaaaaaagctgcagaggatgcttccaaacaggagaaaggtgatgagcagaaggctagtccacaggatacaactatgaccgagggtgctagtgcaggagcttctgaagccaataataagaaaacggatttgacggacgatgagaatgctctactacagcaggctcttgcaatgtcaatggacgatcctgcaattagccatgatgtgagagatacagatatgtctgaggcagctgctgatgatcctgagctggctctagctctccaattgtcagtagaagatagctcaaaggactcggcaagccagtctgacgtcagtaaattattagcagatcagtcctttgtatcttctatccttgcatcgcttcccggggttgacccaaatgacccatcggtcaaagatttactggcttctatgcaaaatcagtctgagcctcagcagaaaaacgaagacaagccaccaaatgaagaggagaaaaagtaatactgatcgagtctcttcgctgttttatttctgttcctctggtggcttataatagcatgttggaaagtgattttacttgggtgttattaccctgctgattgaaacggatgtatctcgatttaatacggatgattgagtagagcatatcagaagaaaaaaaaatattgtcaatgagggtatgaatcgatcacatggttttattaaggaatacttcatcattttaaaacattgcagaatct

SEQ ID NO: 1257 - DNA, 1662 bp, Phaseolus vulgaris
cttggtcgaatcttgtttgtaaagaatcgagggttatatcattactgtcacagacccagaacaacaccctcttctgcaagtaaatcagagttcctttctttttcttttacattgttctttctcatcttttctccacaaattccatttttagcttctcaatcttcaacgatggtgctcgaggccactatgatctgtattgacaattcggaatggatgcgcaatggagactacgccccttctcgatttcaggcccaagcagacgccgtcaatcttatttgcggtgctaaaacccagtctaatccagaaaatacggttggagttctcacgatggcagggaagggcgttcgtgtcttggtcacccctaccagtgatttgggcaagatcttagcttgcatgcatggactagaaataggtggtgagatgaacctagctgctggcattcaggtggcacaattggctcttaagcataggcagaacaagaagcagcagcaaaggattattgtctttgctggaagtcctgttaaacatgagaagaaaatgttggagatgattggtagaaaattgaaaaagaatagtgtggcacttgacattgtcaattttggcgaagaagatgaaggaaagaatgagaagttggaagcactcctttccgccgtcaacaacaatgataccagccacatcgtccatgttccatctggtccgaatgctctttctgatgtactaataagtactcctatttttactggtgacggggaaggtggaagtggttttgcagcagctgctgcagcaggtggtgtatctggatttgagtttggcgttgatccaaacttggaccctgaactagctcttgctctaagagtttcaatggaagaagagagagccagacaggaagcagctgccaaaaaagctgcagaggatacttccaaacaggagaaaggtgatgaacagaaggctagtccacaggatacaacaatgaccgagggtgcaagtgcagcaacttctgaagccaataataagaaaactgatttgacggacgatgagaatgctttactacagcaggctcttgcaatgtcaatggacgatcctgcaatcagccatgatgtgagagatacagatatgtctgaagcagctgctgatgatcctgaattggctctagctctccaattgtcagtagaagatagctcaaaggactcgacaagccagtctgacgtcagtaaattgttggcagatcagtcctttgtatcttctatccttgcatcgcttcccggggttgacccaaatgacccatcggtcaaagatttactggcttctatgcaaaatcagtctgagcctcagcagaagaatgaagacaagccaccaaatgaagaggagaaaaagtaaatattgatcgagtctctcttggctgttttatttctgttcctctggtaggcatgttggagtgattttacttggggcgttattaccttgctgattgaaacggatgtatctctcgatttaatacggattattgagtagagcagatcagaagaaaatattgtcaatgagggtatgaatcgagtacattgtttttttaaggaatatttcatcatttaaaaacattacagaatcgagtacacggtttcctttcctttttcttattgtatttatttattttagtttaaaaat

SEQ ID NO: 1258 - DNA, 1696 bp, Lupinus angustifolius
acatttcatattttcattcacaacaacatctctctaaaaaaactcgatccttattttctgaatcttcaaaatggtgctcgaggctacaatgatctgtattgacaattctgaatggatgcgtaacggagattactctccttctcgatttcaagctcaagcagacgctgttaatcttatttgtggtgctaaaacccagtctaatccagaaaatacagttggggttctcacaatgtctgggaaaggtgttcgcgttttggtcacccctactagtgatctgggcaagatcttagcttgcatgcatggactagaaataggtggtgagatgaacctagctgcgggcattcaggtggcacagttggctcttaagcatcggcaaaataaaaagcagcagcaaaggattattgtttttgctggagggcctgttaagcatgaaaagaaaatgttggagatgatagggagaaagttgaagaagaatagtgtagctcttgatattatcaattttggtgaagaagatgaagagaaaacagaaaagctggaggcactcctagcagctgttaacaataatgatactagccacattgttcatgttccagctggcccaaacgctcttcctgatgtacttataagtacacctattttcactggtgatggggaaggaggtagtgggtttgctgctgctgcagctgcagctggtggtgtatctggatatgaatttggagtggatccaaacttggatcctgaactggctcttgctctaagagtttcaatggaagaggagagggcaaggcaggaagcagcagcaaaaaaggccgcagaggatgctgccaaacaagagaaaggaggtgaacagcaagccagctcacaagatgcaacaatgactgagcgcgccagtgcagcaacttctgacgctgagaataagacaaatgatttgatggatgatgaaaatgccttgctagagcaggcacttgcaatgtcaatggatgatcctgcaactagccatgatgtgaaagatacagatatgtcagaagcagcttcagttgatcctgaattggctttggctctccaattgtcagtagcagatagtacaaaggatgcaacaagccagtcagacatgagcaaattgttggcagatgaatcctttgtatcttctatccttgcatcacttccaggggttgaccctaatgatccttctgtcagagatttgcttgcctccatgcaaaatcaatctgagcctcagcagaaggatgatgagaagccatcatcaaatgaagaggagaagaaataatcttcaagtgaggttttttgtgagacattggtagcattgtgtagatggtggtgctaatcagtgaaccatatctttacatcttgcaatcatttgcagattggaactaatgtatgtctcattttaagtgttggatgatttttatattacttgaacatgctcttagttgtcatgtactatgctgaaatgatgatcaaggtggtgcattttatgtaatgaggttgaagatagagttacatttatatttatttcaatgccatatcgatttttatgggtgctacgttactagaatgtggttgtaaaatttaaggaagtttttgacaataagttgttttatgttatcagaagcctcatttagagatatttctttgaaaaataagtgatatggttcccttaaaataagggttcgttttt

SEQ ID NO: 1259 - DNA, 1712 bp, Lotus japonicus
aaaccaagattatcaactaatcaagttaacctgaacaaaacaaggttacttcttcatctttctcattcatatcatagaccctaacaacactaacaggagaagcttctctcgttctcttcgtttcgcttcaacaatggtgctcgaggcgacaatgatctgtattgacaattctgaatggatgcgtaacggagattacaatccctctcgatttcaagctcaagcagacgctgtcaatctcatttgcggtgccaaaacacagtctaatccggaaaatacagtgggagttctcacaatggcagggaaaggtgttcgtgttttggtcacccctaccagcgatctgggcaagatcttagcctgcatgcatggactagagattggtggtgagatgaaccttgctgccggcattcaagttgcgcagttggctcttaagcatcggcaaaataaaaagcagcagcaacggattgttgtttttgctggaagtcctgttaagcatgaaaagaaaatgctggagatgatagggaggaagctgaaaaagaatagtgtagcacttgatattattaattttggtgaagaagatgaggggaagacggagaagctggaagctcttcttgcggctgttaacaataatgatagcagccacattgtttctgttccacctggtccaaatgctctttctgatgtactgataagtacacctatatttactggtgatggggaaggtggaagtggttttgccgctgctgctgccgcagctgcagctggtggtgtatctggatatgagtttggtgttgatccaaacttggatcctgaattggctcttgctctaagagtttcaatggaagaggagagggccaggcaggaagcagcagccaagaaggctgcagaggaggcggccaaccaagagaaaggaggtgaaaccagctcccaagatgcaacaatgactgaacgtgccagtgcagccacttctgaagctgagaataaaacaattgatttaatggatgatgagaatgccctactccagcaggcacttgcaatgtcaatggatgaccctgtgagtagccatgatgtaaaagatacggatatgtcagaagcacctgcagatgaccctgatttggcactagctctccaattgtcagtagcagatggcacaaaggattcaggaagccagtcgtcagacatgagtaaattgttggcagatcaatcttttgtatcttctatccttgcatcgcttccaggggttgacccaaatgacccttctgtcaaagatttactggcctccatgcaaaatcaatctgagcctgagaagaagaatgacgacaagccatcagatgaggagaagaaataatctcttagagccactatgccctgtctggtgtttattttgtttcttttgagagacatgctggtagcatttcagttggcccttctaatcattgagtcatatcgtttattcaaaggtgctctcgattggcatgtccttacggtattgtaggtaggtaatcaagatgatgcttgtcatgacggggctttaaaggacttggatttatgttgcaggaagatccaactatttagagtatttcaatgtcatcatgatgtgtatgataatctgtttaaaaacaatttctcgccttgttttaattttatctgatagatagatgcttgattaatttgataaattgtttttcaggtcgtcaattttttatttataaaaa

SEQ ID NO: 1260 - DNA, 1572 bp, Arachis hypogaea
aaacctcgatagttcttcaatatatccgaaaagaactcgcttgctctcgaaaaattcgatctttggcttcgtttcgcttctgaatcctgcaactatggtgctcgaggcgacgatgatctgtatcgacaattcggaatggatgcgaaacggggattactctccttctcgcttccaagctcaagctgacgctgtcaatcttatttgcggtgccaaaactcagtctaatccagaaaatacagtgggagttctcaccatggccgggaagggggttcgtgttttggtcactcctaccagtgatctgggcaagatattagcttgcatgcatggattagaaataggtggtgatatgaacctagccgctggcattcaggtggcacaattggctcttaagcatcggcaaaataagaagcagcagcaaaggattattgtctttgctggaagtcctgtcaagcatgagaagaaagtattggagatgattggaagaaagttaaaaaagaatagtgttgcacttgacattgtcaatttcggtgaggaagatgaggggaagacagagaagctggaagcactccttgcagctgtgaacaataatgataccagccacattgttcatgttccagctggtacaaatgctctttctgatgtgcttataagcacacctatttttactggcaatggtgaaggtggaagtggatttgcagctgcagcagcagcagctgcagctggtggtgtatctggatttgagttcggtgtggatccaaacttggaccccgagctggctcttgctttaagagtttcaatggaagaagagagagccaggcaggaagcagctgcaaaaaaagctgcagaagaagcttctaaacaagagaagggtggtgagcagcaagccagctcacaagatgcaacaatgactgagcgtgctagtgcatcagcttcagaagctgagacaaagacaaatgatatgatggatgacgagaatgcactactacaacaggctcttgcaatgtcaatggatgatcctgcgattaaccaggaggccaaagatacagatatgtctgaagcagcttcagatgatcccgaattggcacttgctctccaattatcggtagcagatagttcaaaggactcatctagccagtcagacatgagtaaattgttggcagatcaatcctttgtgtcatctatccttgcttcgcttcctggtgttgacccaaatgacccatctgtcaaagatttgctggcctccatgcaaaatcaatctgagtctcagcagaagaatgatgacaaaaagccaccaagtgaggaggaaaagaagtaatttggagaatctcttggctgcgtcgggtttcgatttcgtttcctttgatacataatggtagcatgttggattatggttctagtagaggcatgaagcatgttgaatgtatttcaattgttgattctcctctgctgattggaaatgatgtatgtcttaaagattatgaatgaaggattgatcaggttatagaggttattatttgtcatgccttattttttcaccatggtattgatatgcaacggggcatttaaggggaa

SEQ ID NO: 1261 - DNA, 1572 bp, Glycine max
cccaagttcccttctctcttcacggttacattgctctctctctctctctctctctctctctctctctctctcttcacgttcgatctttcgcttctgaatctccaacgatggtgctcgaggcgactatgatctgtattgacaattcggaatggatgcgtaacggggattactctccttctcgatttcaagcccaaacagacgccgtcaatcttatttgcggtgctaaaacccagtctaatccagaaaatacggtgggagttctcacgatggcggggaagggcgttcgtgttttggtgacccctaccagtgatctgggcaagatcttagcttgcatgcatggactagaaataggcggtgagatgaatctagctgctggcattcaggttgcacaattggctcttaagcatcggcagaacaagaagcagcagcaaaggattattgtctttgctggaggtcctgttaagcatgagaagaaaatgttggagatgattgggagaaaattgaaaaagaatagtgtagctcttgacattgtcaattttggtgaagaagatgaggggaagacagagaagttggaggcactcctttcagctgttaacaataatgataccagccacattgttcatgttccatctggtccaaacgctctttctgatgtactaataagtactcctatttttactggtgatggggaaggtggaagtggttttgcagcagctgctgctgcagcagcagcaggcggtgtatctggatttgagtttggtgttgatccaaacttggaccctgaactggctcttgctctaagagtttcaatggaagaagagagagccagacaagaagcagctgccaaaaaggcatcagaggatgcttccaaacaggagaaagatggtgagcagcaagctagcccacaggatacaacaatgactgagggtgccagtgcagcagcttctgaagccgagactaagagaactgatttgacggacgatgagaatgctcttctacagcaggcccttgcaatgtcaatggatgatcccacaattaaccatgaagtgagagatacagatatgtctgaagcagctgctgaagatcccgagttggctctagctctccaattgtcagtagaagacagctcaaaggactcggcaagccagtctgacgtgagtaaactgttggcagatcagtcctttgtatcttctatccttgcatcgcttcctggggttgacccaaatgacccatctgtcaaagatttgctggcttccatgcaaaatcagtctgagccacagcagaagaatgaagacaagccaccaaatgaagaggagaaaaaataatcttaatagtctcattgtggttttatttgtagtattcctttggtaggcatattggtagcatgttggaaagtgattttactcgggtagttatttcacgtgttccaattgttgagttcccctgctgattggaacgagtatatgtctgttgattaattacggatcattgagtagagcacatttcaaaagcctattgtctatgttcatcatcaagggaatacatggttttatggttaagaatactccatcc

SEQ ID NO: 1262 - DNA, 1562 bp, Trifolium pratense
aaacttgaaagcatatcactttcctcttattttttcgatacacaatacagacgaagttttcctttcattcattcttcttctaaatctccaaccatggtgctcgaggcaacaatgatctgtatcgacaattccgaatggatgcgtaacggagattattctccttctcgatttcaagctcaagctgacgctgttaatctcatttgcggtgctaagacccagtctaatccggaaaatacagtgggagttcttataatggcgggaaagggggttcgtgttttggtcacccctaccagtgatctaggcaagatcttagcttgcatgcatgggctagaagtaggtggtgagatgaacctagctgctggcattcaggcggcacaattagctctaaagcatcgtcaaaataaaaagcaacagcaaaggattattgtctttgctggaagtcctgtcaagcatgaaaagaaaatgttggagatgatagggagaaagttgaaaaagaacagtgtagcgcttgatattgttaattttggtgaagaagacgaggagaagacagagaagctggaatcactccttgcagctgtgaacaataatgatacaagccatattgttcatgttccagctggtccaaatgctctttctgatgtacttataagtacaccaatttttactggtgacggggaaggtggaagtggctttgctgctgctgctgcagcagctgcagctggaggtgtatctggatatgattttggtgtggatccaaacttggatcctgaattggctcttgccttgagagtttcgatggaagaggaaagagccaggcaggaagcagcagcaaaaaaggctgcagaggatgcttccaaacaagagaaaggaggtgagcagcaagccggctcacaagatgcgacaatgaccgatcgtgccggtgcatcaacttctgaagcagagaataagacaactgatttgatggatgatgagaatgccctactgcagcaggcgcttgcaatgtcaatggatgaacctgcggttggccacgatgtaaaagatacagatatgtcagaagcatctattgatgaccctgagctggcactagctctccaattgtcggtagcggatagtacaaaggatcaagcaagccagtcagaggtgttagcagatcaatccgctgtatctgatattctcgcgtcgcttccgggggtcgacctaaatgacccttccatcaaagatttgctggcatccatgcaaaataagtctgagccacagcagaagaatgacgacaagtcatcaaacgacgagaagaaataagcattttagtttagatggttattcctatcaggctcctattttcatgtaatcaatcatggtctctccatgtctgttcggaaccagtgcatgccaattgattgagtcttggacttttagcttaaaaatgctcttgattgttataacatactgcttgtcaagatataatgcttattataacgaggggtttaaaggatttggttatttaaattaaatgtagaaatatgtaacttgcatgcagggatccatagtgctctttcatttaa

SEQ ID NO: 1263 - DNA, 1579 bp, Trifolium pratense
attgaaacttgaaagcatattactttcctcttattttttcgatacacaatacagaccaagtttttctttcattcattcttcttctaaatctccaaccatggtgctcgaggcaacaatgatctgtatcgacaattccgaatggatgcgtaacggagattattctccttctcgatttcaagctcaagctgacgctgttaatctcatttgcggtgctaagacccagtctaatccggaaaatacggtgggagttcttataatggcaggaaagggtgttcgtgttttggtcacccctaccagtgatctaggcaagatcttagcttgcatgcatggactagacgtaggtggtgagatgaacctagctgctggcattcaggtggcacaattagctctaaagcatcgtcaaaataaaaagcaacagcaaaggattattgtctttgctggaagtcctgtcaagcatgaaaagaaaatgttggagatgatagggagaaagttgaaaaagaacagtgtagcgcttgatattgttaattttggtgaagaagacgaggagaagacagagaagctggaatcactccttgcagctgtgaacaataatgatacaagccatattgttcatgttccagctggtccaaatgctctttctgatgtacttataagtacaccaatttttactggtgacggagaaggtggaagtggctttgctgctgcagcagcagcagctgcagctggaggtgtatctggatatgattttggtgtggatccaaacttggatcctgaattggctcttgccttgagagtttcgatggaagaggaaagagccaggcaggaagcagcagcaaaaaaggctgcagaggatgcttccaaacaagagaaaggaggtgagcagcaagccggctcacaagaagccagctcacaagatgcgacaatgaccgatcgtgccggtgcatcaacttctgaagcagagaataagacaactgatttgatggatgatgagaatgccctactgcagcaggcgcttgcaatgtcaatggatgaacctgcggttggccacgatgtaaaagatacagatatgtcagaagcatctattgatgaccctgagctggcactagctctccaattgtcggtagcggatagtacaaaggatcaagcaagccagtcagaggtgttagcagatcaatccgctgtatctgatattctcgcgtcgcttccgggggtcgacctaaatgacccttccatcaaagatttgctggcatccatgcaaaataagtctgagccacagcagaagaatgacgacaagtcatcaaacgacgagaagaaataagcattttagtttagatggttattcctatcaggctcctattttcatgtaatcaatcatggtctctccatgtttgttcggaaccagtgcatgccaatcgattgagtcttggactttaagcttaaaaatgctattgattgttataacatactgcttgtcaagatatcatataatgcttatcataacgacgggtttaaaggacttggttatttaaatgtagaaaaatgtaacttgcttgcaggggtccatcgtgctctttcattt

SEQ ID NO: 1264 - DNA, 1751 bp, Trigonella foenum-graecum
acttacttaaccatcactttcctcttatttttcaataacaatccaccttgcagaacaagtttattttcttcttcttcttcttcttcattctctcgcttctaaatctccaaccatggttctcgaggcgacaatgatctgtattgataattctgaatggatgcgtaacggtgattattctccttctcgatttcaagctcaagctgatgctgttaatctcatttgcggtgccaaaacccagtcgaatccggaaaatacagtgggagttctcataatggcagggaaaggtgtccgtgttttggtcactcctaccagtgatctaggcaagatcttggcttgcatgcatggactagaaataggcggtgagatgaacctagctgctggtattcaggtggcacaattggctcttaagcatcgtcaaaataaaaagcaacagcaaaggattattgtctttgctggaagtcatgttaagcatgaaaagaaaatgttggagatgatagggagaaagttgaaaaagaatagcgtagcacttgatgttgttaattttggtgaagaagatgaggcgaagacagagaagctggaatcacttgttgcagctgtgaacaataatgatacgagccatatcgttcatgttccagctggtccaaatgctctttctgatgtacttataagtacgccaattttcactggtgatggggaaggtggaagtggttttgctgctgctgcagcggcagctgcagctgggggtgcatctggatatgattttggtgtggatccaaacttggatcctgagttggctcttgccttaagagtttcaatggaagaggaaagagccaggcaggaagctgcagcgaaaaaggctgcagaggatgcggccaaacaagagaaaggaggtgagcagcaagctagctcacaagatgcgacaatgaccgaccgtgccagtgcatcaacttctgaagcagagaataagacaactgatttgatggatgatgagaatgccctactgcagcaggcgcttgcaatgtcaatggatgatcctgcggttggccatgatgcaagagatacagatatgacagaagcatctgccgatgaccctgatctggcactagctctccaattgtcagtagcggatagtacaaaggatgaagcaagccagtcagacgtgactagattgttggcagatcaatcccgtgtatctgatattcttgcatcgcttcctggggtcgacataaatgacccttccatcagagatttgctggcatccattccaaatcaatctgagcagaagaatgacgacaagccatcaaatgaggagaagaaataatcttttaaaaccactttggatgtggtttttatttgttttcctttgagacataatggtagcattctagatggccgatccaatcggggtactattttcatgtaatcaatcaccgtctccacatctgttcggaacccagtgcatgcctatcgattgagtctcagacttttagcttaaaaatgatcttgacaagataatgctttatcgtaaggaggggtttaaaagacttggttatttgaatgtatttaaatgtcatcttgttatctatgatgatcagattaatataagttttttttttattctgctctttgccatgtggtcaagaggatggaagtgtggtgactttgagattgaatccgggattccacataaaatgttctcacaaaccaaactaggctgtaacaacgggaactgtttaatataagtttgtttt

SEQ ID NO: 1265 - DNA, 1877 bp, Cicer arietinum
aacaaaagggctatttaaaagaaaaaagacgatcaccgtaaagggagagggcgaacttaaatggaataacgggcttaagtttcagtaaagcacgataaattagtaaaaccatcacttttcttttcgatatttatcaattaattaattattaataatacaccttacttgagtgtgagcaaggtttttcttcttctccttattctctctttagcttctaaatctccaaccatggtgctcgaggcgacaatgatctgtattgacaattctgaatggatgcgtaacggagattattctccttctcgatttcaagcccaagctgacgccgttaatctcatttgcggtgctaagacacagtctaatccagaaaatacagtgggagttctcacaatggctgggaagagtgttcgtgttttggtcactcctactagtgatcttggaaagatcttagcttgcatgcatggactagaaataggtggtgagatgaacctagctgctggtattcaggtggcacaattggctcttaagcatcgtcaaaataaaaaacaacagcaaaggattattgtcttagctggaagtcctatcaagcatgaaaagaaaacgttggagatgatagggagaaagttgaaaaagaatagcgtagcgcttgatatcattaattttggtgaagaagatgagtctaagacagaaaagctggaatcactccttgcagctgtgaacaataatgatactagccatattgttcatgttccagctggcccaaatgctctttctgatgtacttataagtacaccaatttttactggcgatggggaaggtggaagtggttttgctgctgctgcagcggcagctgcagctgggggtgtatctgggtatgattttggtgtggatccaaacttagatcctgaattggcgcttgccctaagagtttcaatggaagaggaaagagccaggcaggaagcagcagcaaaaaaggctgcagaggatgctgccaaacaagagaaaggaggtgagcaagccggatcacaagaagccagctcacaagatgcaacaatgactgagcgtgccagtgtatcaacttctgaagcagagaataaaacaactgattttatggatgatgatagtgccctacttcagcaggcgcttgcaatgtcaatggatgatcctgcggttggccataatgtaaaagattcagatatgtcagaagcatctcctgatgaccctgagctggcactagctctccaattgtcagtagccgatagtacaaaggataatgcaagccagtcagacgcgagtaaattgttggcagatcaatcctttgtatcttctgttcttgcgtcgcttcctggggttgacccaaatgacccttccgtcaaagatttgctggcgtccatgcaaaatcaatctgagccgaagaatgacgacaagccatcaaatgaggagaagaaataatcttttaattaaagccacactggctgtgtggtttttgtttgttttcctttaagccattctggtagcattttagatgtctgttccaatcagcgtactattttcatgtgttcaataattgtctccacagctgatcagaacccagagcatgcctatcgattaattcttggactttttacattgaaacagtgcttatcaggacgaagggtttaaaggacttggttatttaaatgcatttcgatgtgatcctattatatataacaatttcttcaatagcagtttgttgttacttgttactttattttattttacttgatagatagatgtttaaggcttaattgatgttgcatgattgcttttttccttatacatggattttaatatttataaaaattggaagaactagtgctgcttgtctttagattctcaaa

SEQ ID NO: 1266 - DNA, 1577 bp, Trifolium pratense
aaacttgaaagcatatcactttcctcttattttttcgatacacaatacagacgaagttttcctttcattcattcttcttctaaatctccaaccatggtgctcgaggcaacaatgatctgtatcgacaattccgaatggatgcgtaacggagattattctccttctcgatttcaagctcaagctgacgctgttaatctcatttgcggtgctaagacccagtctaatccggaaaatacagtgggagttcttataatggcgggaaagggtgttcgtgttttggtcacccctaccagtgatctaggcaagatcttagcttgcatgcatggactagacgtaggtggtgagatgaacctagctgctggcattcaggtggcacaattagctctaaagcatcgtcaaaataaaaagcaacagcaaaggattattgtctttgctggaagtcctgtcaagcatgaaaagaaaatgttggagatgatagggagaaagttgaaaaagaacagtgtagcgcttgatattgttaattttggtgaagaagacgaggagaagacagagaagctggaatcactccttgcagctgtgaacaataatgatacaagccatattgttcatgttccagctggtccaaatgctctttctgatgtacttataagtacaccaatttttactggtgacggggaaggtggaagtggctttgctgctgctgctgcagcagctgcagctggaggtgtatctggatatgattttggtgtggatccaaacttggatcctgaattggctcttgccttgagagtttcgatggaagaggaaagagccaggcaggaagcagcagcaaaaaaggctgcagaggatgcttccaaacaagagaaaggaggtgagcagctagccggctcacaagaagccagctcacgagatgcaacaatgaccgatcgtgctggtgcatcaacttctgaagcagagaataagacaactgatttgatggatgatgagaatgccctactgcagcaggcgcttgcaatgtcaatggatgaacctgcggttggccacgatgtaaaagatacagatatgtcagaagcatctattgatgaccctgagctggcactagctctccaattgtcggtagcggatagtacaaaggatcaagcaagccagtcagaggtgttagcagatcaatccgctgtatctgatattctcgcgtcgcttcctggggtcgacctaaatgacccttccatcaaagatttgctggcatccatgcaaaataagtctgagccgcagcagaagaatgacgacaagtcatcaaacgaggagaagaaataagcattttagtttagatggctattcctatcaggctcctattttcatgtaatcaatcatggtctctccatgtttgttcggaaccagtgcatgccaatcgattgagtcttggactttaagcttaaaaatgctattgattgttataacatactgcttgtcaagatatcatataatgcttatcataacgacgggtttaaaggacttggttatttaaatgtagaaaaatgtaacttgcttgcaggggtccatcgtgctctttcatttga

SEQ ID NO: 1267 - DNA, 1650 bp, Lotus japonicus
cggtctactggtactggaagtaacctgagtttctctaatctctctccttccctccgacagaaccagtgctttctcttccactctcatattcgatctcttctcttctcaactctccaaccatggtgctcgaggcgacgatgatctgtattgacaattctgaatggatgcgtaatggggactactctccttctcgatttcaagcccaagcagacgctgtcaatcttatttgtggtgctaaaacccagtctaatcctgagaatacggttggagttctcacgatggcggggaagggtgttcgtgttttggtcacccctaccagtgatttgggaaagatcttagcttgtatgcatggactagaaataggtggtgagatgaacctagctgctggcattcaggtggcacagttagctcttaagcatcggcagaataagaaacagcagcaaaggattattgtctttactgggagtcctatcaagcacgagaagaaaatgttggagatgattgggcgaaagttgaaaaagaatagcgttgcacttgacattgtcaattttggtgaagaagacgagggaaagacagagaagctggatgcactccttgcagccgttaataataatgataccagccgcatggctcatgttccacctggtccaaatgctctatctgatgtacttataagtacaccaattgtgactggtgatggagagggtggaagtggtttagcagcagctgctgcagcagcagcagcaggtggtgtatctggatatgactttggcgtggatccgaacttggacccggaattggctctgctctaagagtttcaatggaagaggagagggcccgacaggaagcagctgcaaagaaggctgcagaggatgcttccaaggagaatggtggtgagcagcaagccagctcgcaggatgcagccatgattgagcgtgctagtgaagaaacttcagaagctgcgactaagacaaatgatatgatggacgatgagaatgctctactacagcaggcccttgctatgtcaatggatgatcctgtgattaacaaagatatgagagatacagatatgtctgaagcagctgcagatgatcctgagttagctttagctctccaattgtcagtagcagatggcagtgaggactcaggaagccagtcagacatgagtaaattgttggcagatcagtcgtttgtatcttctatccttgcatcgcttcccggggttgacccaaatgacccatctgtcaaagatttactggcctccatgcaaaatcagtctgaaccccaacagaagaatgaagacaagccacccaatgaggaggagaagaaataatcttgaatgttctatttccgttcttttgatgggcacgttagttgcatgttggaaggtggttttaatcagaggattgtttcatttgtatacagattatggagtctcccctgctgattaaaatgtatgcatgtctcaatatgtatgaatgattgatcagaggttaaaagcctatgtcaatgagggcttaagcgagtacacggttttatcatgaatacatcctgaaatgtactttaatggtattacaaagttaatacgactcctttatttcataatttttttttttttgtctaaaagcagatgcacagagctgactactt

SEQ ID NO: 1268 - DNA, 1552 bp, Fagus grandifolia
aaaacccccaatctctctctcaaaagtacccaaaactctctctccctttcgatccttcaattctctatccaatctcgcaactatggtactcgaggcgacaatgatctgcatcgacaactccgaatggatgcggaatggcgattacgctccgtccagatttcaagcccaagctgacgctgttaatcttatttgcggagctaaaacacagtctaatccagagaatacagtgggagttctcacaatggctggaaaaggggttcgtgttttggtcactcctaccagtgatcttggcaagatcctcgcttgtatgcacggtctagaaataggtggtgacatgaacctggctgctggcattcaggtggcgcagttggcccttaagcatcgccaaaataaaaacagcaacaaaggattattgtattcgctggaagtcctatcaaacatgagaaaaagttattggagatgattggaagaaagttaaaaaagaacagtgtagcacttgatattgttaatttcggtgaagaagatgatgcgaagacagagaagctggaagcacttcttgctgctgtgaacaacaatgacactagccacattgtacatgttccacctggccctaatgctctttctgatgtacttataagtacacccatcttcactggggatggggaaggtggaagtggtttcgcagcagcagcagcggcagctgccgctggtggtgtcactggttttgaatttggtgtggatcccaacctggatcctgaactggcccttgctctgagagtttcaatggaagaagagagggcgaggcaagaagcagctgctaaaaaggctgcagaggatgctgctaaacaagaaaaaggagagggacagacatctggaacacaggatgcaacaatgagtgagcatgctagtgttgcaacctctgaagctagaaaataaaacaaatgatctaatggatgatgacaatgctctgctacagcaggcccttgcaatgtcgatggatgaccctgtctcgggccatgaagtgcgagacacggatatgtcagaggcagctgcagatgatccagagttggcactagctcttcaattatcggtgcaggacagtacaaaagattctacaagccaatcagatatgaacaagttgttgactgaccagtcttttgtgtcttccatccttgcatcacttcccggtgttgatccaaatgacccatcagttaaagatttgctagcttccatgcaaagtcagtctgagccccagcagaagaaagaagacaaggcaccaaatgaggaggagaaatgatgattctctggagttgcttttccatgcaaggtcaaacagctctctactgtagcgccacaagtcatcatcataatggcgtattgatggttataattgtctcgagagagagggcgttagaagagcagacaatatttatggcaaagaatactccaacattgaaatgtatttctgcaatgttttaacgttatattctgttttctcaaattgagttccttttttttgtttgttgtttatttagtttcgttccttcggtag

SEQ ID NO: 1269 - DNA, 1565 bp, Glycine max
atggcaatcgaattttgtttggaaataattgaggactacgttgttacggtcccaaagaacaacccttctagcaagtaaacccgagttcccttctctctctttacgattacattgctctctctctctctgttcgcattcaatctttcgcttctgaatctccaacaatggtgctcgaggcgactatgatctgtatagacaattcggaatggatgcgtaacggggattactctccttctcgatttcaagcccaagcagacgccgccaatctcatttgcggtgctaaaacccagtctaatccagaaaatacggtgggagttctcacgatggcggggaagggcgttcgtgttttggtgacccctaccagtgatttgggcaagatcttagcttgcatgcatggactagaaataggtggtgagatgaacctagctgctggcattcaggttgcgcaattggctcttaagcatcggcagaacaagaagcagcagcaaaggattattgtctttgctggaggtcctgttaatcatgagaagaaaatgttggagatgattgggaggaaattgaaaaagaatagtgtagcacttgacgttgtcaattttggtgaagaagatgagggtaagacagagaagttggaggcactcctttcagctgttaacaataatgataccagccacattgttcatgttccatctggtccaaacgccctttctgatgtactaataagtactcctatttttactggtgacggggaaggtggaagtggttttgctgcaggcagtgtatctggatttgagtttggtgttgatccaaacttggaccctgaactggctcttgctctaagagtttcaatggaagaagagagagccagacaggaagcagctgccaaaaaggcagcagaggatgctgctaaacaggagaaagatggtgagcagcaagctagcccacaggatacaacaatgactaagggtgttagtgcagcagcttctgaagctgagactaaaagaactgatttgacggtcaacgagaatgctcttctacagcaggcccttgcaatgtctatggatgatcccacaattaaccacgacatgagagatacagatatgtctgaagcagctgctgaagatcctgagttggctctagctctccaattgtctgtagaagacagctcaaaggactcggcaagccagtctgacgtgagtaagctgttggcagatcagtcctttgtatcttctatccttgcatcgcttcctggggttgacccaaatgatccatctgtcaaagatttgctggcttccttgcaaaatcagtctgagcctcagcagaagaatgaagacaagccaccaaatgaagaggagaaaaaataatctcgtaatttcttggctgttctatttgtattcctttggtaggcacattgatagcatgttggaaagtggttttacacggggagttatttcacatgtgttccagttgttgagttcccctgctgattaattacggataatatcaaaagcctattgtcaatgttcatcaagggagtacatggttttatggttaagaatactccatcc

SEQ ID NO: 1270 - DNA, 1554 bp, Medicago truncatula
tcttcatctctttcttcttcttcatcatcatcatcacacgctcgcttctaaatcttcaaccatggtgctcgaggcgactatgatctgtattgacaattctgaatggatgcgtaacggagattattctccttctcgatttcaagctcaagctgatgctgttaatctcatttgcggtgctaagactcagtcgaatccggaaaatacagttggagttcttataatggcaggaaagggtgttcgtgttttggtcacgcctactagtgatctaggcaagatattggcttgcatgcatggactagaaataggcggtgagatgaacctagctgctggtattcaggtggcacaattggctcttaagcatcgtcaaaataaaaagcaacatcaaaggattattgtctttgctggaagtcatgtcaagcatgaaaagaaaatgttggagatgatagggagaaagttgaaaaagaatagcgtagcgcttgatgtagttaattttggcgaagaagatgaagcaaagactgagaagctggaagcacttgttgcagctgtgaacaataatgatacgagccatatcgttcatgttccagctggcccaaatgctctgtctgatgtacttataagtacaccaattttcactggcgatggagaaggtggaagcggttttgccgctgctgcagcggcagctgcagctgggggtggaactggatatgattttggtgtggatccaaacttggatcctgaattggctcttgccttaagagtttcaatggaagaggaaagagccaggcaggaagctgcagcaaaaaaggccgcggaggatgctgccaaacaagagaaaggaggctcacaagatgcgacaatgaccgagggtgccagtgcatcaacttctgaagcagagaataagacaactgatttgatggatgatgagaatgccctactgcagcaggcgcttgcaatgtcaatggatgaccctgcggttggccatgatgtaagagatacagatatgtcagaagcatctacagatgaccctgagctggcactagctctccaattgtcagtagcggatagtactggggatcaagcaagccagtcagacgtgactagattgttggcagatcaatcccgtgtatctgatattcttgcgtcgcttcccggggttgacataaatgacccttccatcaaagatttgctggcatccattccaaatcaatctgagcagcagaagaatgatgacaagccatcaaacgaggagaagaaataatcttttaaaaccactttggttgtgtaatttttatctgtttcccttttagacgtactggtaacattttagatatgggcgttccgatcggggtactattttcatgtaatcaatcactgtcctccgtatctgctcggaacccagtgcatgcctatcgattgagcttggacttttagcttaaaaatgctcttgattgtgatatcataagtaatgatgttgatcaatataatgctctatgagaaggaggggtctaaaggacttggctatttgaatgtacttaaatgtcatgttatctacga

SEQ ID NO: 1271 - DNA, 1500 bp, Trifolium pratense
ttcttcttctaaatctccaaccatggtgctcgaggcaacaatgatctgtatcgacaattccgaatggatgcgtaacggagattattctccttctcgatttcaagctcaagctgacgctgttaatctcatttgcggtgctaagacccagtctaatccggaaaatacagtgggagttcttataatggcagggaagggtgttcgtgttttggtcacccctaccagtgatctaggcaagatcttagcttgcatgcatggactagaagtaggtggtgagatgaacctagctgctggcattcaggttgcacaattggctctaaagcatcgtcaaaataaaaagcaacagcaaaggattattgtctttgctggaagtcccgtcaagcatgaaaagaaaatgttggagatgatagggagaaagttgaaaaagaatagcgtagcacttgatattgttaattttggtgaagacgacgaggagaagacagagaagctggaatcactccttgcagctgtgaacaataatgatacaagccatattgttcatgttccagctggtccaaatgctctttctgatgtacttataagtacaccaatttttactggtgatggggaaggtggaagtggctttgctgctgctgctgcagcagctgcagctggaggtgtatctggatatgattttggtgtggatccaaacttagatcctgaattggctcttgccttaagagtttcgatggaagaagaaagagccaggcaggaagcagcagcaaaaaaggctgcagaagatacttccaaacaaggaggtgagcagcaagccggctcacaagaagccagctcacaagatgcgacaatgaccgagcgtgccagtgcatcaacttctgaagcagagaataagacaactgatttgatggatgatgagaatgccctactgcagcaggcgcttgcaatgtcaatggatgaacctgcggttggtcacgatgtaaaagatacagatatgtcagaagcatctgttgatgaccctgagctggcactagctctccaattgtccgtagcggatagtacaaaggatcaagcaagccagtcagaggtgttagcagatcaatccgctgtatctgatattctcgcgtcgcttcctggggtcgacctaaatgacccttccatcaaagatttgctggcatccatgcaaaataagtctgagccgcagaagaagaatgacgacaagtcatcaaacgaggagaagaaataagcagtttagtttagatggctattcctatcgagctcctattttcatgtaatgtaatcaatcatggtctctccatgtctgttcggaactagtgatgccaatcgatcgagtcttggacttttagcttaaaaatgctcttgattgttataccatactgcttgtcaagatataatgcttatcataacgaggggtttaaaggacttggttatttaaatgtagaaaaatgtaacttgcatgctggagtccatagtgctctttcatttgat

SEQ ID NO: 1272 - DNA, 1304 bp, Manihot esculenta
tcttctcactctctctctctgcgctctcaattgatcgaaaacgagtctatctcgatccttcgtttatccttctcctgcaatcattaaccatggtgctcgaggcgacaatgatatgtatcgataattcggaatggatgcgaaacggcgattactctccttccagatttcaagctcaagctgatgccattaatcttatttgtggagctaaaacacagtcaaacccggagaatacggtgggagttctcacaatggcaggaaaaggggttcgtgttttggtcacgcctactagtgaccttggcaagatcttagcttgcatgcacggtttagaaataggtggcgagttgaacttggctgccggtatccaggttgcacagttggctcttaagcatcgtcaaaacaaaaagcagcaacaaaggattattgtatttgctggaagccccatcaaacatgataagaaggcattggagatgattggaagaaagttgaaaaagaacagtgtagcacttgatattgttgattttggtgaagaagatgatgggaaggcagaaaagttggaagctcttcttgctgctgttaacaacaatgacagcagccacatcgttcatgttccacctggtccaaatgctctttctgatgtgcttatcagtacacccatcttcactggtgatggggaaggtggaagtggttttgctgctgctgcagcagcagctgcagctggtggtgtttccggttttgaatttggtgtggatcccaaccttgatcctgaacttgcccttgctcttagagtgtcaatggaggaggagagggccaggcaagaagcagctgccaaaaaggctgcagaggaagcctctaagcaggaaaaaggaggggaacaaccaactagttcacaggatgcaactatgactgaaagtgccagtgttacagcttctgaagctgacaacaagaaaaatgatttgatggatgaagagaatgcgctcctacagcaagctctcgcaatgtcaatggacaatcctgcctctagccatgaactgcgagatactgatatgtcagaggctgctgcagatgatccagacttggcactagctcttcaattgtctgtgcaagatggtacaaaagattcaggaagccagacagatatgagcaagttgttggctgaccaatcctttgtatcctccatccttgcttcacttccaggggttgatccaaatgatccttcagttaaagatttgcttgcttccatgcaaagccagtctgagccccaagaaaagaaggaagaagacaagcccaaggaggaggagaagtga

SEQ ID NO: 1273 - DNA, 1767 bp, Eucalyptus grandis
gatcgcagctcccgctaccgtcttaaccaagcaaggcccctcccaagctccctcaaatttcaccttcacctctttcgtgctctctgcaaattccgatcttcgctttcggagctcagaaaatccgtcaatcatggtgctcgaggcgacgatgatatgtatcgacaactcggagtggatgcgcaatggcgactacacccccaacaggttccaagcgcaggcggacgccgtcaacctcatctgcggcgccaagacgcagtcgaatccggagaacactgttggagtcctaactatggcggggaaaggagttcgagtcttggttactccgactagtgaccttggcaagatattggcttgtatgcacggcctggaaattggcggtgagatgaatctggctgcgggaatccaggtggctcaattggcactaaagcatcgccaaaataaaaagcagcaacaacgaattatagtctttgctggaagtcccatcaaacatgacaagaagtcattggagatgattggaaggaagttaaagaagaacagtgtagcacttgatattgtcgactttggggaagaagatgaagggaaacctgagaaattggaggctctgcttgctgctgtgaataataacgacaccagtcacattgttcatgttccttctggtccaaatgctctttctgatgttctgataagcactcctatctttactggggatggggaaggtggaagtggttttgcggcatcggctgcggcagctgctgctggtgctgtcgctggttttgatcttggtgttgatcccagtctggatcctgagctggcccttgctcttagagtttccatggaagaggaaagagcgaggcaagaagcagcagctaagaaggctgctgaggatgctgctaagcaggagaaaggaggagaacaacagccatcatcacaagatgcaaccatgactgaaggtgccagtggttcagcttctgaagtggataacaaaaaagatgatttaatggatgacgaaaatgctttgctacagcaggcccttgctatgtcgatggatgataccacctctggccatgatctgcgagacactgacatgtcagaggcagctacagatgatccggatttggctctagctcttcaattgtcggtccaggacagtgacaaagattcatcaggccagacagatatgagcaagttgttggcggaccaatcctttgtgtcatctattattgcatcgcttcctggagtggatccaaacgatccttctgtcaaggatttgcttgcttccatgcaaaaccaatctcagaaaaaggatgaagacaaggggccaaatgaagaggagaagcagtgatttctgtagttattatttttctttcaggttatttttcttgtgaaatagttgtagcaacatgcgatcatctgtgaaatgtgaacttacaaatggaatgattggttctaatgaaaatactcattgctgcgggtgtttggtaggttagtgatccttcctctggagccatagaagtgcatgttcacatgggaagaattcaagagggcaaagagagccgaaaagtagttacaaagtcaagctgacaacttttatggggttattgaacattgagcttggctctgtagtttgctaggggtttaaagctttctggaacttttatgttgtgctatttcaccccccttttaatctctttacaaaagcagttcattacagaaattggatgtcaatattttaaatgatcatgctttgtctgagtgctatttcattga

SEQ ID NO: 1274 - DNA, 1599 bp, Theobroma cacao
tggaaacagcaaatccgtctccttcaagtaaactgttaagccccaaagagttcttccctttctctcgatccttccttggtttctcatctccatcgtttaaccatggtgctcgaggcaacgatgatctgtatcgacaattcggagaggatgcgaaacggtgattactctccctctagatttcaagctcaagccgatgctgttaatcttatttgcggagctaaaactcagtctaatccagagaatacagtgggagttttaataatggcaggaaaaggagttcgtgttttggtcactcctaccagtgatcttggcaaactcttagcttgcatgcatggtttagaaattggtggtgaaatggacttggcagctgggattcaggtggctcagttagcgcttaagcatcgccagaataaaaagcagcagcaaaggattattgtctttgctggaagtcctatcaaacctgacaagaagtcattggagatgattggaaggaagttgaaaaagaatagtgtagctcttgatattgtaaattttggtgaagatgatgaagggaagacagagaagctggaagcgcttctagctgctgttaacaataatgattccagtcacattgttcatgttcctgctggtcctaatgctctctctgatgtacttataagtacccccatcttcactggggatggggaaggtggaagtggctttgcagctgcggcagcagcagctgcagctggtggagtctctggttttgagtttggtgtggatcccaaccttgatcctgaattggcccttgctcttagagtttcaatggaagaggagagggccaggcaagaagcggctgctaaaaaggcagcagaggaggcatctaaacaagaaaagggcggggaacaacaatctagctcacaggatgcaacaatgactgaacatgccagtggggcaacttcagaagctgataataagagaaacgatttatcagacgatgacaatgctttactacaacaggcgcttgcaatgtccatggatgagcctgcctctagccatgatgtacaggacacagagatgtcagatgcagctgcagatgatccagagcttgctttagctcttcaattatccgtgcaagacagtgcaaaagattcatctagtcaggcagatgtgagcaagttgttagcagaccagtccttcgtatcctccatccttgcatcgcttcctggggtagatccaaatgatccttcagttaaggaggtgcttgcttccatgcaaagccagtctgagacccagcagaagcaggatgaggacagggcaccaaatgaggagaagtgatttttctttgaatttccttttctttcagattccttgtgcagatttggaagctcctgattgcggccactcgatattcatgtagatgggtattatttgttctaaaggctttggaagagtttctgatattttcatgtcaaagaattgtaacattgaaatgtaactctttgatgtttccactagttatatactacacatatatatcccccaagtacagattgagaatgtcatcatgcatggaaaacttatttgcaatgagatccaatcttttttccccccactttc

SEQ ID NO: 1275 - DNA, 1698 bp, Prunus persica
cctcctctgcaagtaaagtacacctcagtttttatatttttctttttcctcacgaagcatatcaatctctcccgatctttcttgtctcttcgcaatcttcagctatggtgctcgaggcgacaatgatctgcattgataattcggaatggatgcgaaacggtgattatgctccttcgaggtttcaagctcaggccgatgctgtcaatctgatttgtggagctaaaacccagtctaatccagagaatacagtaggagttctcaccatggcagggaaaggtgttcgcgttttggtcactcctactagtgatcttggcaagattctggcatgcatgcatggtttagaaataggtggtgagatgaacctggcagctggcattcaggtggctcaattggccctcaaacatcgccagaacaagaaacagcaacaaaggattattgtgtttgctggaagtactgtcaaacatgacaaaaagtttttggagataatcggaaggagattaaagaagaacagtgtagcccttgatatcgtcaattttggtgaagaagatgaggagaagtcagagaagctagaatccctgtttaagactgtgaacaataatgacaccagccacattgttcatgttccacctggtccaagtgctctttctgatgtacttataagtacacccatctttaccggggatggggaaggtgggagtggttttgcagcggcagcagcagcagctgccgctggtggtgtctctggttttgatttcggtgtagatccaaacctggatcctgagcttgcccttgctcttagagtttcaatggaagaagagagggccagacaagaagcagctgctaaaaaggctgctgaggatgcttccaaacaggaaaaaggaggggaagcacaatccagctcacaagatgcaactatgacggagcgtgccagtgctggaacgtctgaagctgataataagagtaatgatttcatggatgatgagaatgctctgctacaacaggcccttgcaatgtcgatggatgaacccgcttccagccatgagatgcgagatgcagatatgtctgaggcaactggagaggatccagagttggctctagctcttcagttgtctgtgcaggagagtgcaaaagattctggtagccagaaagatatgagtaaactattggctgaccaatcttttgtgtcttccatccttgcctcgcttccaggggttgacccaaatgatccttcagttaaagatttgcttgcttccatgcaaaaccagtcagagcctgatcagaagaagaatgaagacaaagcaccgaaagaggaggagaaatgatgcatatcctgagttgtctttcaatggcagtttcatttgccgaatacacccagttcatgtccgttgccaacttgtgttggtagatgcgatctctctccaaccactagtagtgcttatctctctctactctggttgtgacctttaagcttctagattgacttttggatcaatgtttgtccggcaggtcataaagctctgttttcgtaccagtacattgatctttaacatttgcttgagagggcttctgataaaaacggacggctttctagcaaaaacaatgtgcaacattgaaatgtatctctgcattgaattttatattacatattgttaacatttttactctctgtttttagttgtcaatgtgattattttggcc

SEQ ID NO: 1276 - DNA, 1868 bp, Prunus mume
cctcctctgcaagtaaagtatacctcagtttttgtatttttctttctcctcacgaagcacatcaatctctcccgatctttcttgtctcttcgcaatcttcaactatggtgctcgaggcgacaatgatatgcattgataattcggaatggatgcgaaatggtgattatgctccttcgaggtttcaagctcaggccgatgctgtcaatctgatttgtggagctaaaacccagtctaatccagagaatacagtaggagttctcaccatggcagggaaaggtgttcgcgttttggtcactcctactagtgatcttggcaagattctggcatgcatgcatggtttagaaataggtggtgagatgaacctggcagctggcattcaggtggctcaattggcccttaaacatcgccagaacaagaaacagcaacaaaggattattgtgtttgctggaagtactgtcaaacatgacaaaaagtttttggagataatcggaaggagattaaagaagaacagtgtagctctcgatatcgtcaattttggtgaagaagatgaggagaagtcagagaagctagaagccctgtttaagactgtgaacaataacgacaccagccacattgttcatgttccacctggtccaagtgctctttctgatgtacttataagtacacccatctttaccggggatggggaaggtgggagtggttttgcggcagcagcagcagcagctggtgtctctggttttgattttggtgtagatccaaacctggatcctgagcttgcccttgctcttagagtttcaatggaagaagagagggccagacaagaagcagctgctaaaaaggctgctgaggatgcttccaaacaggaaaaaggaggggaagcccaatccagctcacaagatgcaactatgacggagcgtgccagtgctggaacgtctgaagctgataataagagtaatgatttcatggatgatgagaatgctctgctacaacaggcccttgcaatgtcgatggatgaacccgcttccagccatgagatgcgagatgcagatatgtctgaggcaactggagaggatccagagttggctctagctcttcagttgtctgtgcaggagagtgcaaaagattctggtagccagaaagatatgagtaaactattggctgaccaatcttttgtgtcttccatccttgcctagcttccaggggttgacccaaatgatccttcagttaaagatttgcttgcttccatgcaaaaccagtcagagcctgatcagaagaagcatgaagacaaagcatcgaaagaggaggagaaatgatgcatatcctgagtcgtctttcaatggcagtttcatttgctgaatacacccagttcatgtccgttgccaacttgtgttggaagatgcaatctctctccaaacactagtagtgcttatctctctctactctggttgtgacctttaagcttctagattgacttttggatcaatgtttgtccggcaggtcataaagctctgttttcgtaccagtacattgatctttatcatctgcttgagagggcttctgataaaaacggacggctttctagcaaaaacaatgtgcaacattgaaatgtatctctgcattgaattttatatgacatattgttacgttacgtacggcgacagttttactctccgtttttagttgtcaatgtgattattttggccatgcctgaattgcccttgtcatttttcagtctttgaatggtagctgttggtctcagttttgctgtcactttgagtccattgattgatccgcatttttccagagtgtatcctcctctaacttataaatctacatgcaagttaaattttttggttgcgataagataa

SEQ ID NO: 1277 - DNA, 1604 bp, Castanea mollissima
aatcaaaagtactacaaaaactctctctcgatccttcgattctgtatacaatctcgcaaccatggtgctcgaggccacaatgatctgcatcgacaactccgaatggatgcgtaatggcgattactctccgtccagatttcaagcccaatctgacgctgtcaatcttatttgcggagctaaaacacagtctaatccggagaatacagtgggagttctcacaatggccggaaaaggggttcgtgttttggtcactcctaccagtgatcttggcaaaatcctcgcttgtatgcacggtctagaaataggtggcgagatggacctggctgctggcattcaggtggcgcagttggcccttaagcatcgccaaaataaaaagcagcagcaaaggattattgtatttgctggaagtcctatcaaacaagagaaaaagacattggagtctattggaagaaagttaaaaaagaacagtgtagcacttgatattgttaatttcggtgaagaagatgatgcgaagactgagaagctggatgcacttcttgctgccgttaacaacaatgacactagccacattgtacatgttccacctggccctaatgctctttctgatgtacttataagtacacccatcttcactggggatggggaaggtggaagtggttttgcagcagcggcagctgcagctgcagctggtggagtcactggttttgagtttggtgtggatcccaacctggatcctgaactggctcttgctctgagagtttcaatggaagaagagagggcgaggcaagaagcagctgctaaaaaggctgcagaggagacttctaaacaagaaaaaggagagggacagccatctggaacacaggatgcaacaatgactgagcatgcaagtgttggaacttctgaaactgacaataaaacaactgatttaatggatgatgacaatgctctgctacagcaggcccttgcaatgtcaatggatgagcctgccacgggccatgaagttcgagacacagatatgtctgaggcagctgcagatgatccagagttggcactagctctccaattatcagtgcaggacagtacaagtgattctgaagaccaatcaaacgtgagcaagttattgacagaccagtcttttgtttcttctatccttgcatcacttccaggggttgatccaaatgacccatcagtcaaagatttgcttgcttccatgcaaagtcagtctgagccccagcagaagaatgaagacaaggcaccaaaggaggaggagaaaaaatgattctctggagttgccttaccatgcgaggtcaaaaagctctctctactgtagcatcacaagtcatcaaaatggaattgttgatggttatagttgtcttgacagggcgttggaagagcagacaatatttatatggaaaagaatgtgcaacattgaaatgtatttctgcaatgtttcaacgtttatattttcttactccaaattgagcctttctttatgtgttattggtttgttcttaatgattttcatggagatagtcacggaatgtgggatgataaaagggttttagtaaatcaatcaagcgacacatatgcaattcttgtggact

SEQ ID NO: 1278 - DNA, 1494 bp, Quercus alba
tctctctctctctctctctcaaatcaaaagtactcttaaaactctctttctctctttcgatccttcgattttgtataccatctcgcaaccatggtgctcgaggccacaatgatctgcatcgacaactccgaatggatgcgtaatggcgattacgctccgtccagatttcaagcccaatctgacgctgtcaatcttatttgcggagctaaaacacagtctaatccggagaatacagtgggagttctcacaatggccggaaaaggggttcgtgttttggtcactcctaccagtgatcttggcaaaatcctcgcgtgtatgcacggtctagaaataggtggcgagatggacctggctgctggcattcaggtggcgcagttggcccttaagcatcgccaaaataaaaaacagcaacaaaggattattgtatttgctggaagtcctatcaaacaagagaaaaagacattggagtctattggaagaaagttaaaaaagaacagtgtagcacttgatattgtaaatttcggtgaagaagatgatgcgaagacagagaagctggatgcacttcttgctgccgttaacaacaatgacactagccacattgtacatgttccacctggccctaatgctctttctgatgtacttataagtacacccatcttcactggggatggggaaggtggaagtggttttgcagcagcagcagctgcagctgcagctggtggagtcactggttttgagtttggtgtggatcccaacctggatcctgaactggctcttgctctgagagtttcaatggaagaagagagggcgaggcaagaagcagctgctaaaaaggctgcagaggagacttctaaacaagaaaaagaagagggacagccatctggaacacaggatgcaacaatgactgagcatgcaagtgttggaacttctgaagctgacaataaaacaactgatttaatggatgatgacaatgctctgctacagcaggcccttgcaatgtcaatggatgagcctgccacgggccatgaagttcgagacacagatatgtctgaggcagctgcagatgatccagagttggcactagctctccaattatcggtacaggacagtacaagtgattctggagaccaatcaaacatgagcaagttattgacagaccagtcttttgtttcttctatccttgcatcacttccaggggttgatccaaatgacccatcagtcaaagatttgcttgcttccatgcaaagtcagtctgagccccagcagaagaatgaagacaaggcaccaaaggaggaggagaaaaaatgattatctggagttgccttaccatgtgaggtcaaaaagttctctctactgtagcatcacaagtcatcaaaatggaattgttgatggttatagttgtcttgagagggcgttggaagagcagacaatatttatatggaaaagaatgtgctacattgaaatgtatttctgcaatgtttcaacgtttatatt

SEQ ID NO: 1279 - DNA, 1543 bp, Vicia sativa
tcgacaaaaagttttgtaccctttttccaaatcttgcttctgaacttcatcaaatctccaacaatggtgctcgaggcaacgatgatctgtattgacaactctgagtggatgcgtaacggtgattactctccttctcgatttcaagcccaatccgacgctgtaagtctcatttgcggtgctaaaactcagtctaatcctgaaaatactgttggagttctcactatggcggggaaaggcgttcgggttttggctactcctacaagtgatttgggcaaaatcttggcttgtatgcatggtctagaaataggcggcgagatgaacctagctgctggaattcaggtggcacagttggctcttaagcatcgacagaataagaagcagcagcaaaggattatcgtcttttctggaagtcctgtcaagcacgagaagaaaatgttggaaatgattgggagaaagttgaaaaagaatagtgtagcacttgacattgtcaactttggggaagatgatgaggggaagacggagaagcttgaagcactccttgcagcggtaaacaataatgatagtagccacatggttcatgttccacctggtccaaatgctctttcagacgtacttataagtacacctatttttactggtgatggagaaggtggaagtggttttgcagctgctgctgcagcagcatctgcaggtggtgcatctggatatgattttggtgttgatccaaacttggaccctgaattggctcttgctctaagagtttcgatggaagaggagagagctaggcaggaagcagctgcgaaaaaggctgcagaggatgcttccaaacaggagaaaggtggcgaacagcaagctacttcccaggatgcaactatgactgagcaaaccagtactgcagcttctgaagttgagcctaagacaaatgacatgatggacgatgagaatgctctactacaacaagcccttgcaatgtcgatggatgatcctgcagttagccatgatgtaagagatgcagatatgtctgaagcagctacagatgaccctgagttggctcgagctttccaattgtcagtatcagacccccccaatgacacagtgggtagattgttggcggaccagtcctttgtatcttctatccttgcatcgcttcccggggttgatccaaatgatccatctgtcaaagatttgctggcttccatgcaaaatcagtctgagtctcagaagaagaatgacgagggaccaaatgaggaggagaagaagtaatctgtcatcttgcgttttttttttaatttctgttcctttgacagtcatattgctactgggtaaggtgattctagtcggggtattacttcactggcactgcagttgagtctccctagcttattggaacagatgtatgtatcttgataaggttattaaagctcgttgtcatgagggcattaagcaaggacatatacattcttttatggtgaagaatattcaattaaaatgttagtcaatgttattacagttaatttaaaaaacttggaacattctcaactcc

SEQ ID NO: 1280 - DNA, 1763 bp, Vaccinium corymbosum
catcttctcaattcgttgttatacaaagcacgggaaggagagagaagcctccaactaaatccccaaatcctttcgcttatcttcaagttccaatcatggtgctcgaggcgacgatgatttgcgttgataactccgagtggatgcggaacggcgattactccccaacgaggtttcaagctcaagccgacgccgttaatctaatctgtggagccaaaactcagtctaatccagagaatactgtgggagttctgacaatggcgggcaagggggttcgagttttggtcactcctactagcgatcttggcaagatcttagcttgcatgcacggtctagaagttggtggcgagtgtaacttggcagcagggatacaagtggcacagttggctctcaagcatcgtcaaaataaaaagcagcaacagaggattattgtattcgtggggagtcctgtcaaatatgacaagaaggtattggaaatgatcggaaggaagttaaaaaagaatagcgtagcgcttgatattgttaattttggtgaagaagatgagggaaaatccgaaaagctcgaggcccttcttgcagctgtaaacaacaatgacagcagtcacattgttcatgttccttctggttcaaatgctctctctgatgtccttataagcactcctattttcactggggatggcgaaggtggaagtggctttgcagcagcagctgcggcagctgcagccggtggtgtttctggctttgattttggtgtggatccaaatctggatcccgaattggctcttgctcttcgcgtttcaatggaagaggaaagggcaaggcaagaagcagctgctaaaaaggctgcagaggaagcttcaaaacaagaaaagggaggggaacagccgtctgcatcacaagatgcgactatgactgagaatgtcagtgctgcagctcctggatctgaagacaagacaagtgatcttatggatgatgagaatgctttgctacagcaggcccttgccatgtcaatggatgaccctgctgccagcgttgttacgcgagacacagatatgtcagaggcagccgcagaggatcaagacttggcactcgctctacagttgtccgtgcaggagggttcgaaagatcaagcaagccagacagatatgagtcaactgttggcagatcagtcgtttgtgtcatcaatccttgcttcccttcctggagttgatccaaatgacccttctgtgaaagatttgctcgcatccatgcaaagccagtctgagtctgagaagaaggacgacgaagacaaggcaccaaaggaggacagtaaatgatgcccggtgttgacatcgaatgtttctcatgtgattgagctcttttatgtaatgagatgcgagggaacggtgcatggagacggttattaccgtagaatacattattgccgtaagaagcatcatcgctggatgttgattctgtatggtctcagtataaaacctaggttgtaatttcgacttcatgcatatttgtgatgatggtacttaaagaggatcatagcattgtgcaatggcttttggatttggtgaatttcttcctgcttggttatcattcacatggatcaacgaatataatggctggcttattgctatttttacctctgtttatgcacttgcaatgaagataaaaagacttgcgtattggatatttaccgttattaccaccgggcacacattaaacttttgatttcaattctacgagggttgacatttagaagcttgcatagaaac

SEQ ID NO: 1281 - DNA, 1525 bp, Actinidia deliciosa
ctgcgttgttagagagagacgttctgcaactgaatccctcccctctattcttcgttcatcttcaatctccgaccatggtgctcgaggcgacaatgatttgcatcgatgactcggaatggatgcgcaatggcgattactctcccgcaaggtttcaggctcaagccgacgctgttaatctaatctgtggagccaaaacccagtctaatccagagaatactgtgggagttatgacaatggcgggcaaaggggttcgtgttttggtcactcctaccagcgatcttggcaagatattggcttgcatgcatggtttgggagttggtggcgagtgtaacttggcagcaggaatccaagtggctcagttggctctcaaacatcgccaaaacaagaagcaacaacaaaggatcattgtattcgcggggagtcctgtcaaatacgacaagaaggtgttagaaatgatcggaaggaagttgaaaaagaacagtgtagctcttgacattgttaattttggtgaagaagatgaagggaaaacagagaaactcgagtcccttcttgctgctgtcaataataatgacagcagtcacattgtccatgttcctcctggtccaattgctctctctgatgttctgataagtactcctatctttactggggatggagaaggtggaagtggttttgcagcagcagctgcggctgctgcagctggtggcgtttctgattttgattatggtgtggatccaaatttggatcctgaactggctcttgccctccgagtttcaatggaagaggagagggcaaggcaggaggcagctgctaaaaaggctgcagaggaagctgcaaaacaggaaaaagcagaacagcaatccacatcgcaagatgtcacaatgactgaacatgccactcctgcgcttcctgaatctgaaaataagacaaatgatccaatggatgatgagaatgctttgctacaacaggcccttgccatgtcaatggatgaccctgctgctagccttgctatgcaagatgcagatatgtcggaggcagctgcagctgatcaagacttggctctggctctacagttgtctgtgcaggacagtccaaaagatcaagcgagcgaagacgatatgagtaagctgttggctgaccaatcatttgtgacgtcaatccttgcttcccttccaggagttgatcctaatgatccttctgtcaaggatttgcttgcgtccatgcaaaatcagcctgagtcccagcagacggacgaagataaagcaccaaaggaagaggacaagaaatgacacactggattcacgtccaatgttacttgtcgagttattccctgtccattacgacgaggatagtgcttgggaatggttaatgttgctctagataggttctgtactttctcaaagctctaaactatttagagctttgtgcagtagaacaatggtccttctagttgtcggtgctcagatgttaggtttataaatttaaaaccattaatgagcatcttcttctcaacatcttttcagcg

SEQ ID NO: 1282 - DNA, 1559 bp, Tripterygium wilfordii
attgttttgcccgatcaatctttaacgatggtgctcgaggcgaccatgatctgcatcgacaattcggaatggatgcgaaacggagattactctcccagcagatttcaagcccaagccgatgctgttaatcttatatgcggagctaaaacacagtctaatccagagaatacggtgggagttctcaccatggcgggaaagggtgtacgggttttggtcactcctactagtgacctgggcaagatcttagcttgcatgcatggcttagaaatcggtggtgagatgaacctcgctgctggtatccaggttgcacaattagcacttaagcatcgccaaaacaaaaagcagcaacaaaggattattgtctttgctggaagtcctgtcaaacatgagaagaagttgttggaaatgattggaaggaagttaaaaaagaatagtgttgcccttgatattgttaattttggtgaagaagatgatgggaagaaagaaaagctggaggcacttcttactgctgtgaacaacaatgataccagccacattgtccatgtcccttctggtccaactgctctttctgatgtgctaataagtacgccaatcttcactggggatggtgaaggtggaagtggctttgctgcagccgctgcggccgctgcagctggtggtgtttctggttatgattttggtgtggatccgaatttggatcctgagcttgctcttgctctaagagtttcaatggaagaggagagggctcgacaagaagctgctgctaaaaaagctgcagaagatgctgctaaacaggaaaaaggaggcgaactgcaatccagctcacaggatgcaactatgactgaaaatactactagtgttgcagcttctcaaactgacaataagagaaatgatctctctgctgacgtggataacgcgttgctagaacaggcccttgcaatgtcaatggatgaccccgccactagtcatgacattcgagacactgatatgtcagatgctgttgcagatgatccagagctggcattggctcttcaattgtctgtgcaggaaagtgcaaaagattcagcaaaccaggcagatgtgaataagctgttgggtgacccatctttcatgtcctccatctttgcatctcttcctggtgttgatccaaatgatccatctgtccaagatttgcttgcttccatgcaaggccagtccgagtcccaacagaagaataatgaagacaaggagccaaatgtagaggagaaatgatgatcatctggagttcttcttccaatttgtggtccagtcctttctagttggccattttaccaaccgttcattacttctatattgaagaatcctgaatcaggtttggtggttcttcaatgtggcctttgaagattcattgtcttgactttttatctttcttgaaagggctttagaagagcagacgtcattgtagtgacaactagtagcaatctccagacttacattaagtatttaatatttctcaactgaagattgaatgtctttctgtgattttatggaagtgcacgtatggtaataatagtacaagt

SEQ ID NO: 1283 - DNA, 1791 bp, Fragaria vesca
ttattctttcttctccgtcaccaacacaccatttcaatctctctggatctttcttctccgaccttctctatctcccaaccatggtgctcgaggcgacgatgatctgcattgataattcggagtggatgcgtaacggcgattacgctccgacgagatttcaagctcaggccgacgccgtcaatctgatttgcggagccaaaacccagtctaatccggagaatacagtgggagttctcaccatggctgggaaaggtgttcgcgttttggttactcctactagtgatcttggcaagattttggcttgcatgcacggtttagaaataggtggtgagatgaacctggctgctggcattcaggtggctcaattggccctcaaacatcgccagaataagaatcagcaacaaaggattatagtctttgctggaagtgccgttaatcatgaaaagaagactttggagatgattggcagaaagttaaagaagaacagtgtagcccttgatatcatcaattttggtgaagaagatgaagaaaagaaagagaagctagaagcacttcttgctgctgtgaacaataataacagcaacattgttcatgttcaggctggtccaagtgctctttcggatgtactcataagtacacctatcttcaccggagatggagaaggtggtagtggttttgcagcagcagcagctgctgctgcagccggaggtgtctctggttttgattttggtgtggatccaaacctggatcctgagcttgcccttgctcttagagtatcaatggaggaggagagggccagacaggaagcagcagctaaaaaggctgctgaggattcttccaaacaggaaaaaggaggggaagaaccatccagctcacaagatgcaactatgacagagcgtgccagtgctgtaacttctgaagctgagaataagagtattgatttcatggatgatgacaacgctctgctgcagcaggcccttgcgatgtcgatggatgaacctgcctccagccatgatttgcgagacactgacatgtctgaggcagttgcagatgatcctgagttggctctagctcttcaaatgtctgtgcaggaaggtgagaaagattctgctagcgataaagatatgagcaaattgttggctgatcagtcttttgtgtcttctatccttgcctcacttccaggggttgacccaaatgatccttcagtaagagacttgcttgcttctatgcaaaaccagtcagagcctgaacaaaagaagaatgaagagaacaagccaccaaatgatgagaaatgacggatgcgggctgtcttcctatcgaaggtttcgttcgctgaattcatccagttactttccattcccaacttacgatgggagattttacaattcggcagccatccccagtctttagtgcttgtctgtctactctggttgtgacttttaagcttatagaatgacttttggatcaatgtttcttcagcaggtcagaaagctgtgttcaagcaccaatacattgatcttaatcatttgctttgcgagtccctcggataaatggtcagactttctagcaaaaaattgtggaacattgaacattgaaatgtatcatttgcatggaattaatgtcattacgtgttgttaatggtgattatttcagtcgttcagtttgcagatgttcatgtcctcattttactaaactctgaatggttattctcattgttgctgtcatttttagagtggcattgtatttaggtttcaccctttcgtaatatccttaaatattcgatttctgtta

SEQ ID NO: 1284 - DNA, 1553 bp, Manihot esculenta
aatttgattgtattatgatatcttatgaacaggcgacgatgatatgtatcgataattcggaatggatgcgaaacggcgattactccccctccaggtttcaagctcaagctgatgccattaatcttatttgtggagctaaaacacagtcaaatccggagaatacggtgggagttctcacaatggcaggaaaaggggttcgtgttttggtcacgcctactagtgacctcggcaagatcttagcttgcatgcatggtttagaaataggtggggagttgagcttggctgctggtatccaggttgcacaattagctctcaagcatcgtcaaaacaaaaagcagcaacaaaggattattgtatttgctggaagccccattaaacatgataagaaggcattggagatgattggaagaaggttgaaaaagaacagtgttgcacttgatattgttgattttggtgaagacgatgatgggaaggcagagaagttggaagctcttctttctgctgttaacaataatgacagcagccacatcgttcatgttccttctggtccaaatgctctttctgatgtgcttatcagcacacccatcttcactggtgatggggaaggtggaagtggttttgctgctgctgcagcagcagctgcagccggtggtgtttctggttttgaatttggtgtggatcccaaccttgatcctgaactcgcccttgctcttagagtttcaatggaggaggagagggccaggcaagaagcagctgccaaaaaggctgctgaggaagcctctaagcaggaaaaaggaggggagcaaccaactagctctcaggatgcaactatgactgaaagtgccagtattacagctcctgaagctgacaacaagagaaatgatttaacggatgaagagaatgcgctcctacaacaagctcttgccatgtcaatggacgaccctgcctctagccatgaactgcgagatactgatatgtcagaggctgctacggatgatccagacttggcaattgctcttcaattgtctgtgcaagacagtacaaaagattcaggaagccagacagatatgagcaaattgttggccgaccagtccttcgtatcctccatccttgcttcgcttccaggagttgatccaaatgatccttcagtcaaagatttgcttgcttccatgcaaagccagtctgagccccaagaaaagaaggaagaagacaagcctaaggaggaggagaagtgataattatatggcgttggattttggtgtcggaagggttcctgaactgatctattatcagctaaatcaaaagaatgttcaaatttgaaggggcatcacatcaggagtgttttaaacatgttggacatttgagctttcataccatcactggcttctgcatgtacaattaaatcctcgaggtctgaaagctatttgttgtagctgttgatgctttatttgtgtttacaagggcaggttattttgaatggcaaagaaagtgatattgtttaaatcttgctgcgaatgatgggtttattaagagtaagtttaagcttcgtgagt

SEQ ID NO: 1285 - DNA, 1661 bp, Ricinus communis
taaaacccaattctcttcttttcaattctctctctctctctgtgcaatcttgaacaacaaaatcatggtgctcgaggcgacaatgatctgtatcgataattcagagtggatgcggaatggggattacaacccttctagatttcatgctcaagctgatgctgttaatcttatttgtggagctaaaacacagtcaaatccagagaatacagtgggagttttaacaatggctggaaaaggggttcgtgttcttgttacgcctactagtgaccttggcaagatcttagcttgcatgcacggtttagaaataggtggtgagatgaacttggctgcggggatccaggtggctcaattggctcttaaacatcgccaaaacaaaaagcagcaacaaaggattattgtctttgctggaagttccatcaaacatgataagaaggcattggagatgattggaaaaaagttgaaaaagaataatgttgcacttgatattgttgattttggtgaagaggatgacgaaaaggcagagaagctggaagctcttcttgcagctgttaacagtaatgacaccagccacattgttcatgttccccctggtccaagtgctctttctgatgtgcttattagtacacccgtcttcactggtgatggggaaggtggaagtggttttgctgctgcagcagcagcagctgcagctggtggtgtctctggttttgaatttggtgtggatcccaatctggatcctgaactggcccttgctcttagagtttcaatggaggaggagagagccagacaagaagcagctgccaaaaaggctgcagaggaggctgctaagcaggaaaaaggaggggaacagccgtctagctcacaggatgcaaccatgacagaaagtgccagtgtcactgcttctgaagctgacaacaagagacatgatttgacgaatgaagagaatgctctcctacagcaagctcttgcaatgtcaatggatgatcctgcctctagccaggaattgcgagatacagatatgtcagaggcagctgcagatgatccagagttggcactagctcttcaattgtctgtgcaggacagtccaaaagattcaggaaacccaacagatatgagcaagttgttggcggaccagtcctttgtatcctccatccttgcttcgcttcctggcgtagatccaaatgatccttcagtcaaagatttgcttgcttccatgcaaagccagtctgagccccaagaaaagaaggacgaagacaagccgaaggaggagaaatgaccactctctggtgttgtattctcgtgtgagattcgagtatcagatttcacccagttaaagaactattatcagcttagtgaacgaatgttcgaatttgaagggggcagcacaccaacttgtcggacttggagtgtcgtaactagcttttgggttctgcaaatctaaaagtccttcagtgcaactgttaatgttttctttgcatccaaaagggcctcagacgggcaggcattatttgaaaggtgaagaatgtgcagaacattggattgtatctctgtgatgtttcaatattatataccctttgaactaaaccggtcttttattttcttcagttttttcgaccctgatgtgtgctacttgtcacttctccatttttctgtaactaata

SEQ ID NO: 1286 - DNA, 1714 bp, Glycine max
taagcactcggttacagaacaaacttctttcactctttcgcttctgaatcttcaacaatggtgctcgaggcgacgatgatctgtatcgacaattctgaatggatgcgtaacggtgattactctccttctcgatttcaagctcaagcagacgctgtgaatctcatttgcggtgctaaaacgcagtctaatccagaaaatacagtgggagttctcacaatggcagggaaaggcgttcgtgttttggtcacccctaccagtgatctgggcaagatcttagcctgcatgcatgttgagttgagagtggatgcagactgtagagtcaagtttgcaaggccgaggttgaaggttgtacattcaaatttcatgatgccatgttttgggtttttgaaaggtgataaagcactttcattttggtcttttttgaaggtagagcatcactctggtgtagagttattcaattcctctctaacttggctagatataggtggtgagatgaacctagctgctggcattcaggttgcacaactggctcttaagcatcggcaaaataaaaaacaacagcagaggattattgtctttgctggaagccctgtcaagcatgaaaagaagatgttggagatgataggaagaaagttgaaaaagaatagtgttgcacttgatattgttaattttggtgaagaagatgaggggaagacagagaagctggaagcactcctcgcagctgttaacaataatgataccagccacattgttcatgttccatctggtcctaatgccctttctgatgtacttataagtacacctattttcactggtgatggggaaggtggaagtggttttgcagctgctgctgctgccgctgcagctggtggtgtatcaggatttgagtttggcgtggatccaaacttggatccagaattggctcttgctctaagagtttcaatggaagaggagcgagccaggcaggaagcagctgcaaaaaaggctgcagaggatgctgcaaaacaagagaagggaggtgagcagcaagccagctcacaagatgcaacaatgactgagcgtgccagtgcagcaatgtctgaagctgagaataagacaagtgatttgatggatgatgagaatgccttactacagcaggcgcttgcaatgtctatggatgatcctgccattagccatgatgtaaaagatacagatatgtcagaagcttctgcaagtgatcctgacttggctctggcactccaattgtcaatagcagatagtacaaaggatcaaggcagccagtcagacatgagcaaattgttggccgatcaatcctttgtatcttctatccttgcatcgcttcctggggttgacccaaatgacccttctgtcaaggatttgctggcttccatgcaaaatcagtctgagcctcaacagaagaatgacgacaagccatcaaacgaggaggagaagaagtaatctttgagaaccactttgccctgtatggttttattttcttggtagcattcttcgcggctgttactaatcgggggaactatttacgcatgtttcaatgtgtctctctgcactttaattggaaccaatgcatgtctctcgattgaatattggatgatttttaacttaaaatgttcttgattatcatgccttgttcttggttggtgcttatcatgtgacgagggcttttaaaggactgtgttttaataccgaagaaagt

SEQ ID NO: 1287 - DNA, 1576 bp, Panax ginseng
aaaacacgaattcttcccccacataatatagtcgaagagagaaacatatatagacacaatttcagcactctgtcacttaatttctcgattgattcctgctcattattcttcaatctccaaccatggtgctcgaggcgacaatgatctgcatcgataattccgaatggatgcgtaacggtgattactcgccgactaggtttcaagctcaggccgacgccgttaatctaatctgtggagccaaaacacagtctaatccagagaatactgtgggagtattgacaatggcgggcaaaggggtacgcgttttggttactcctaccagtgatcttggcaagatcttagcttgcatgcacggtttggacataggtggtgagatgaacttagcagcagggatccaagtagctcagttagccctcaaacatcgccaaaacaagaagcagcaacaaagaatcattgtatttgcaggaggtcctgttaaatatgataagaaggtactggagatgatcggtaggaagttaaaaaagaacagtgttgctcttgatgttgtcaactttggtgaagaagatgatgaaaagacagagaagcttgaggccctggttgctgctgtaaacaataatgacagcagtcacattgttcatgttcctcctggtgctaatgctctttctgatgtactaataagcactcctatctttactggtgatggagaggggggaagtggatttgcagcagctgctgcagcggctgcagctggtggtgtatccggttttgattttgacgtggatcctaatgtggaccctgaactggctcttgctcttcgagtgtcaatggaagaagagagggcaagacaagaagaagctgctaaaaaggctgcagaggaagcttcaaatcagggaaaaggcggggaacaagaatccacttcccaagatgtaaccatgactggaagtgctgctcctgcagcctctgaacctgaaaataagactgctgatttaatggatgatgagaatgcgctgctacagcaggcacttgcaatgtcaatggatgaccctgtggctactgttgctatgcgagataccgatatgtcggaggcagctgcagatgatcaagatttggctcttgctctccagttatctgtgcaggaaggtgcgagagatcaatcaagccagacagatatgagtaatttgttggcagaccaatcatttgtgtcatctatccttgcttcgctccctggagttgatccgaatgacccttcggttaaagatttgcttgcatctatgcaaaatcagtctgagaccgagcagaaaaaggacgaggataaggatccagcggaaggcaagtgaatgtttggatgatgccaagcagcaggtttaattttcacttaaatgcctgcatcattgtagatgggagatcattactgttagagaattgtgtaatagactatcctttttggcagggaaaggccccatctttagttattttctacagcactgtttccgtgtaacaaacattgaattgtctttgttttagtgtgatgttgctttatttatggtagtgacattgaaaataataataatactcc

SEQ ID NO: 1288 - DNA, 1594 bp, Panax ginseng
aagcagtggtatcaacgcagagtacacgggatagtcgaagagataaacatatataggcataatttcagaactctgtcacttaatttatcgattgattcctgttcattattcttcaatctccaaccatggtgctcgaggcgacaatgatctgcatcgataattccgaatggatgcgtaacggtgattactcgccgactaggtttcaagctcaggccgacgccgttaatctaatctgtggagccaaaacacagtctaatccagagaatactgtgggagtattgacaatggcgggcaaaggggtacgcgttttggttactcctaccagtgatcttggcaagatcttagcttgcatgcacggtttggacataggtggtgagatgaacttagcagcagggatccaagtagctcagttatccctcaaacatcgccaaaacaagaagcagcaacaaagaatcattgtatttgcaggaggtcctgttaaatatgataagaaggtactggagatgatcggtaggaagttaaaaaagaacagtgttgctcttgatgttgtcaactttggtgaagaagatgatgaaaagacagagaagcttgaggccctggttgctgctgtaaacaataatgacagcagtcacattgttcatgttcctcctggtgctaatgctctttctgatgtactaataagcactcctatctttactggtgatggagaggggggaagtggatttgcagcagctgctgcagcggctgcagctggtggtgtatccggttttgattttgacgtggatcctaatgtggaccctgaactggctcttgctcttcgagtgtcaatggaagaagagagggcaagacaagaagaagctgctaaaaaggctgcagaggaagcttcaaatcagggaaaaggcggggaacaagaatccacttcccaagatgtaaccatgactggaagtgctgctcctgcagcctctgaacctgaaaataagactgctgatttaatggatgatgagaatgcgctgctacagcaggcacttgcaatgtcaatggatgaccctgtggctactgttgctatgcgagataccgatatgtcggaggcagctgcagatgatcaagatttggctcttgctctccagttatctgtgcaggaaggtgcgagagatcaatcaagccagacagatatgagtaatttgttggcagaccaatcatttgtgtcatctatccttgcttcgctccctggagttgatccgaatgacccttcggttaaagatttgcttgcatctatgcaaaatcagtctgagaccgagcagaaaaaggacgaggataaggatccagcggaaggcaagtgaatgtttggatgatgccaagcagcaggtttaattttcacttaaatgcctgcatcattgtagatgggagatcattactgttagagaattgtgtaatagactatcctttttggcagggaaaggccccatctttagttattttctacagcactgtttccgtgtaacaaacattgaattgtctttgttttagtgtgatgttgctttatttatggtagtgacattgaaaataataataaataaaaaaaaaaaaaaaaaaa

SEQ ID NO: 1289 - DNA, 1262 bp, Momordica charantia
tcgaagtatagcatagcgccagcttcgtcttccacagttctacgtcttctggttctgcaacgatggtgctcgaggcgactatgatctgtattgacaactccgaatggatgcggaacggcgattattctccttcaagatttcaagctcaagcagatgccatcaatcttatttgtggagctaagacgcagtctaatccggagaatacggttggggttctgacaatggcgggaaaaggtgttcgtgtgctcgtcactcccaccactgaccttggcaagatactggcatgcatgcacggtttggagatagtggtgagataaacctggcagctggcatccaggtggctcagtcagctcttaagcatcgtcagaacaaaaagcagcaacaaagaattatagtctttgttggaagtcctgttaaacatgagaagaagtcattggagatgataggaagaaagttgaagaagaacaatgtggcccttgatattgttgattttggcgaagaagatgatggcaaacctgagaaattggaaagtcttcttgcagccgtgaacagtaacgacaccagccacattgttcatgttccttctggtccaaatgtgctgtctgatgtactcatcagtactccaatcttcactggagacggggaaggtggaagtggttttgcagcagctgctgcagctgctgctgcgggtggtgtagctggttttgattttggggttgatcccaacttagatcctgaacttgcccttgctcttagggtttctatggaagaggagagggccagacaggaggcagctgctaagaaggctgcagaggatacggcaaagcaagataaaggagttgagcagccatctggctcacaggatgcaactatgactgagcgtcctggacttgcaacttctgatgctgaaaacaagactactgatttaatggacgatgaaaatgctctgctacaacaagctcttgctatgtcaatggataatccttctgcagcgagtgacatacgagacatagacatgtcagaagttgcagcagacgatcctgaattggcacttgctcttcagttgtctgtgcaggaagcttccagtgactcaagccagtcagatatgagcaaattattggccgaccagtcttttgtttcttctattctagcttcacttccaggcgtagacccaaatgatccttccgtaaaagatttgctcgcctccatgcaaagccagtcagaggacaagaaaaacgaaggcaaagaatcaaaggaagatg

SEQ ID NO: 1290 - DNA, 1542 bp, Amsonia hubrichtii
tcgctaaccatggttctcgaggcaacaatgatctgtatcgacaactccgagtggatgcggaacggcgattactctccttctcggtttcaggctcaagccgatgctgttaatctcatatgtggtgccaaaacccagtctaatccggagaacactgtgggagttttgacaatggcgggtaagggggtacgcgtattggtgactcctaccagtgatctcggcaagatcttagcttgcatgcatggcctagaaataggcggtgagatgaacttggcagcagggatccaagtggcacagttggctctcaagcatcgccagaataagaagcagcaacaaagaattattgtatttgctggaagtcctgttaaatatgacaagaaggtattggagatgattggaaagaaattgaaaaagaacagtgttgcgcttgatgttgtgaacttcggtgaagaagatgaggggaagaccgagaaacttgaggcgctagttgctgcagtcaacaacaacgacagcagtcatattgttcatgttccttcgggtccaaatgctctttctgatgttctgataagtactcctatctttactggtgatggagaaggtggaagtgggtttgcagcagcagctgctgcagctgcagctggtggagtatctggttttgaatttggtgtggatcctaacctggatcctgaacttgctcttgctcttcgagtttcaatggaagaggagagggcaaggcaagaagcagctgcaagggctgcagaagaagcttcaagacaagaacaaggagaaccgcaatccacttcgcaagatgtaaccatgactgaaaaggtccaagctgaagcttctgaagctgaaaataggacaactgacctaatggatgatgacaatgccttgttacagcaggcacttgcaatgtcaatggatgattcttcctcaaatgttactactcgagacactgacatgccagaggcagccgctgatgatcatgaattgcaacttgcccttcaattgtctgtacaggacagtcatgatccatcgggccagtcagaccaggcagatgtgagcaagttgttgggtgaccagtcatttgtgtcgtccatccttgcttcgcttccaggagttgatccaaatgatccatcagttagagatttgcttgcatcaatgcaaaatcagtctgagcaaaagaaggacgaggacaaggcaccaaaagaagatgacaagaaagaatgatgcacgagcttctattccaactggacatgttcttgttccaatctcaaagtgcattccatagatgtgcttttgaaaatggaaaacatgtttggacaattattttaaacttggactgatttaatgctcattcttgagaatcatgtttgtattgtcattttagtttctttggaacatgaaatgggcgctttttttcttgaaacgggagatgtacttgttaatgattcctttcttatgatgatcacctttttcaattgtaaaagagaaaaaaaaggacagtagtagaaacatgtaagactatcatatgggcttggaaaa

SEQ ID NO: 1291 - DNA, 1906 bp, Cicer arietinum
aaacaattggccgctatagcctccgaatgaaaaggcccaagtagagaaacctccttcgcaagtaccttcagttctctcagctctctctctccgacaaatactgttttctcctccttccaaatctttcttccgaagttcttcaagttttcaactatggtgctcgaggctacgatgatctgtgttgacaattctgaatggatgcgcaacggtgattactctccttctcgatttcaagcccaatcagacgctgttagtcttatttgcggtgctaaaactcagtctaatcctgaaaatactgttggagttctcacgatggccgccaagggagttcgagttttggctacccctaccagtgatttgggcaaaatcctagcttgtatgcatggtctagaaataggtggtcagatgaacctagctgctggcattcaggtggcacagttggctcttaagcatcggcagaataagaagcagcagcaaaggattattgtctttgctggaagtcctgtcaagcatgagaagaaaatgttggagttgataggcagaaagttgaaaaagaatagtgtagctcttgacattgtcaactttggtgaagaagacgaggggaagacagagaagctggaagcactccttgcagctgtaaacaataatgatagtagccacatggttcatgttccacctggtccaaatgctctatcagatgtacttataagtacacctatttttactggtgatggagaaggtggaagtggttttgccgctgcagcagcagcagcatctgcaggcggtgtatctggatatgattttggtgtggatccaaacttggaccctgaattggctcttgctctgagagtttcaatggaagaagagagagccaggcaggaagcagctgcgaaaaaggctgcagaggatgcttccaaacaagagaaaggtggtgggcagcacgctatttcccaggatgcaactatgactgagaataagacaaatgatttgtggaaacaggatgacgagagtgctctactacaacaggcccttgcaatgtcaatggatgatcctgaggttagccatgatgtaagagatacagatatgtctgaagcagctacagatgatcctgaattggccctagctctccaaatgtcagtagcagacagcgccaaggattcagccagccagacagacgtgagtaaattgttggcagatcagtcctttgtatcttctgtccttgcatcgcttcctggggttgatccaaatgactcatccgttaaagatttgctggcttccatgcaaagtcagtctgaccagaagaatgaagaggagcgaccaaatgaggaggaggagaaataattcaagtctctttgcagtttcttattctctgttcctttgacagacatattggtattggtaacatgttggaaggtggttggggcattacttacttcacttgcattccagtaatcaaatttccccagcttatttgaacaaatgtacgtcgcttgattaggttagaagcctgttgttaatcagagcacaaagaaagaacatacatatacattgttttacggtcaaggatactgcatggaaatgttcgtcattgtcattatagtatatgatgaatccttttaattttttatttcttgtattttcttaatgtagatagtttacaagcagaggtgctcaattctgatacatgacctgttctatggtttttctcaaaatgcaaatcgcaatatctttacaaatgtatgcaataccctaggcagatgtggggccaatcaccaatctggccccaattgccacgtgtgtatcatcaatttgggcggtttcggtccagttaaaaggggtatggcctatgttaatttttgaacaaattctctgaaataggaacaatatactaaaattgcagtaaaaa

SEQ ID NO: 1292 - DNA, 1662 bp, Cucumis sativus
ctttggctcagcgaacaagcaaaggtttgcagggaagatcgaagtgttgcgttagcgccagattcatctttcgtagttctacctcttcaacgatggtgctcgaggcgactatgatctgtattgacaattccgaatggatgcgtaatggcgattacgctccttcaagatttcaagctcaagcagatgccatcaatcttatttgtggagctaagacgcagtctaatccagagaatacggttggggttctcacaatggcgggaaaaggtgttcgtgtgctggttacgcccaccactgacctgggcaagatactggcatgcatgcacggtttggagatagggggtgagataaacctagcagctggcatccaggtggctcagttggctcttaagcatcgtcagaacaaaaagcagcaacaaaggattatagtttttgttggcagtcctgtcaaacacgagaaaaagttactggagatgattggaaggaagttgaagaagaacaatgtggcccttgacattgttgattttggcgaagaagatgatggcaaacctgagaaactggaaagtcttctggcagctgtgaatagtaatgacaccagtcacattgttcatgttcctgctggtccaaatgtgctctctgacgtactcatcagtactcctatctttactggagatggcgaaggtggaagcggttttgcagcagctgcagcagcagctgctgccggtggcgtatctggtttcgattttggggttgatcccaacttagatcctgaacttgcccttgctcttagagtttcaatggaagaggagagggccagacaagaggcagctgcgaaaaaggctgcagaggagaatacaaagcaagaaaaaggagctgagcagccatctggctcacaggatgcaactatgaccgagcgctctggccttgcgactagtgatgctgaaaacaaggctgctgatttaatggatgatgagaatgcactgctacaacaagcccttgctatgtcaatggataatccttctggtaccagtgacatacgagatattgacatgtcagaagcagcatcagacgatcctgagttggcacttgctcttcaattgtctgtgcaggaaggctccagtgattcgtcaagccagacagatatgagtaaattgttggccgatcagtcttttgtgtcttctattcttgcttcgcttcccggcgtagatccaaatgatccctctgtaaaagatttgcttgcttccatgcaaagccaagcagaggataagaaagacgaagagaaatcatcaaaggaagacgagaaatgaggtatttcaagttggatttgcagccagaattcacaaatgtctaggaagatgactactatcaaattcctcaccattctcacccgtttctaaattgttatcttttgatggtaaaatatacggtatcatcagcagtgtgccttcctccattctggatcttcatatcttgttcattgtcaaacgaaggccgtacaagtccttcattgtgagagtaggagatatccagctgcttcctccgaacattactttcctttctacttttcacttcctcattcaacacattttgtttattcaatgaaagtcatatgtttgtcagaaacaaaataggtttgactataagttatatcttaagttaaaagtt

SEQ ID NO: 1293 - DNA, 1571 bp, Euonymus alatus
ctccagcaagtaaaacccaattcttattcagttctctgcatacctctttaatctttccctggattcatcgttttggccaatcaatctctaacgatggtgctcgaggcgaccatgatctgcatcgacaattcggaatggatgcgaaacggagattactctcccagcagatttcaagctcaagccgatgctgttaatcttatatgcggagctaagacacagtctaatccagagaatacagtgggagttcttaccatggcagggaagggagtacgggttttggtcactcctactagtgaccttggcaagatcttagcttgcatgcatggcttagaaataggcggtgagatgaacctggctgctggtatccaggtggcacagttagcacttaaacatcgccaaaacaaaaagcaacaacaaagaattattttctttgctggaagtcccgtcaaacatgacaagaagttgttggaaatgattggaagaaagttaaaaaagaatagtgttgcccttgatgttgttaattttggtgaagaagatgatggaaagacagaaaagctggaggcacttcttactgctgtgaacaacaatgataccagccacattgtccatgtcccttctggtccaagtgctctttctgatgtgctaataagtacgccaatcttcactggggatggtgaaggtggaagtggctttgctgcagcagctgcagccgctgcagctggtggtgtctctggttatgattttggtgtggatccgaatttggatcctgagcttgctcttgctcttagagtttcaatggaagaggagagggctcgacaagaagctgctgctaaaaaagctgcagaagatgctgctaagcaggaaaacagaggggaacagcaatccagctcacaggatgcaactatgactgaaaatactagtgttacagcttctgaaactgacaataagagaaatgatctctctgctgacgtggataacgcgttactacaacaggcccttgcaatgtcagtggatgatcctgccactagtcacgacattcgggacactgatatgtcagatgcagctgcagttgatccggagctggcgttggctcttcaattgtctgtgcaggacagtacaaaagattcagaaaaccaggcagatgtgaataagctgtttggggatccatcttttatgtcctccatctttgcctcgcttcctggtgttgatccaaatgatccatctgtccaagatttgcttgcttccatgcaaggccagtccgagtcccaacagaagaagactgaagacaaggagccaaatggagaggagaagtgatcatcatctagagttctcccaatttgtggtctagtcctttctaggactccaccttaccaaccgtttattactttgtgtattgtacaatcctgaatccggtttggctgttcttcaatgtggccttttgaagattcattttcgcgactttttatcagtcttgagagggctttagaagagcagacgtcattctagtgacaactgatatgcaatgtccagacttgcattaagtatttaatttctcttaatcgaaaagattg

SEQ ID NO: 1294 - DNA, 1655 bp, Citrullus lanatus
ctttggctcaggcaacaagcaaagatttgcagggaagatcgcagtgttcgtgtagcgccagatttgtcttccatagttctaccccttcaacgatggtgctcgaggcgacgatgatctgtattgacaactccgaatggatgcggaatggcgattacgctccttcaagatttcaagctcaagcagatgccatcaatcttatttgtggagccaagacgcagtctaatccagagaatacggttggggttctcacaatggcgggaaaaggtgttcgtgtgctggttactcctaccactgaccttggcaagatactggcatgcatgcacggtttggagataggtggtgagataaacctcgcagctggcatccaggtggctcagttggcccttaagcatcgtcagaacaaaaaacagcaacagaggattatagtatttgttggcagtcctgtcaaacatgagaagaagttactggagatgataggaaggaagttgaagaagaacaatgtggcccttgacattgttgattttggtgaagaagatgatggcaaacctgaaaaactggaaagtcttctggcagctgtgaacagtaatgacaccagtcacattgttcatgttcctgctggtccaaatgtgctctctgatgtactcatcagtactcctatctttacgggagacggggaaggtggaagtggttttgcagcagctgctgcggctgcagcagcaggtggcgtatctggttttgattttggggttgatcccaacttagatcctgaacttgccctcgctcttagagtttcaatggaagaggagagggccagacaagaagcagctgcgaaaaaggccgcagaggagaataccaagcaagaaaaaggagctgagcagccatctggctcacaggatgcaactatgaccgagcgttctggtcttgcgacttctgatgctgaaaacaaggctgctgatttaatggatgatgagaatgcgctgctacaacaagcccttgctatgtcaatggataatccttctgctaccagtgacatacgagacattgacatgtcagaagccgcatcagatgatcctgagttagcacttgctcttcagttgtctgtgcaggaaggctccagtgactcgacaagccagacagacatgagtaaattattggccgatcagtcttttgtgtcttctattcttgcttcacttccaggagtagatccaaatgatccctctgtaaaagatttgcttgcttccatgcaaagccaagccgaggaaaagaaagacgaagacaaatcatcaaaggaagatgagaaatgaggcattccgagctcgatttccagccagaattcgttatgatttattatcaaattcctcacccttctccgccctctctaaattggttatctttcatggcaaaatatatggtatctccagtgtgcccattctggacttcgatatctcatcttcttcattgtcaaacaaaggccgtacaagtccttcatgtgtgagaggagagaaacagtagcttcggaacattactttctttttcacttttcacttcctcgttcgacacattctgtttattcaatgaagaaaatgatatgcttgtccttttcacaatcaactaaaagaaagaaaataggtcaaactatatgtttactctttgaa

SEQ ID NO: 1295 - DNA, 1587 bp, Catharanthus roseus
ctggtctcatcagtagccctcccagcaagcaaaggcgagagcaaacacacaaattctcggatttttccctcagtttctacgcgactgtgttcttcttcaatcgataatcatggttcttgaggcgacaatgatctgcatcgacaactcggaatggatgcggaacggtgattattctccttctcggtttcaggctcaagccgaagctgtcaatctcatatgtggtgccaaaacccagtctaatccggagaatactgtgggtgttttgacaatggcgggcaagggtgttcgcgtattagtaactccgaccagtgatcttggcaagatcttagcttgcatgcacggcctagaagttggtggcgagatgaatttggcagcagggatccaagtggcacagctggctctcaagcatcgccagaacaaaaagcagcaacaaaggattattgtatttgctggaagtcctgttaaatatgacaagaaggtattggagatgattggaaagaaactgaaaaagaaacagtgttgctcttgatgtcgtaaacttcggtgaagaagatgaggggaagacagagaaacttgaggcgctggtggctgcagttaacaacaatgacagcagtcatattgttcatgttcctccaggtcccaatgctctttctgatgtcttgataagtactcctatctttaccggtgatggagaaggtgggagtgggtttgcagcagcagctgctgcagctgcagctggtggagtatctggctttgattttggtgtggatcctaacctggatcctgagcttgctcttgctcttcgtgtttcaatggaagaggagagggcaaggcaagaagcagctgcaaaggctgcagaagaagcttcaaaaaaagaacaaggggaacagcaatcaacttcacaagatgtaaccatgagtgagaacgtccaagctggaagttctgaagctgaaaataggacagctgacctaatggacgatgacaatgcattgttgcagcaggcacttgcaatgtccatggatgattcttcctcaaatgttgctacacgagacactgacatgccagaagcagctgccgatgatcatgaattacaactcgcccttcaattgtctgtgcaagacagtcatgatgcatcaaatcagtcagatcccacagatgtgagcaagttgttgggtgaccagtcatttgtgtcttccattcttgcttcgcttccaggagttgatcccaatgatccatcagttaaagatttgcttgcatccatgcaaaatcagtctgagcaaaagaaggagaaggacgaggacaaggcaccgaaagaagaggaaaagaaagaatgatgatacaaaagtttcttctatgactactgcattgctctttccaagttgtgcttctgaaaatggaaaacatattggagagttattctgtattttgaaccatctaatgctcattcttggaaacgtctctgtattgtcctttcaagcttctatggaacattcttgagatgcgcttatttattttcctttttctggaaggggatgctacttgctagcttgctaaatcttacattctctagtataatctatccagtcc

SEQ ID NO: 1296 - DNA, 1520 bp, Chrysanthemum coronarium
aaaacccaaattcaccttcatcatcataatcatcatccccaatcttaacccaaacacacccaattccaataatcaacaatggttctcgaggcaacgatgatctgtattgataactcagaatggatgcgtaacggtgattattcaccaacaaggtttcaagctcaagctgatgctgttaatctcatttgtggtgctaaaacacaatctaatccggagaataccgtgggtgtattgacaatggctggaaaaggcgttcgtgttttggttactcctactagtgatcttggaaagatcctggcctgtatgcatggtttagaaataggtggtgagatgaacttggccgccggaatccaggttgctcagttggcgttgaagcatcgtcaaaacaaaaagcagcaacagaggattattgtgtttgctggaggtcctgtgaaatatgataagaaagtattggaaatgattggaaagaagttaaaaaagaacagtgtcgcccttgatgttgtgaacttcggtgaagaggatgaagctaagacggaaaaacttgaggccttggttgctgctgtgaataataatgacagcagtcacattgttcatgtaccggctggaactaatgccctttctgacgttctattgagtactccaatcttcactggtgatggagaaggtggtagcgggtttgcagcagctgctgccgcggctgcagctggcggtgtatctggttttgattttggtgttgatcccaatttggaccctgaacttgcacttgctcttcgtgtttctatggaagaggagagggcgaggcaagaagctgccgcgaaaaaggctgcagatgattcttctaagcaagagaaagaaggggagtctacttcacaagatgcaaccatgtctgaaaatgttgggacttctgaacctgagaataaaaaagatgatttaatggatgatgagaatgctctgctacagcaggctcttgccatgtcaatggatgatcctgctgctactgttacaacaagggacgttgatatgtccgaggcagccactgatgatcaagacttggcacttgccctacaattgtctgtgcaagaaggtgcaaaagatcaatcaggccaggcggacatgggcaagctgttggcagatcagtcatttgtgtcatcaattcttgcttcactcccaggagttgatcctaacgacccttcagtcaaagatttgcttgcttcaatgcaaaatcagtctgagtctgagcagaagaaagacgaggacaaaaaggaagacgacaagtgatcttgtatgctcctctataagtatagtcccaggttacaacttgtgctgcatttggtggagatttcttcaatgaactgtataatgggatagattgcaatgcgttgaatgtacggaacattgttcttgtcaccatggatcagtttctcagttgatgcttgttatattaactttaatcatggtacttggataatcaaattgttattttagctgttctcatgtatgtttcttaaaatgctgaaacc

SEQ ID NO: 1297 - DNA, 1481 bp, Chrysanthemum coronarium
ttaacccaaacacacccaattccaataatcaacaacaatggttctcgaggcaacgatgatctgtattgataactcagaatggatgcgtaacggtgattactcgccaacaaggtttcaagctcaagctgatgctgttaatctcatttgtggtgctaaaacacaatctaatccggagaataccgtgggtgtattgacaatggctggaaaaggcgttcgtgttttggttactcctactagtgatcttggaaagatcctggcctgtatgcatggtttagaaataggtggtgagatgaacttggccgccggaatccaggttgctcagttggcgttgaagcatcgtcaaaacaaaaagcagcaacagaggattattgtgtttgctggaggtcctgtgaaatatgataagaaagtattggaaatgattggaaagaagttaaaaaagaacagtgtcgcccttgatgttgtgaacttcggtgaagaggatgaagctaagacggaaaaacttgaggccttggttgctgctgtgaataataatgacagcagtcacattgttcatgtaccggctggaactaatgccctttctgacgttctattgagtactccaatcttcactggtgatggagaaggtggtagcgggtttgcagcagctgctgccgctgccgcagctggcggtgtatctggttttgattttggtgttgatcccaatttggaccctgaacttgcacttgctcttcgtgtttctatggaagaggagagggcgaggcaagaagctgccgcgaaaaaggctgcagatgattcttctaagcaagagaaagaaggggagtctacttcacaagatgcaaccatgtctgaaaatgttgggacttctgaacctgagaataaaaaagatgatttaatggatgatgagaatgctctgctacagcaggctcttgccatgtcaatggatgatcctgctgctactgttacaacaagggacgttgatatgtccgaggcagccactgatgatcaagacttggcacttgccctacaattgtctgtgcaagaaggtgcaaaagatcaatcaggccaggcggacatgggcaagctgttggcagatcagtcatttgtgtcatcaattcttgcttcactcccaggagttgatcctaacgacccttcagtcaaagatttgcttgcttcaatgcaaaatcaatctgagtctgatcaaaagaaagacgaggacaaaaaggaagacgacaagtgatcttatatgtttcctctataagtataatcccaggttacaacttgtgctgcatttggtggagatttcttcgatgaagtgtataatgggatagattgcaatgcgttgaatgtacggactattgttcttgttaccatggatcagtttctcagttgatgcttgttattatgaactttaatcatggtacttggataatcaaattgttattttagctgttctcatgtatgtttcttaaaatgctgaaacc

SEQ ID NO: 1298 - DNA, 1477 bp, Gossypium hirsutum
cgatccctcctccattttcaccatggtgctcgaggcaacgatgatctgtattgataattcggagtggatgcggaatggtgattacggtccttctcgatttcaggctcaagccgatgctgttaaccttatttgtggagctaaaactcagtctaatccagagaatacagtgggagttttaacaatggcaggcaaaggtgttcgtgttttggtcactcccacaagtgatcttggcaaaatcttagcttgcatgcacggcttagaaataggtggtgaaatgaacttggcagctgggattcaagtggctcaattggcgcttaagcatcggcaaaataaaaagcagcagcaaaggattattgtctttgctggaagccctgtcaaacatgagaagaagacattggagatgattggaaagaagttgaaaaagaacagtgtaacgcttgatattgtaaatttcggtgaagatgatgaagggaagacagagaagctcgaagcgcttcttgctgctgttaacaataatgatactagtcacatcgttcatattcctgctggtcctaatgctctctctgatgtacttctaagtacacccatcttcactggggacggggaaggtggaagtggttttgcagcttcggcagcagcagctgcagctggtggcatctctggttttgagttcggcgtggatcccaaccttgatcctgaactggcccttgctcttagagtttcaatggaagaggagagagccaggcaagaagctgctgctaaaaaggcagcagaagagtcatcgaaacaagaaaagggtggggaagaacaggatgcgacgatgacagaacgtgctagtgagggagcttcagaagctgataataagaaaaatgaatttttgcaggctcttgcaatgtcgatggatgagcctgcctccagccatgatttacaggatactgagatgtcagatgcagctactgaggatccagagctggcattagctcttcaattatccgtgcaagacagtgcaaaagattcatctagtcaggcagatatgagtaagttattggcagaccagtcattcgtatcctccatccttgcatcgcttcccggggtagatccaaacgatccttcagttaaggaggtgcttgcttccatgcaaagccaatctgagccccagcagaagcaagatgaggacaaggcaccaaaggaggaagacaagaagtgatgtttgttcggattcgtttttctttcagatacggaagctcttcatggttaccaccaggatgcatgttgatggttattatttcgttttgaaggcctttgtaaaagcatatgttattttcattgaaatgcatctcattcatgtttccactaattatatatatacatatatatattgttctagtacagattttactatattatcatacaacttatttgcagtgaatcaacatttttctgggtgttatgttattatatatggaaaccaatgatg

SEQ ID NO: 1299 - DNA, 1489 bp, Echinacea purpurea
cggccgggggagggataaataaatgtatattggcaaaactcaggggctttatatgagtttcacagatctaccttcaaatagcagctatcgtcgtgtgcaagaaaactcgcgattcatccaaattacaactctgtaatcgttctttcaattcactttcattctttcttcaatcatcaatcatggtgctagaggcgacgatgatctgtattgataattctgaatggatgcgcaacggcgattactcacccactaggtttcaggctcaagctgacgcagttaatctaatctgtggcgctaaaactcagtcaaatccagagaatactgtgggtgtgttaacaatggctggaaaaggtgttcgtgttttggtcactcctactagcgatcttggcaagatcttggcctgcatgcatggtttagaaataggtggtgagatgaacttggcagctgggattcaggttgctcagttggcattgaagcatcgccagaacaaaaagcagcaacagcgcataattgtgtttgcaggaagtcctgtaaaatatgataaaaaagtattggagatgattggaaagaagttaaagaagaacagtgtagctcttgatgttgtgaactttggtgaagaagatgaaggcaagacagaaaagcttgaggctctagttgctgctgtaaataataatgacagcagtcacattgtacatgttccagctggatcaaatgcactctctgatgtccttttgagtactccaatctttactggtgatggagaaggtggaagtggctttgcagcggcggcggcagcagcggcagctggcggtgtatctggttttgatttcggtgtcgatccgaatctggaccctgaacttgcacttgctcttcgtgtttcaatggaagaagagagagcaaggcaagaagctgctgctaaaaaagctgcagaggatacttcaaagcaagagaaagaaggggcgtctacttctcaagatgcaactatgtctgaaaatgttgccacctcagcttctgaatctgagaataaaaaggatgatttaatggatgatgagaatgcactgctacagcaggcgcttgctatgtcaatggatgatcccgctactactgttactaccacaagggacactgatatgtcagaagcagctgctgatgatcaagatttggcacttgctctacaattatcggtgcaagaaggggcaaaagatcaatcaggggagacagatatgggaaaacttttggcagatcaatcatttgtgtcatctattcttacttccctccctggagttgacccaaatgatccttcagtaaaagatttgctggcttctatgcaaaatcagcccgaaaagaaagatgatgacaaagagcccaaagaagatgacaagtgatcttacgtgttcgtttattagtataatcccaggttactgcatttggtgtagggtaatgggatagattacaatgtacgaaatactattccggttgccatggattt

SEQ ID NO: 1300 - DNA, 1718 bp, Cucumis melo
gccagattcatcttccatagttctacatcttcaacgatggtgctcgaggcgactatgatctgtattgacaattccgaatggatgcgtaatggcgattacgctccttcaagatttcaagctcaagcagatgccatcaatcttatttgtggagctaagacgcagtctaatccagagaacacggttggggttctcacaatggcgggaaaaggtgttcgtgtgctggttacgcccaccactgacctgggcaagatactggcatgcatgcacggtttggagatagggggtgagataaacctagcagctggcatccaggtagctcagttggctcttaagcatcgtcagaacaaaaagcagcaacaaaggattatagtttttgttggcagtcctgtcaaacacgagaaaaagttactggagatgatcggaaggaagttgaagaagaacaatgtggcccttgacattgttgattttggcgaagaagatgatggcaaacctgagaaactggaaagtcttctggcagctgtgaatagtaatgacaccagtcacattgttcatgttcctgctggtccaaatgtgctctctgatgtactcatcagtacacctatctttactggagatggcgaaggtggaagtggttttgcagcagctgcagcagctgctgctgctggtggcgtatctggttttgattttggggttgatcccaacttagatcctgaacttgcccttgctcttagagtttcaatggaagaggagagggccagacaagaggcagctgcgaaaaaggctgcagaggagaatacaaagcaagaaaaaggagctgagcagccatctggttcacaggatgcaactatgaccgagcgccctggccttgcgacatttgttgctgaaaacaaggctgctgatttaatggatgatgagaatgcactgctacaacaagcccttgctatgtcaatggataatccttcgggtaccagtgacatacgagatattgacatgtcagaagcagcatcagacgatcctgagttggcacttgctcttcaattgtctgtgcaggaaggctccagtgattcgtcaagccagacggatatgagtaaattgttggccgatcagtcttttgtgtcttctattcttgcttcacttccaggcgtagatccaaatgatccctctgtaaaagatttgcttgcttccatgcaaagccaagcagaggataagaaagatgaagagaaatcatcaaaggaagatgagaaatgaggtattttgagatcgatttgcagccagaattcacaaatgtctaggaagatgactattatcaaattcctcaccattctcacctgtttccaaattgttatcttttgatggtaaagtatatggtatcatcagcagtgtgccttccttcattctggatcttcatatcttgttcgttgtcaaacgaaggccgtacaagtcgttcattgtgagagtaggagatatccagctgcttcggaacaatacttttcttttcactttttacttttcacttcctcattctacacattttgttttattcaatgaaagtcatatgtttgtccaaattaggtttaactataagttatatcttaagctaaaagtttgggctttgtgtttatttgaagttagattgacattttactccatatttagtccaacgaattcgttcattgtcatgattaagaaacatcaaaatcaatttcatgttttattaa

SEQ ID NO: 1301 - DNA, 1327 bp, Cannabis sativa
caaatacttattagaagaatagaacactgaagaagcctccttatgcaagaaaacttctctctctctctctctctctctttccttctctctctacagttagggattctttcttctctgtaattccaatcttcttcaaccatggtgctcgaggcgacaatgatctgtattgacaattcggaatggatgcggaacggtgattattctccttctaggattcaagctcaggctgacgctgtgaaccttatttgtggagcaaaaacccagtctaacccagagaacacagtgggagttctcacaatggctgggaaagggcttcgtgttttggtgactccaactagtgatcttggcaagatcctagcatgcatgcatggtttagaaataggcggtgagatgaatctggctgctggtatccaggtggctcagttggctctcaagcataggcagaacaagaagcagcaacaaagaattattgtctttgctggaagtcccataaaacatgaaaaaaagactttagagatgattggaagaaagttgaaaaagaacagtgtagcacttgatattgttaattttggtgaagaagatgatggaaagaatgagaaggtagaggcacttcttggttcggtgaacaacaatgacactagccacattgttcatgttccacctggtccaaatgttttgtctgatgtgcttattagtacacctatcttcaccggtgatggggaaggtgcaagttttgcagcagcaactgctgccgctgcagctggaggtggtggttttgattttggtgtagatcccaacttagatccagagctggcgcttgctcttagagtttcaatggaagaagagagagccaggcaggaagcagctgctaaaagggctgcagaggaggcaactaaggatgggaaagagggggaacagccatccagctcacaggatgcaactatgacagagcgcgccaccgttgcaacttctggagctgacactaaggcagcaactgatttgacggacgatgagaacgctctactgcagcaggcccttgcaatgtcaatggatgaccctgcatctggtgatgtgcgagacacagatatgtcagaggcagctgcagaggacccagaattggccctagcacttcaattgtcagtgcaagaaggtgcaaaagattcatctaaccaggcagatatgagcaagttgctggctgatcagtcatttgtgtcttccattcttgcctctcttccgggagttgatccaaacgatccttcagttaaagatttgctggcttccatgcaaagccagtcagagggtgaccagaagaaatctgaagacaaag

SEQ ID NO: 1302 - DNA, 1581 bp, Cichorium intybus
tgagcagcacggggctatcgtcgagagcaagaaaactttcaattcctccctctttctccatatacaactctcaaattctgtaatcactatttcgatttactctatttcttcttcaaccttcaaccatggtgctcgaggcgacgatgatctgtatcgataattcagaatggatgcgaaacggcgattactcgccaactaggtttcaagctcaagccgacgccgttaatctgatttgtggcgctaaaacccagtctaatccagaaaacactgtcggcgtgttgacaatggctggcaaaggtgtccgtgttcttgtcactccgactagcgatcttggcaagatcctggcttgcatgcatggtctagaaataggtggtgagatgaacttggcagctgggatccaagttgctcagttagctttaaagcatcgccaaaacaaaaagcaacaacaaagaataatcgtatttgctggaggccctgtaaagtatgacaagaaagtactggaaatgattggtaagaagttaaaaaagaacagtgtagctcttgatgttgtcaactttggtgaagaagatgaatcaaagtcagaaaagcttgaagctttagttgctgctgtaaacaacaatgacagcagtcacattgttcatgttccagctggatccaatgccctctctgatgttcttttaagtactccaatctttactggtgatggagaaggtggaagtggatttgcagcagctgctgctgcagctgcagctggtggtgtatctgggtttgactttggtgttgacccgaatcttgaccctgagctggcacttgctcttcgtgtttcaatggaagaagaaagagcaagacaagaagctgctgctaaaaaagctgctgatgattcttcaaagactgagaaagaaggggagtccacttcacaggatgcaaccatgtctgaaaatgttggaacttctgcttctgaatccgagaataaaaaggatgatttaatggatgatgaaaatgcactgctgcaacaggctcttgccatgtcaatggatgatcctgctgccactgtgacaactagggacactgatatgtctgaagctgctgctgatgatcaagatttggcacttgctttacagttatctgttcaagaaggtgcaaaagacggatcagggcaggcggatatggggaagcttttggctgatcagtcgtttgtgtcctcaattcttgcttcgcttccaggagttgaccctaatgatccttcggtcaaagatttgcttgcttcaatgcaaaatcagcccgaatctgaacagaagaaagatgaggacaaagcacccaaggaggacgacaaatgattttatcttattttactctcaggttacaagttgtggtggctacatttgatggagttctgttggagcaagtgtgtaagaatgggatagccttgaatatgggtgttggattggatgtaccgattactattcttgttaccatggacttaaatcagtttgacttttggtcttgtttatcaacttaaaaatcatggtacttggataatcatcaaattcttcttgtttgtttacttatgtttgtttgttt

SEQ ID NO: 1303 - DNA, 1564 bp, Cichorium intybus
agcagcacggggctatcgtcgagagcaagaaaactttcgattcctccctctttctccatatacaactctcaatttctgtaatcactctttcaatttactctatttcttcttcaaccttcaaccatggtgctcgaggcgacgatgatctgtatcgataattcagaatggatgcgaaacggtgattattcgccaactaggtttcaagctcaagccgacgccgtcaatctgatttgtggcgctaaaacccagtctaatccagaaaacactgtcggcgtgttgacaatggctggcaaaggtgtccgtgttcttgtcactcctactagcgatcttggcaagatcctggcttgcatgcatggtctagaaataggtggtgagatgaacttggcagctgggatccaagttgctcagttagctttaaagcatcgccaaaacaaaaagcaacaacaaaggataatcgtatttgctggaggccctgtaaagtatgacaagaaagtactggaaatgattggtaagaagttaaaaaagaacagtgtagctcttgatgttgtcaactttggtgaagaagatgaatcaaagtctgaaaagcttgaagctttagttgctgctgtaaacaacaatgacagcagtcacattgttcatgtcccagctggatccaatgccctctctgatgttcttctaagtactccaatctttactggtgatggagaaggtggaagtggatttgcagcagctgctgctgcagctgcagctggtggtgtatctgggtttgactttggagttgacccaaatcttgaccctgagctggcacttgctcttcgtgtttcaatggaagaagagagagcaagacaagaagctgctgctaaaaaagctgctgatgattcttcaaagaatgagaaagaaggggagtccacttcacaggatgcaaccatgtctgaaaatgttggaacttctgcttctgaatccgagaataaaaaggatgatttaatggatgatgaaaatgcactgctgcaacaggctcttgcaatgtcaatggatgatcctgctgccactgtgacaactagggacactgatatgtctgaagctgctgctgatgatcaagatttggcacttgctttacagttatctgttcaagaaggtgcaaaagacggatcagggcaggcggatatggggaagctgttggctgatcagtcgtttgtgtcctcaattcttgcttcgctaccaggagttgaccctaatgatccttcggtcaaagatttgctcgcttcaatgcaaaatcagcctgaatctgaacagaagaaagatgaggacaaagcacccaaggaggacgacaaatgattttatcttattttactctcaggttacaagttgtggtggctacatttgatggagttttgttggagcaagtgtataagaatgggatagccttgaatatgggtgttggattggatgtaccaattactattcttgttaccatggacttaatcagtttgacttttggtcttgtttatcaacttaaaaatcatggtacttggataatcatcaaatttgtcttgtttgtttattt

SEQ ID NO: 1304 - DNA, 1493 bp, Gossypium hirsutum
aaaaaaaatttttctctttctctctcgatccctcctccattttcaccatggtgctcgaggcaacgatgatctgtattgataattcagagtggatgcggaatggtgattacggtccttctcgatttcaggctcaggccgatgctgttaaccttatttgtggagctaaaactcagtctaatccagagaatacagtgggagttttaacaatggcaggcaaaggtgttcgtgttttggtcactcccacaagtgatcttggcaaaatcttagcttgcatgcacggcttagaaataggtggtgaaatgaacttggcagctgggattcaagtggctcaattggcgcttaagcatcggcaaaataaaaagcagcagcaaaggattattgtctttgctggaagccctgtcaaacatgagaagaagacattggagatgattggaaagaagttgaaaaagaacagtgtaacgcttgatattgtaaatttcggtgaagatgatgaagggaagacagagaagctcgaagcgcttcttgctgctgttaacaataatgatactagtcacattgttcatattcctgctggtcctaatgctctttccgatgtacttctaagtacacccatcttcactggggatggggaaggtggaagtggttttgcagcttcggcagcagcagctgcagctggtggcatctccggttttgagttcggtgtggatcccaaccttgatcctgaactggcccttgctctcagagtttcaatggaagaggagagagccaggcaagaagctgctgctaaaaaggcggcagaagagtcatcgaaacaagaaaagggtggggaagaacaggatgcgacgatgacagaacgtgctagtgagggagcttcagaagccgataataagaaaaatgaatttttgcaggctcttgcaatgtcgatggatgagcctgcctctagccaggatttacaggatactgagatgtcagatgcagctgctgaggatccagagctggcattagctcttcaattatccgtgcaagacagtgcaaaagattcatctagtcaggcagacatgagtaagttattggcagaccagtcatttgtatcctccatccttgcatcgcttcctggggtagatccaaacaatccttcagttaaggaggtgcttgcttccatgcaaagccaatctgagccccagcagaagcaagatgaggataaggcaccaaaggaggaagacaagaagtgatgtttgtttggattcgtttttctttcagatatggaagctcttcatggttaccaccaggatggatgttgatggttattatttcgttttgaaggcctttgtaaaaacatatgttattttcattgaaatgcatctcattcatgtttccagtaattatatatatatattgttctagtacagattttactatattatcatacaacttatttgcagtgaaatcaacatttttctgggtgttatgttattttatacggaaaaaaaaaa

SEQ ID NO: 1305 - DNA, 2020 bp, Euonymus alatus
gatcgttccaattttaatcggaggcctcttcagcaagtaaaccccaattcattcttcgtttctctgcatacttctttacactttgtctggatccatcgttttgccctatcaatcttaaacgatggtgctcgaggcgaccatgatctgcatcgacaattcggaatggatgcgaaacggagattacgctcccagcagatttcaagcccaagccgatgctgttaatcttatatgcggagctaaaacacagtctaatccagagaatacagtgggagttctcaccatggcaggaaagggtgtacgggttttggtcactcctactagtgacctaggcaagatcttagcttgcatgcatggcttagaaataggtggtgagatgaacctcgctgctggtatccaggtggcacaattagcacttaagcatcgccaaaacaaaaagcagcaacaaaggattattgtctttgctggaagtcccgtcaaacatgacaagaagttgttggaaattattggaaggaagttaaaaaagaataatgttgcccttgacattgttaattttggtgaagaagatgatgggaagacagaaaagctggaggcacttcttactgctgtgaacagcaatgatacgagccacattgtccatgttccttctggtccaagtgctctttctgatgtcctaataagtacgccaatcttcactggggatggtgaaggtggaagtggctttgctgcagcagccgcggccgctgcggctggtggtgtttctggttatgattttggtgtggatccgaatttggatcctgagcttgctcttgctcttagagtttcaatggaagaggagagggcacgacaagaagctgctgctaaaaaagctgcggaagatgctgctaaacaggaaaaaggaggcgaacctcaatccagctcacagaatgcaactatgactgaaaatactagtgttgccgcttctgaaacggacaataagagaaatgatctttctgctgacatggataacgcgttgctacaacaggcccttgcaatgtcaatggatgaccctgccactagtcctgacatgcgggacactgatatgtcagatgcagctgtagatgatccagagctggcaatggctcttcaattgtctgtgcaggaaagtacaaaagattcggcaaaccaggcagatgtgaataagctgttgggtgacccatctttcatgtcctccatctttgcatcgcttcctggtgtggatccaaatgatccatccgtccaagatttgcttgcttccatgcaaggccagtccgagtcccaacagaagaagaatgaagacaaggggccagatggagaggagaaatgataatcatatggagttctcccaatttgttgtccagtcctttctaggaggccattttaccaacccgtcattacttctgtattgagcaaatcctgaatcaggtttggtagttcttcaatgtatgtggccttcattggcttgactttttatctttcttgagagggctttagaggttcagacgtcattgtagtgacaagcaatatgcaatgtccagacttgcattaagtatttattatttcttaactgaaaagattgaatgctttttgtgattttatgaaaatgtacgtatggaatgggataaataaacaacatctatgtgcacaagactctctaatggattgggctggggacagatttatgcaattttactcctacatgatatgtggagtatatgaaggttgcttttttcaattcctctacattaaacggtaggaactttataaaaaaattgaaaatttaattaaattattggactttggttacataactcaaagggggatcatcgagaaatcgtttcatggggttgaagaagaagcggaaggaatggattctctttcgagggaggaatccaacaagttgttggaagacttgttgatcctcgttttacgagcagtgagtaagactaagtggggcaatggcattggaatccttcatggctcccgcctgactcaactctctgac

SEQ ID NO: 1306 - DNA, 1746 bp, Gossypium raimondii
ttataattcaaactcaaaatgatctaaatctaaatttcgactcctctcaattttctttaggaattgcttccattactcgtgtcaatgtttcattgtaagcttacctcttctatactctaccttctcgtagcctatatatattcaaacagcaactgttcattcagatcaatactttgtcgttttctaatcatccatctccttcaattcaagtaccaaacttgtaaacccaaaatttttctctttctctctcgatccctccttcattttcaccatggtgctcgaggcaacgatgatctgtattgataattcggagtggatgcggaatggtgattacggtccttctcgatttcaggctcaagccgatgctgttaaccttatttgtggagctaaaactcagtctaatccagagaatacagtgggagttttaacaatggcaggcaaaggtgttcgtgttttggtcactcccacaagtgatcttggcaaaatcttagcttgcatgcacggcttagaaataggtggtgaaatgaacttggcagctgggattcaagtggctcaattggcgcttaagcatcggcaaaataaaaagcagcagcaaaggattattgtctttgctggaagccctgtcaaacatgagaagaagacattggagatgattggaaagaagttgaaaaagaacagtgtaacgcttgatattgtaaatttcggtgaagatgatgaagggaagacagagaagctcgaagcgcttcttgctgctgttaacaataatgatactagtcacatcgttcatattcctgctggtcctaatgctctctctgatgtacttctaagtacacccatcttcactggggacggggaaggtggaagtggttttgcagcttcggcagcagcagctgcagctggtggcatctctggttttgagttcggcgtggatcccaaccttgatcctgaactggcccttgctcttagagtttcaatggaagaggagagagccaggcaagaagctgctgctaaaaaggcggcagaagagtcatcgaaacaagaaaagggtggggaagaacaggatgcgacgatgacagaacgtgctagtgagggagcttcagaagctgataataagaaaaatgaatttttggctcttgcaatgtcgatggatgagcctgcctccagccatgatttacaggatactgagatgtcagatgcagctactgaggatccagagctggcattagctcttcaattatccgtgcaagacagtgcaaaagattcatctagtcaggcagatatgagtaagttattggcagaccagtcattcgtatcctccatccttgcatcgcttcccggggtagatccaaacgatccttcagttaaggaggtgcttgcttccatgcaaagtcaatctgagccccagcagaagcaagatgaggacaaggcaccaaaggaggaagacaagaagtgatgtttgttcggattcgtttttctttcagatacggaagctcttcatggttaccaccaggatgcatgttgatggttattatttcgttttgaaggcctttgtaacagcatatgttattttcattgaaatgcatctcattcatgtttccactaattatatatatacatatatatatatattgttctagtacagattttactatattatcatacaacttatttgcagtgaaatcaacatttttctgggtgttatgttattatatgtggaaaccaatgatgttatgttaaatttagaag

SEQ ID NO: 1307 - DNA, 1824 bp, Solanum phureja
tatcctcttcggattgtgacttttcctcctttaagcagcaactccctccgcaagtaaactcaaattccttccaattttcagagagagagagagacgaaacgatttctcagttcaatcttccaatcattggatttttcttcaatcgttaaccatggtgctcgaggcgacaatgatctgcatcgacaattcggagtggatgcgaaacggtgattactcgcccaataggttccaagctctagcagacgctgttaatctaatctgtggtgccaaaacccagtctaatcccgagaatacagttggaattttgacgatggctggtaaaggggttcgagtgttagtcactccgactagcgatcttggaaaaatcttagcttgtatgcacggattggagataggcggtgagatgaatttggctgctggaatccaggtagcccagttggcattgaagcaccgacaaaacaagaagcaacaacaaaggatcattgtttttgctggcagccctgttaaatatgacaagaaggtcttggagatgattgggagaaagttgaagaagaatagtgtagcacttgatgtggttaattttggtgaagatgatgaagggaaagctgagaagctagaggcactagttgctgcgcttaataccaatgacagtagtcacatcattcatattcctcctggtcctaatgctctctctgatgttctcataagtactcctattttcactggtgatggtgaaggtggcagtggatttgctgctgctgctgcagcggctgctgctggtggagtgtctggatatgattttggtgtagatcctaatttggatccggaacttgctctcgcactccgagtttcaatggaggaagaaagggcgaggcaggaagcagccgcaaaaaaggctgcagaagaagctggtaaccaagagaaaggagaaaatcagtctacttcccaggacgttgctatggctgaaaatgtcaatgcaggaacttctgagcccgaaagcaaagctaccgacctaatggatgatgagaatgccttgttacagcaagcccttgcaatgtcgatggacgactcgtcctccaatgttgctacacgagacactgacatgtcagaagcagcttctgaagatcaagacttggcacttgctcttcaactgtctgtgcaagacagtacaaatgatcagtcaaatcagacagatatgagtaagctgttggcagatcaatcatttgtgtcatcaatccttgcctcacttccaggtgttgatccaaacgatccttccgttaaagatttgcttgcttccatgcaaggccagtctgagaagaaggatgaggacaatgataaggaacagaaagaggaaaagaagtaaagatgcgtacaactatttgcagctcaggcaaagaagttcagatggtaatcaagtatgctgctgctgaaactgctcattggaatgggtcttattatgtctgtgggaaagggatgtatctcattactcttgagggactaattgaatcgttctttaaaatatactgttataagattatggaactctcagttagattgatttgtggcttccagatgatttgtatttctctctcaaaaaatcatgttaaggacagatcctagcaaacaagatggtgtttaccttcaactacacatccttttcttttgtgaaaaattatgcgtcgccaaacatctatgaagtgacaattaatgtttcaaggtgtcaacacattttatttagccttttgttaacatcctttgttatctctgaaaatgaagatgcggattacttctcattgcctttattgatatactcgtgatctttta

SEQ ID NO: 1308 - DNA, 1478 bp, Helianthus annuus
gcaagcaagctttcgtcgtgagcaagaaaactcgcgattcatctctgttcttcctccaatttacaactctcttctaatccttgttccgatttacttcaatcatcaaccatggtgctcgaggcgacgatgatctgtattgataattctgaatggatgcgcaacggagattactcacccactaggttccaggctcaagctgacgctgttaatttgatttgtggcgctaaaactcagtctaatccagagaataccgtgggtgtgttaacaatggctggaaaaggtgttcgcgttttggtcactcctactagcgatcttggcaagatcctggcttgcatgcatggtctagaaataggcggtgagatgaacttggcagctggcattcaagttgcccagttggcacttaaacatcgccagaacaaaaagcagcaacaacggataattgtgtttgcaggaggtcctgtaaaatacgataagaaagtattggagatgatcggaaagaagttaaaaaagaacagtgtagctcttgacgttgtgaacttcggtgaagaagatgaagccaagaccgaaaagctcgaggctctcgttgctgctgtaaataataacgacagcagccacatcgttcatgttccagctggatctaatgcactctctgatgtccttttaagtactccgatctttactggtgatggagaaggcggaagtggttttgcagcggcggctgcagcagcggcagctggcggtgtatctggttttgattttggtgtcgatccgaatctggaccctgaacttgcacttgctcttcgcgtttcaatggaagaagagagagcacgccaagaagctgctgctaaaaaagctgcagatgattcttcaaagcaagagaaagaaggcgcgtctacctcacaagatgcaactatgtctgaaaatgttgccacctcagcttctgaatctgagaataaaaaagatgatttaatggatgatgagaatgcactgctgcagcaggcgcttgcgatgtcaatggatgatcctgctactaccgctaccgcaagggacactgatatgtcggaagcggctgctgatgatcaagatttggcacttgctctacaattatctgtgcaagaaggtgcgaaagatcaatcgggggagacagatatgggcaaacttttggcagatcagtctttcgtgtcatccgttcttgcttccctcccaggagttgacccgaatgacccttcggtcaaggatttacttgcttccatgcaaaatcagcctgagaagaaagatgaggacaaggaagaggacaagtgatcttatatgctctttaatcagtataatcccaggttacaagttttgctgcatttggtggagatctattggatgaactgtataatgggatagattacaatgtgttaaagagaatacttttaccatggatttgtttcgacttttggtgcttttttatgaacttagtcatgctatttgga

SEQ ID NO: 1309 - DNA, 1474 bp, Ambrosia trifida
aacggatctataataacatctttatctttcgtcgtgagcaagaaaaccctcaattcatccaaaacacacacacaactccgtaacccttcttcaatcatccatcatggtgctcgaggcaacgatgatctgtattgataattctgaatggatgcgcaacggcgattattcacccactaggtttcaggctcaagctgatgcagtcaatcttatttgtggcgctaaaactcagtctaatccagaaaatactgtgggtgtgttgacaatggctggaaaaggtgttcgtgttttggtcactcctaccagtgatcttggcaagatcctggcttgcatgcatggtctagaaataggcggtgagatgaacttggcagctgggattcaggttgctcagttggcacttaagcatcgccagaacaaaaagcaacagcagcggataatcgtgtttgcaggaggacctgtaaaatatgataagaaagtattggagatgattgggaagaagttaaaaaagaacagtgttgctcttgatgttgtgaactttggtgaagaagatgaagccaagacagaaaagcttgaggctctggttgctgctgtaaataacaatgacagtagtcacattgttcatgttccagccggatccaatgcactctctgatgtccttttaagtactcctatcttcactggtgatggcgaaggtggaagtggctttgctgcggcggctgcagcagcggcagctggcggtgtatctggttttgattttggtgtcgatccaaatctggaccctgaacttgcacttgctcttcgtgtttcaatggaagaagagagagcaaggcaagaagctgctgctaaaaaagctgcggatgattcttcaaagcaagataaagaaggggcttctagctctcaagatgcaactatgtctgaaaatgttgccacctcagcttctgaatctgagaataaaaaagatgatttaatggatgatgagaatgcactgctacagcaggcgcttgccatgtcaatggatgatcctgctactactactgttaacacgagggacactgatatgtcagaagcagctgctgatgaccaagatctagcgcttgctctacaattatctgtgcaagaaggtgcaaaagatcaatcaggggagacagatatgggcaaacttttggcagatcaatcattcgtgtcatccgttcttgcttctctcccgggagttgacccgaatgatccttcagtcaaagatttgcttgcttctatgcaaaatcagcctgagaagaaagatgaggacaaggaagaggacaagtgatcttatctgttctttaatcaatataatcccaggttacaagttttgctgcattggtggagatttgttggatgaactgtgtaatgggatagattaaaatgtgataaagaacctttacagtggatttgtttgacatttggtgcttgtttatgaacttttagtcatgctatttggatc

SEQ ID NO: 1310 - DNA, 1387 bp, Ambrosia trifida
tttcttcaatcatcaacatggtgcttgaggcgacgatgatctgtattgataattctgaatggatgcgcaacggcgattattcaccaactaggtttcaggctcaagctgatgcagttaatcttatctgtggcgctaaaacccagtctaatccagagaataccgtgggtgtattgacaatggctggaaaaggtgttcgtgttttggtcactcctactagtgatcttggcaagattctggcttgcatgcatggtctagaaataggcggtgagatgaacttggcagctgggattcaggttgctcagttggcacttaagcatcgccagaacaaaaagcaacagcagcggataatcgtgtttgcaggaggtcctgtaaagtatgataagaaagtattggagatgattgggaagaagttaaaaaagaacagtgtagctcttgatgttgtgaactttggtgaagaagatgaagctaagacagaaaagcttgaggctctggttgctgctgtaaataataatgacagcagtcacatcgttcatgttccagccggatctaatgcactctctgatgtccttttaagtactcctatcttcactggtgatggagaaggcggaagtggctttgctgcggcggctgcagcagcggcagctggcggtgtatctggttttgattttggtgtcgatccaaatctggaccctgaacttgcacttgctcttcgtgtttcaatggaagaagagagagcaaggcaagaagctgctgctaaaaaagctgcggatgattcttcaaagcaagataaagaaggggcttctagctctcaagatgcaactatgtctgaaaatgttgccacctcagcttctgaatctgagaataaaaaagatgatttaatggatgatgagaatgcactgctacagcaggcgcttgccatgtcaatggatgatcctgctactactactgttaacacgagggacactgatatgtcagaagcagctgctgatgaccaagatctagcgcttgctctacaattatctgtgcaagaaggtgcaaaagatcaatcaggggagacagatatgggcaaacttttggcagatcagtcattcgtgtcatctgttcttgcttctctcccaggagttgacccgaatgatccttcagtcaaagatttgcttgcttctatgcaaaatcagcctgagaagaaagatgaggacaaggaagaggacaagtgatcttatctgttctttaatcaatataatcccaggttacaagttttgctgcattgttggagatttgttggatgaactttgtaatgggatagattaaaatgtgataaaagaacctttacagtggatttgtttggcatttggtgcttgtttatgaacttttagtcatgctatttgga

SEQ ID NO: 1311 - DNA, 1514 bp, Ambrosia trifida
tttcgtcgtgagcaagaaaactctgaattcatcaaaacacacataactctctaatctttctttctttcttcaatcatcaaccatggtgctcgaggcgacgatgatctgtattgataattctgaatggatgcgcaacggcgattattcaccaactaggtttcaggctcaagctgatgcagttaatcttatttgtggcgctaaaacccagtctaatccagagaatactgtgggtgtattgacaatggctggaaaaggtgttcgtgttttggtcactcctactagtgatcttggcaagattttggcttgcatgcatggtctagaaataggcggtgagatgaacttggcagctgggattcaggttgctcagttggcacttaagcatcgccagaacaaaaagcaacagcagcggataatcgtgtttgcaggaggtcctgtaaagtatgataagaaagtattggagatgattgggaaaaagttaaaaaagaacagtgtagctcttgatgttgtgaactttggtgaagaagatgaagccaagacagaaaagcttgaggctcttgttgctgctgtaaataataatgacagtagtcacattgttcatgttccagccggatctaatgcactctctgatgttcttttaagtactcctatcttcactggtgatggagaaggcggaagtggctttgctgcggcggctgcagcagcggcagctggcggtgtatctggttttgattttggtgtcgatccaaatctggaccctgaacttgcacttgctcttcgtgtttcaatggaagaagagagagcaaggcaagaagctgctgctaaaaaagctgcggatgattcgacaaagcaagataaagaaggggcttctagctcacaagatgcaactatgtctgaaaatgttgccacctcagcttctgaatctgagaataaaaaagatgatctaatggatgatgagaatgcactgctacagcaggcgcttgccatgtcaatggatgaccctgctactactgttaacacgagggacactgatatgtcagaagccgctgctgatgatcaagatttggcacttgctctacagttatccgtgcaagaaggcgcaaaggatcaatccggggagactgatatgggcaaacttttggcagatcaatcgttcgtgtcatccgttcttgcttccctcccaggagttgacccaaatgacccttcagtcaaagatttgcttgcgtctatgcaaaatcagcctgagaagaaagatgaggaggacaaggaagaggacaagtgatcgaacttatctgttcttaaatcaatataatccaggttataagtttgctgcgtttggctgagagatatcttggatgaactgtataatgggataatagattacaatcacaatgtgtacaaaagagtaccttggatttgttgtcatttggtggctgtttatgtaacttttagtctaatgtcttattttggattaaattgaaagttattctcttagttcttaatttgtgttgtttggg

SEQ ID NO: 1312 - DNA, 1504 bp, Cirsium arvense
cgtatcaagagcaagcagctatcgtcgagagcaagaaaactctctcttcctccaaatataatcactcttccgattttgttcgatttctcattcaatctgcaaccatggtgctcgaggctacaatgatctgtatcgataattctgaatggatgcgcaacggagattactcaccaactaggtttcaggctcaggccgacgctgttaatctgatttgtggcgctaaaacccagtccaatccggaaaataccgtgggagtattgacaatggctggcaaaggtgtccgtgttctggtcactcctaccagcgatcttgggaagatcttggcttgcatgcatggtttagaaataggtggtgaaatgaacttggcagctgggatccaggttgctcagttggctttgaagcatcgccaaaacaaaaagcaacaacaaaggataattgtgtttgctggaggccccgtaaaatatgataagaaagtattggagatgattgggaagaagttaaaaaagaacagtgtagctcttgatgttgtgaactttggtgaagaggatgaagcaaaagcagaaaagcttgaggccctggtcgctgctgtaaataataatgacagcagtcacattgttcatgttccggctggatctaatgccctctctgacgttcttttgagtactcctatcttcactggcgatggggaaggtggaagcggttttgcagcagcagctgcagccgctgcagctggtggtgtatctggttttgattttggtgtagatccaaatctggatcctgagcttgcacttgctctccgtgtctcaatggaagaggagagagcgaggcaagaagctgctgcaaagaaggctgcagatgattcttcaaagcaagataaagaaggggagtctacttcacaagatgcaactatgtctgaaaatgttggcacttcagcttctgaatctgagaataaaaaggacgatttaatggatgatgagaatgcgctgctacagcaggctcttgccatgtcaatggatgatcctgctgctactgttacaacaagagacactgatatgtcagaggcagccactgatgatcaagacttggcacttgctctacaattgtctgtgcaagaaggtgcaaaagatcaatcaggtcaagcagagatggacaaactgttggcagatcagtcatttgtgtcatcaattcttgcttctcttccaggagttgaccctaatgacccttcggtcaaagatttgcttgcttcaatgcaaaatcaggctgagggtgagcagaagaaagatgaggacaaagcacccaaggaggatgacaagtgatattatcagtgtaatcccaggttacaaggtgtggtgcatttggtcttttgaatcaagtgtgatactggggggatggatttgtatgaaatttgttagaaagaatggaaggatggatgttgtggtgtttgtttatcaaactttaagctactatttacttggatgatcaaattcttcctctacccattatt

SEQ ID NO: 1313 - DNA, 1318 bp, Cyclamen graecum
aagccaaatttcatccagtagacgaactcgagaatctctctctgatcgtcttctccgttcaatcatggttctcgaggcgactatgatatgtgtcgacaattcggagtggatgcggaacggggattactctcctactcggtttcaagctcaagccgacgctgttaacctaatctgcggtgccaaaacccagtcgaatccagagaatactgttggagttttaactatggctggtaaaggggttcgtgttttggtcactcccaccagcgatcttggcaagatcttagcttgcatgcacggtctagaagttggtggtgagtgtaacttggcagctggaattcaagtggcacaattggctctgaaacataggcagaataaaaagcagcaacagaggattattgtatttgtggggagtcctgtgaaatatgacaagaaagtgctggaaatgattggacggaagctaaaaaagaacagtgttgctttggatattgttaatttcggtgaagaagatgaagggaaaactgaaaagcttgaggctcttcttgctgctgtaaacaataatgacagcagtcacattgttcatgttccttctggtccaagtgctctttccgatgttcttattagtacacctatattcactggtgatggggaaggtggaagtggttttgcagcatcagcggcggcggctgctgctggcggtgtttctggttttgattttggtgtggatccgaatctggatcctgagttggctcttgctctccgtgtttcgatggaagaagagagggctaggcaagaagcagctgccaaaaaggctgcggaggaagcttctaaacaaggtggagaatccacatcccaagacacaactatggctgagaatgttgttactgcagctcctgaatctgaaaataagacaaatgatccaatggatgatgaaaatgctttgctgcaacaggcccttgctatgtccatggatgatccgtctgctagtcaagccgtgcgagacattgatatgtcagaggcagttggagatgatcaagacttggctcttgctttgcaattgtccatgcaagaaggttcaaaagaagaagcagacctgacagacgtgagtaagctgttggaagatcagtcgtttgtctcgtcaatcctcgcctcacttccaggagttgacccaaatgatccttctgtcaaggatttgcttgcgtccatgcaaacgcagcctgagcctgagcagaaaaaggatgaagataaggcccccagtgaggaggagaagaaatgattccttcacaatgaatgaactccgaagcatgtgattccttacagg

SEQ ID NO: 1314 - DNA, 1550 bp, Solanum melongena
cagagagagacgaaacgatttctcagtttaatcttatattcatcagcttgttcgtcaatcattaaccatggtgctcgaggcgacaatgatctgcatcgacaattcggagtggatgcgtaacggtgattactctcccaataggttccaagctttagcagacgctgttaatctcatatgtggtgccaaaacacagtctaatcccgagaatacagttggaattttgaccatggctggtaaaggggttcgagtgttagtcactccgactagcgatcttggaaaaatcttagcttgtatgcacggtttggagataggcggtgagatgaatttggctgctggaatccaggtagcccagttagctttgaagcaccgacaaaataagaagcaacaacaaaggatcattgtttttgctggcagccctgttaaatatgacaagaaggtcttggagatgattgggagaaagttgaagaagaatagtgtggctcttgatgtggttaattttggtgaagatgatgaagggaaagctgagaagctagaggcactagttgctgcggttaataacaatgagagtagtcacatcattcatattcctcctggtcctaatgctctctctgatgtgcttattagtactcctatattcactggtgatggtgagggtggcagtggatttgctgctgccgctgcagcggctgctgctggtggagtgtctggatatgattttggtgtagatccaaatttggatccggaacttgctcttgcactacgagtttcgatggaggaagaaagggcgaggcaagaagcagccgcaaagaaggctgcagaagaagctggtaaccaagagaaaggagaaaatcagtctacatcccaggatgttgccatggctgaaaatgtcaatgcaggaacttctgaacctgaaagcaaagcaattgatctaatggaagatgagaatgccttgttacagcaagcccttgcaatgtcgatggatgactcatcctccaatgttgctacgcgagacactgacatgtcagaagctgcttctgaagatcaagacttggcacttgctcttcaactgtctgttcaagacagtacaaatgatcagtcaaatcagacagatatgagtaagctgttggcagatcaatcatttgtgtcatcaatccttgcctcacttccaggtgttgatccaaatgatccttccgtgaaagatttgcttgcttccatgcaaggccagtctgagaagaaagatgaggacaatgataaggaacagaaagaggacaagaagtaaagatgcatacaactatttgcaggtcaggcaaaaaagttcagagggtaatcaagtattgctgctgttgaaattgctcacgggaatgggtcttattatgtctggggaatgatgactgtatcttatttctctttgggactagttctttaaaatgtacttttatacgatattatgaaactcttcagttattgatttgtggcttaccgatgatttgtatctctctcaaacacgcaacggacagatccctagcaaacgagatggtgtttacctttaa

SEQ ID NO: 1315 - DNA, 1694 bp, Solanum tuberosum
cctcctttaagcagcaactccctccgcaagtaaactcaaattccttccaattttcagagagagacgaaacgatttctcagttcaatcttccaatcattggatttttcttcaatcgttaaccatggtgctcgaggcgacaatgatctgcatcgacaattcggagtggatgcgaaacggtgattactcgcccaataggttccaagctctagcagacgctgttaatctaatctgtggtgccaaaacccagtctaatcccgagaatacagttggaattttgacgatggctggtaaaggggttcgagtgttagtcactccgactagcgatcttggaaaaatcttagcttgtatgcacggattggagataggcggtgagatgaatttggctgctggaatccaggtagcccagttggcattgaagcaccgacaaaacaagaagcaacaacaaaggatcattgtttttgctggcagccctgttaaatatgacaagaaggtcttggagatgattgggagaaagttgaagaagaatagtgtagctcttgatgtggttaattttggtgaagatgatgaagggaaagctgagaagctagaggcactagttgctgcgcttaataccaatgacagtagtcacatcattcatattcctcctggtcctaatgctctctctgatgttctcataagtactcctattttcactggtgatggtgaaggtggcagtggatttgctgctgctgctgcagcggctgctgctggtggagtgtctggatatgattttggtgtagatcctaatttggatccggaacttgctctcgcactccgagtttcaatggaggaagaaagggcgaggcaggaagcagctgcaaaaaaggctgcagaagaagctggtaaccaagagaaaggagaaaatcagtctacttcccaggatgttgctatggctgaaaatgtcaatgcaggaacttctgagcccgaaagcaaagctaccgacctaatggatgatgagaatgccttgttacagcaagccctcgcaatgtcgatggacgactcgtcctccaatgttgctacacgagacactgacatgtcagaagcagcttctgaagatcaagacttggcacttgctcttcaactgtctgtgcaagacagtacaaatgatcagtcaaatgagacagatatgagtaagctgttggcagatcaatcatttgtgtcatcaatccttgcctcacttccaggtgttgatccaaacgatccttccgttaaagatttgcttgcttccatgcaaggccagtctgagaagaaggatgaggacaatgataaggaacagaaagaggaaaagaagtaaagatgcgtacaactatttgcagctcaggcaaagaagttcagatggtaatcaagtatgctgctgctgaaattgctcattggaatgggtcttattatgtctgtgggaaagggatgtatctcattactcttgagggactaattgaatcgttctttaaaatatactgttataagattatggaactctcagttagattgatttgtggcttccagatgatttgtatttttctctcaaaaaatcatgttaaggacagatcctagcaaacaagatggtgtttaccttcaactacacagccttttcttttgtgaaaaattatgcgtcgccaaacatctatgaagtgacaattaatgtttcaaggtgttac

SEQ ID NO: 1316 - DNA, 1566 bp, Artemisia annua
ccttaataaccaaacacaccctttcgtctcactcaagaaaacccaaattcatcatcatcatcattatccccaaacacacccaattccaataatcaataatcatcaacaatggttctcgaggcaacgatgatctgtattgataactcagaatggatgcgtaacggtgattattcgccaacaaggttccaagctcaagctgatgctgttaatctcatttgtggtgctaaaacacaatctaatccggagaataccgtgggtgtattgacaatggctaaggagttcgtgttttggttactcctactagtgatcttggaaagatcctggcttgtatgcatggtttagatataggcggtgagatgaacttggccgccggaatccaggttgctcagttggcgttgaagcatcgtcaaaacaaaaagcagcaacagaggattattgtgttcgctggaggtcctgtgaaatatgataagaaagtattggagatgattggaaagaagttaaaaaagaacagtgtcgctcttgatgttgtgaactttggggaagaggatgaagctaagacggaaaagcttgaggccctggttgctgctgtgaataataatgacagcagtcacattgttcatgtcccagctggttctaatgctctttctgacgttctattgagtactccaatctttaccggtgatggagagggtggaagtggttttgcagcagctgctgcagcggccgcagctggcggtgtatctggttttgattttggtgttgatcccaatttggaccctgaacttgcacttgctcttcgtgtttctatggaagaggagagggcgagacaagaagccgccgcgaaaaaggctgcagatgattcttcgaagcaagagaaagaaggggagtctacttcacaagatgcaaccatgtctgaaaatgttgggacttctgaatctgagaataaaaaagatgatttaatggatgatgagaacgctctgctacagcaggctcttgccatgtcaatggatgatcctgctgctactgttacaacaagggacgttgatatgtccgaggcagccactgatgatcaagacttggcacttgccctacaattgtctgtgcaagaaggtgcaaaagatcaatcaggccaggcggacatgggcaagctgttggcagatcagtcatttgtatcatcaatccttgcttcactcccaggagttgatcctaacgacccgtcagtcaaagatttgcttgcttcaatgcaaaatcagtctgagtcttctgagcaaaagaaagacgaggacaaaaaggaagacgacaagtgatcctgtatgctcctctataagtataatcccaggttacaacttatgctgcatttggtggagatttcttcgatgaactgtataatgggatagattgcaatgcgttgaatgtacggactattgttcttgtcaccatggatcagtttctcagttgatgcttgttatatgaactttattttagctgttctcatgtatgttttttacaatgctgaacttttttttccctatcattataaaggatgccgtaatcgtttaatcaatg

SEQ ID NO: 1317 - DNA, 1451 bp, Tabernaemontana elegans
tcgctaaccatggttctagaggcgacaatgatctgcatcgacaactcggagtggatgcggaatggggattactctccttctcggtttcaggctcaagccgatgcagttaatctcatatgtggtgccaaaacccagtctaatccggagaatactgttggagttttgacaatggcgggcaagggggttcgcgttttggtgactcctaccagtgatcttggcaagatcttagcttgcatgcacggcctagaaataggtggcgaaatgaacttggcagcaggtatccaagtggcacagttggctctcaagcatcgccagaataagaagcagcaacaaaggattattgtatttgctggaagtcctgttaaatatgacaagaaggtattggagatgattggaaagaaattgaaaaagaacagtgttgctcttgatgttgtgaactttggtgaagaagatgaggggaaaactgagaaacttgaggcactagttactgcagttaacaacaacgacagcagccatattgtccatgttccttcaggcccaaatgctctttctgatgtgctgataagtactcctatctttaccggtgatggagaaggtggaagtgggtttgcagcagcagcagcagcagctgcagctggtggagtatctggttttgaatttggtgtggatcctaatctggatcctgaacttgctcttgctcttcgagtttcaatggaagaggagagggcgaggcaagaagctgctgcaagggctgcagaagaagcttcacgacaagaacaaggagaacaacagtccacttcgcaagacgtaaccatgactgagaatgtccaagctggaacttctgaagctgaaaacaggacaactgacttaatggatgatgacaatgccttgctacagcaggcacttgcaatgtcaatggatgattcttctgcaaatgttactgcacgagacactgacatgccagaggcagctgccgatgatcatgaattgcaacttgctcttcaattgtctgttcaggacagtcatgattcatcaaaccattcagaccaggcagatgttagcaagttgttgggtgaccagtcatttgtgtcgtccatccttgcttcgcttccaggagttgatccaaatgatgcatcggttagagatttgcttgcatccatgcaaaatcagtctgagcaaaagaaggacgaggaggatgaggacaagacaccgaaagaagatgacaagaaagaatgatgcagaagcttctattgcgattggacatgttcctggtttcaatctcaaagtgcaatttgaagatgtgcttttgaaaaaggaaaacatacttggacagttatcctagatttgcactgacctaatgctcattcttgaaacgtgtttgtattgttattttaatatctatgggacatgagatcagcttgttcatgattccctttcttacgatcatctac

SEQ ID NO: 1318 - DNA, 1407 bp, Centaurea maculosa
aatcactcttccgattttactcgatttcttcttcaatctgcagccatggtgctcgaggctacaatgatctgtatcgataattctgaatggatgcgaaacggcgattactctcctactaggtttcaggctcaggccgatgctgttaatctgatttgtggtgctaaaacccagtctaatccggaaaataccgtgggggtattgacaatggctggcaaaggagtccgtgttctggtcactcctactagcgatcttgggaagatcttggcttgcatgcatggtttagaaataggtggtgaaatgaacttggcagccgggatccaggttgctcagttggctttgaagcatcgccaaaacaagaagcagcagcaaaggataattgtgtttgctggaggtcctgtaaaatacgataagaaggtattggagatgattgggaagaagctaaaaaagaacagtgtagctcttgacgttgtgaactttggtgaagaggatgaagcaaaggcagaaaaactcgaggccctggtcgctgctgtaaataataatgacagcagtcacattgttcatgttccagctggatctaatgccctctctgatgttcttttgagtactcctatcttcactggtgatggagaaggtggaagcggttttgcagcagctgctgcagccgctgcagctggcggtgtatctggttttgatttcggtgtggatccaaatctggatcctgagcttgcacttgctcttcgtgtgtcgatggaagaggagagagcgaggcaagaggctgctgcaaagaaggctgcagatgattcttcgaagcaagataaagaaggggagtctacttcacaagatgcaactatgtctgaaaatgttggcacttcagcttctgaatctgagaataaaaaagatgacttaatggatgatgagaatgcactgctacagcaggctcttgccatgtcaatggatgatcctgctgctactgttactacaagagacactgatatgtcagaggcagccactgatgatcaagacttggcactcgctctacaattgtctgtgcaagaaggttcaaaagatcaatcaggccaagcagagatggacaaactgttggcagatcaatcatttgtgtcatcaattcttgcttcactcccaggagttgaccccaatgacccttcggtcaaagatttgcttgcttcaatgcaaaatcagcctagtgagggtgatcagaagaaagatgaggataaagcacccaaggaggatgacaagtgatgttcttttaatcccatatcccaggtgtggtgttgaatcaatggattgctcattgcgggaatgtatgaaatttgttagtttatgatgcaatggatggttgttctggtgttgtttaagcctttagtacttggatgatcaaatgcttct

SEQ ID NO: 1319 - DNA, 1571 bp, Centaurea maculosa
tcttcttcctccaatccaaatttaatcaatcaatcactcttccgattttactcgatttcttcttcaatctgcaaccatggtgctcgaggctacaatgatctgcatcgataattctgaatggatgcgcaacggcgattactctcccactaggtttcaggctcaggccgatgctgttaatctgatttgtggtgctaaaacccagtccaatccggaaaataccgtaggggtattgacaatggctggcaaaggagtccgtgttctggttactcctactagcgatcttgggaagatattggcttgcatgcatggtttagaaataggtggtgaaatgaacttggcagctgggatccaggttgctcagttggctttgaagcatcgccaaaacaagaagcagcaacaaaggataattgtgtttgctggaggtcctgtaaaatacgataagaaagtattggagatgattggaaagaagctaaaaaagaacagtgtagctcttgacgttgtgaactttggtgaagaggatgaagcaaaggcagaaaaactcgaggccctggttgctgctgtaaataataatgacagcagtcacattgttcatgttccagctggatctaatgctctatctgatgtccttttgagtactcctatcttcactggcgatggagaaggcggaagtggttttgcagcagctgctgcagccgctgcagctggtggtgtatctggttttgatttcggtgtggatccaaatttggatcccgagcttgcacttgctcttcgtgtgtcaatggaagaggagagagcgaggcaagaagctgctgcaaagaaggctgcagatgattcttcaaagcaagataaagaaggggagtcaacttcacaagatgcaactatgtctgaaaatgttggcacttcagcttctgaatctgagaataaaaaggatgacttaatggatgatgagaatgcactgctacagcaggctcttgccatgtcaatggatgatcctgctgctactgttactacaagagacactgatatgtcagaggcagccactgatgatcaagacttggcactcgctctacaattgtctgtgcaagaaggttctaaagatcaatcaggccaagcagagatggacaaactgttggcagatcaatcatttgtgtcatcaattcttgcttcactcccaggagttgaccccaatgacccttcggtcaaagatttgcttgcttcaatgcaaaatcagcctagtgagggtgatcagaagaaagatgaggataaagcacccaaggaggatgacaagtgatgttctattaatcccatcccaggcgtggtgttgaatcaatggattgcattgcaggaatgtatgaaatttgttagtttatgatgcaatggatggttgttttggtgttgtttaagcctttagtacttggatgatcaaatgcttcttctacttgctattattcgtcttaaaatcgtcagcaacttttttcttgctactaatgggtttcaactttcaactatactgttactattattaatatttgctgaaagatgcaagcatgcaaaagggctttttcatgcaa

SEQ ID NO: 1320 - DNA, 1494 bp, Centaurea maculosa
aatcactcttccgtattttactcgattttcttcttcaatctgcagccatggttctcgaggctacaatgatctgtatcgataattctgaatggatgcgaaacggcgattactctcccactaggtttcaggctcaggccgatgctgttaatctgatttgtggtgctaaaacccagtcgaatccggaaaataccgttggggtattgacgatggctggcaaaggagtccgtgttctggttactcctactagcgatcttgggaagatattggcttgcatgcatggtttagaaataggtggtgaaatgaacttggcagctgggatccaggttgctcagttggctttgaagcatcgccaaaacaagaagcagcaacaaaggataattgtgtttgctggaggccctgtaaaatacgataagaaagtattggagatgattgggaagaagctaaaaaagaacagtgtagctcttgatgttgtgaactttggtgaagaggatgaagcaaaggctgaaaaactcgaggccctggtcgctgctgtaaataataatgacagcagtcacattgttcatgttccagctggatctaatgctctatctgatgtccttttgagtactcctatcttcactggcgatggagaaggcggaagtggttttgctgcagctgctgcagccgctgcagctggtggtgtatctggttttgatttcggtgtggatccaaatttggatcccgagcttgcacttgctctccgtgtgtcaatggaagaggagagagcgaggcaagaagctgctgcaaagaaggctgcagatgattcttcaaagcaagataaagaaggggagtcaacttcacaagatgcaactatgtctgaaaatgttggcacttcagcttctgaatctgagaataaaaaggatgacttaatggatgatgagaatgcactgctacagcaggctcttgccatgtcaatggatgatcctgctgctactgttactacaagagacactgatatgtcagaggcagccactgatgatcaagacttggcactcgctctacaattgtctgtgcaagaaggttctaaagatcaatcaggccaagcagagatggacaaactgttggcagatcaatcatttgtgtcatcaattcttgcttcactcccaggggttgaccccaatgacccttcggtcaaagatttgcttgcttcaatgcaaaatcagcctagtgagggtgatcagaagaaagatgaggataaaacacccaaggaggatgacaagtgatgttctattaatcccatcccaggcgtggtgttgaatcaatggattgcattgcaagaatgtatgaaatttgttagtttatgatgcaatggatggttgttttggtgttgtttaagcctttgtacttggatgatcaaatgcttcttcctctacctactattattcgtcttaaaatggtcagcaacttttttcttgctactaatgggtttcaacttttcaactatgctgttattat

SEQ ID NO: 1321 - DNA, 1599 bp, Cirsium arvense
atcgtcgagagcaagaaaactcccagattcctctctcttcttcctccaatccaaatttaatcaatcaaatcactcttcagattttactcgatttcttcttcaatctgcaaccatggtgctcgaggctacaatgatctgcatcgataattctgaatggatgcgcaacggcgattactctcccactaggtttcaggctcaggccgacgctgttaatctcatttgtggcgctaaaacccagtccaatccggaaaataccgtgggggtattgacaatggctggcaaaggagtccgtgttctggtcactcctactagcgatcttgggaagatattggcttgcatgcatggtttagaaataggtggtgaaatgaacttggcagctgggatccaggttgctcagttggctttgaagcatcgccaaaacaagaagcagcaacaaaggataattgtgtttgctggaggtcctgtaaaatacgataagaaagtattggagatgattgggaagaagctaaaaaagaacagtgtagctcttgacgttgtgaactttggtgaagaggatgaagcaaaggcagaaaaactcgaggccctggttgctgctgtaaataataatgacagcagtcacattgttcatgttccagctggatctaatgctctatctgatgtccttttgagtactcctatcttcactggcgatggagaaggcggaagtggttttgcagcagctgctgcagccgctgcagctggtggtgtatctggttttgatttcggtgtggatccaaatttggatcccgagcttgcacttgctcttcgtgtgtcaatggaagaggagagagcgaggcaagaagctgctgcaaagaaggctgcagatgattcttcaaagcaagataaagaaggggagtcaacttcacaagatgcaactatgtctgaaaatgttggcacttcagcttctgaatctgagaataaaaaggatgacttaatggatgatgagaatgcactgctacagcaggctcttgccatgtcaatggatgatcctgctgctactgttactacaagagacactgatatgtcagaggcagccactgatgatcaagacttggcactcgctctacaattgtctgtgcaagaaggttctaaagatcaatcaggccaagcagagatggacaaactgttggcagatcaatcatttgtgtcatcaattcttgcttcactcccaggcgttgaccccaatgacccttcggtcaaagatttgcttgcttcaatgcaaaatcagcctagtgagggtgatcagaagaaagatgaggataaagcacccaaggaggatgacaagtgatgttctattaatcccatcccaggtgtggtgttgaatcaatggattgcattgcaggaatgtatgaaatttgttagtttatgatgcaatggatggttgttttggtgttgtttaagcctttagtacttggatgatcaaatgcttcttctacttgctattatttgtcttaaaatggtcagcaacttttttacttgctactaatgggtttcaactatcaacttatgctgttactattattaatatttgctgaaagatgcaagcatgcaaaaggcttt

SEQ ID NO: 1322 - DNA, 1532 bp, Trifolium pratense
agtgtttctcaatctctcttgcttccgaatctctcgcttctgaatttcttcaactttccaacaatggtgctcgaggcgactatgatctgtgttgataattctgaatggatgcgtaacggtgattactctccttctcgatttcaagcccaatcagacgctgtaagtttgatttgcggtgctaaaactcagtctaatccggaaaatacggttggagttctcactatggcggggaagggtgttcgggttttggctacccctaccagtgatttgggcaaaatcttagcttgtatgcatggtctagaaataggtggtgagatgaaccttgctgctggcattcaggtcgcacagttggctcttaagcatcggcagaataagaagcagcatcaaaggattattgtcttttctggaagtcctatcaagcatgaaaagaaaatgttggagatgattgggaaaaagttgaaaaagaatagtgttgcacttgacattgtcaatttcggtgaagaagacgaggggaagacagagaagctggaagcactccttgcagccgtaaacaataatgatagtagccacatggttcatgttccacctggtccaaatgctctttcagatgtacttataagtacacctatatttactggtgacggagaaggtggaagtggttttgcagctgctgctgcagcagcatctgcaggcggtgtatctggatatgattttggtgtggatccaaacttggaccctgaattggctcttgctctaagagtttcaatggaagaggagagagccaggcaggaagcagctgcgaaaaaggctgcagaggatgcttccaaacaggagaaaggtggtgagcagcaagctatttcccaggatgcaactatgactgagcgaaccagtacagaagctgagacaaatgatatgatggatgatgagaatgctctgctacaacaggcccttgcaatgtcaatggatgatgctgtagttaaccatgatgtaagagacgcagatatgtctgaagctgctacagatgatgttgacttggctcgagctctccaattgtcccaaacccccgcaagccttgctgcggacccagtggggaaattgttggcggatcagtcctttgtatcttctgtccttgcatcgcttcctggggttgacccaaatgacccatctgtcaaggatttattggcttccatgcaaaatcagtctgagtctcacaagaagaatgaagaggaccgaccaaatgaggagtcagattgagtcattttgaagttcttatttctgttcctttgacaaagatatattggtaatggtaacattttgaaaggtggttctagtcgagatattacttcacttgtactgcaattatgaatttctccagcttattggatcagatctatgtctcttgattaggttagaagcctgctgtcaatgagggcattaagcgagaacatgcatatacattgttttatggtgaagaatattccattgatatgttagtcaatgtcattacaaaagtatatgaatccatttgtttt

SEQ ID NO: 1323 - DNA, 1805 bp, Mesembryanthemum crystallinum
ctcgtgccgactcgtgccgaattcggcacgagctcgtgccgctcgtgccgctttaaatccttgcccccctacacaagtaaaacacccagttgctcgctctcgaagccccttcttctctactaacatcaatctccgatctctttgattttctctctccaaatctcaaccatggtgctcgaggcgactatgatctgcatcgataattcggagtggatgcgtaatggcgactacaccgccaatcgatttcaagctcaagcagatgctgtcaatcttatttgcggcgctaagactcagtctaatccggaaaacacagtaggaattctgacaatggctggtaaaggcgttcgtgttcttgtcactcccaccagtgacctcgggaaaatcttggcttgcatgcacggcttggatatgggtggtgaaatgaacttggctgccggaatccaaattgcacagttggctcttaaacatcgtcaaaacaaaaaacaacaacaaagaattatagtatttgctggaagtcctgttaaatatgacaaaaaggtgttggagacgattggccgcaagttgaaaaagaacagtgtggcacttgatgttgttgatttcggtgaagatgaggatggaaagtcagagaaacttgaggccctagttgctgctgtaaataacaatgacaccagccacatcgtgcatgtgcctgcgggtcccaatgcactttctgacgttctgataagtactcccatatttactggagatggggaaggaggaagtggttttgctgcagctgcagctgcagccgcagctggtggtgtttctggatttgattttggggtggatccaaaccttgatcctgagctggctcttgcccttagagtttcgatggaagaagagagggcaagacaagaggcagctgcaaagagggctgcagaagaagccggtagacaggaaaaaggaggggaacaacaatctagctcccaagatgctactatgggagagagtagtagtgctgcaaatcccgaagctgagaagaaaaatgacttgacggatgatgagaatgccctgttgcaacaagcacttgcaatgtcaatggatgagcctgcctctactactaccgtgagggatacagatatggcagatgcaacaggcgacgaccaggacttacaacttgcacttcaactctctgttcaagatagcgccaaagaatcaacaagtcagtcaaatcctgaagaagtgggcaaattgttggcagaccagtcttttgtttcttcaatacttgcttcgcttccaggagttgacccaaatgatccttcggtaaaggacttattggcttccatgcaaaatcagtctgagaagaaggatgaggataagccaccaagtgaggaggagaagaaatgatgcatctctttttccagttcagggaaggaaaaatcttggatgtggtctttgtattaatctgaggcatggagagtcaaatctgtctcatcgactttgaacccatagccctgcgggcagccagatgatgaccggtactgagattttagacaaaattgtattgtttcaatgtttatgtattgtcaatggaattagggtcacaggatcaattctcatcaaaattctgatttctgagacttctgtggctgctcgtgctggttggttttatttctatttcgctgatttatctggccccaaattcatgcgactgtgttaatgaaaaaattagaactttgctccagagcatttgactgtgaagggactgctccataattggtattgtttgtttaagcagatttaacattcgaaaaggtgccatttcc

SEQ ID NO: 1324 - DNA, 1592 bp, Olea europaea
agcaagtaaacccaaatgcccttttgaagaaacgcataaaaggagacgattctgtgatccaatctctcgacgtttgtgagtttctttaattaaacccggttaatcatggtgctcgaggcgacaatgatctgcatcgataattctgagtggatgaggaacggcgattactccccgaatcgatttcaggctcaagctgacgctgttagtctcatctgtggcgcaaaaacccagtcaaatccagagaatacagtgggggtattaacaatggcaggaaaaggggttcgcgtattggtaacaccgaccagcgatcttggaaagatcctaggttgcatgcacggtctagaaataggtggtgagatgaacttggctgcagggatccaggtggcccagctggctctcaagcatcgccaaaacaaaaagcaacaacaaaggattatcgtatttgctgggggtcctgtgaaatatgacaagaaggtgttggagatgattggaaggaaattgaaaaagaacagtgtcgcacttgatgttgttaattttggcgaggaagatgagggcaagactgagaagcttgaggctctggttgctgctgtgaataataatgaaagcagtcatgttgtgcatgttcctcctggtccaagtgctctttctgatgtgctcatcagtacacctatctttactggtgatggagaggggggaagtggttttgcagctgctgcagcagcggccagtggagtatctggttttgaatttggcgttgatccaaacctagatcctgaacttgctctcgcacttagagtttcaatggaagaggagagggcaaggcaagaagcagctgcaaagaaggctgcagaagaagctgcaaagcaggaaagtggagaacattctgcgtcacaggatgctaccatatctgaaaatgtgaacactgcaactactgagcctgaaaacaagacaaaagacctaatggatgatgaaaatgcattgttacagcaggctcttgcaatgtctatggatgattcttcctctgctgttgctacgcgggatactgaaatggcagatgctgctaccgatgatcacgatttgcagcttgcccttcaaatgtccgtgcaggagggtacgaaagaccaatcaaaccagacagatatgaataagctgctagcagaccagtcttttgtgtcctctatcctggcttcgcttccaggagttgatccaaatgatccctctgtcaaagatatgcttgcttccatgcaaagtcagtctgagccccagcagaataaggatgaagataaagcaccgaaagaagaggaaaagaagtgatgatgcctcagttaatatccactgtcaggttatgcagtcccttgctgagtttttcctgcagtttgagttgcaggatgggaataattgttgtcaaagtggattgtaacatgaatgatggaaaattctgttatttctgcatgatttatctcttattactatattagttgttcaattttccgtcttttcaaatggattacaatggattgtgcaaatggtgtatgctattgaactacatctgaaggattacttatcttcatcatgtttttgttgcgtgcaac

SEQ ID NO: 1325 - DNA, 1541 bp, Arnica chamissonis
agcaagctatcgtcgtgagcaagaaaactcacatctcttcctccaaaatacaactctgtgatcgttcttccgatttacttcattccttcttcaatcattcatcatggttctcgaggctacgatgatctgtattgataattctgaatggatgcgcaacggcgattactcacccactaggtttcaggctcaagccgacgcagttaatctgatttgtggtgctaaaactcagtctaatccagagaatactgtcggtgtattgacaatggctggaaaaggtgttcgtgttttggtcactcctactagcgatcttggcaagatattggcctgcatgcatggtttagaaataggtggcgagatgaacttggcagctgggattcaggttgcccagttggcactgaagcatcgccaaaacaaaaagcagcaacaacggataatcgtgtttgcaggaggtcctgtaaaatatgataagaaagtattggagatgattgggaagaagttaaaaaagaacagtgtagctcttgatgttgtgaactttggtgaagaagatgaagagaagacagaaaagcttgaggctctggttgctgctgtaaataataatgacagcagtcacattgttcatgttccagctggatctaatgcactctctgatgtccttttgagtactcctatctttactggtgatggagaaggtggaagtggttttgccgcggcggctgctgctgcagcggctggcggtgtatctggttttgattttggtgttgatccaaatctggatcctgaacttgcgcttgctcttcgtgtttcaatggaagaagagagagcaaggcaagaagctgctgctaaaaaagctgcagatgattcttcaaagcaagagaaagaaggggagtctacctcacaagatgcaactatgtctgaaaatgctgccacctcagcttctgaatctgaaaataaaaaagacgatctaatggatgatgagaatgcgctgctacagcaggctcttgcgatgtcaatggatgatcctgctgctactgttaccacgagggacgctgatatgtcagaagcagctgctgatgatcaagatttggcacttgctctacaactgtctgtgcaagaaggtgcaaaagatcaatcaggggagacagatatgggcaaacttttggcggatcaatcatttatgtcatcagttcttgcttccctcccaggagttgatcctaatgacccttcagtcaaagatttgcttgcttctatgcaaaatcagcctgagaagaaagacgaggacaaagcacccaaggatgaggacaagtgacctcatctgttctttaatcagtaattataatcccaggttacaagttttgcagcatttggtgaagatttattggatgaactgtattatgggatatagattacaacgtgttaaaaagagtgtactaagtgctatttttaccttggatttgtttgacttttggtgcttgtttatgaactttaatcatgctactcgagtactcggataatcagtttatttctttagtttttttaatggc

SEQ ID NO: 1326 - DNA, 1801 bp, Solanum lycopersicum
ccgctacgcgaactatcctgtatcttcttcggattgtgatttttcctccttaaagcaccaactccctccgcaagtaaactcaaattccttccaatttattttcagagagagacgaaaagatttctcagtttaatcttccaattattggatttttcttcaatcgttaaccatggtgctcgaggcgacaatgatctgcatcgacaattcggagtggatgagaaacggtgattactcgcccaataggttccaagctctagcagacgctgttaatctaatctgtggtgccaaaacccagtctaatcccgagaatacagttggaattttgacgatggctggtaaaggggttcgagtgttagtcactccgactagcgatcttggaaaaattttagcttgtatgcacggattggagataggcggtgagatgaatttggctgctggaatccaggtagcccagttggctttgaagcaccgacaaaacaagaagcaacaacaaaggattattgtttttgctggcagccctgttaaatatgacaagaaggtcttggagatgattgggagaaagttgaagaagaatagtgtagctcttgatgtggttaattttggtgaagatgatgaagggaaagctgagaagctagaggcactagttgctgcgcttaataccaacgacagtagtcacatcattcatattcctcctggtcctaatgctctctctgatgttctcataagtactcctattttcactggtgatggagaaggtggcagtggatttgctgctgctgctgcagcggctgctgctggtggagtgtctggatatgattttggtgtagatcctaatttggatccagaacttgctctcgcactccgagtttcaatggaggaagaaagggcgaggcaggaagcagctgcaaagaaggctgcagaagaagctggtaaccaagagaaaggagaaaatcagtctacttctcaggatgttgctatggctgaaaatgtcaatgcaggaacttctgagcctgaaagcaaagcaaccgacctaatggatgatgagaatgccttgttacagcaagcccttgcaatgtcgatggacgactcgtcttccaatgttgctacacgagacactgacatgtcagaagcggcttctgaagatcaagacttggcacttgctcttcaactgtctgtgcaagacagtacaaatgatcagtcaaatccgacagatatgagtaagctgttggcagatcaatcatttgtgtcatcaatccttgcctcacttccaggtgttgatccaaacgatccttctgtcaaagatttgcttgcttccatgcaagggcagtccgagaagaaggatgaggacaatgataaggaacagaaagaggacaagaagtaaagatgcgtacaactatttgcagctcaggtagagaagttcagatggtaatcaagtatgctgctgctgctgaaattgctcattggaatgggtcttattatgtctgtggggtagggctgtatctcattactcttgagggactaattgaatcgtctttaaagtactattataagattatggaactttcagttagattcatttgtggtggcttccagatgatttgtatttctctctcaaaaaatcacgttaaggacagatcctagcaagaaacaagatggtgtttaccttcagctacccagcgttttcttttgtgaaaaattatgcgtccccaaaaaatctatgaagtgacaattaatgtttcagtgtcaaaaacatttaattttagcctcttattaacatcctttgtgatcactgaaaatgcag

SEQ ID NO: 1327 - DNA, 1522 bp, Vinca minor
ttcattactaaccctcccaagaagatcacaccaagttatcggatttctctctctcaattccttgccctactgtattcttcttcaattgataatcatggttcttgaggcaacaatgatctgcatcgataactcggagtggatgcggaacggagattattctccttctagatttcaggctcaagccgatgctgttaatctcatctgtggtgccaaaacccagtctaatccagagaatactgtgggagttttgacaatggcgggcaagggtgttcgcgttctagtaactcctaccagtgatcttggcaagatcttagcctgcatgcacggcctagaaattggcggcgagatgaacttggcagcagggatccaagtagcacagttagctctcaagcatcgccagaacaagaagcagcaacagaggattatagtatttgcgggaagtcctgttaagtatgacaagaaggtattagagatgattggaaagaaattgaaaaagaacagtgttgctcttgatgttgtgaattttggtgaagaagatgagggaaaaactgagaagcttgaggcactagtcgctgcagttaacaacaacgatagcagtcatattgttcacgttcccccgggtccaactgctctttccgatgtgttgatcagtactcctatctttactggtgatggagaaggtggaagtggatttgcagcatccgctgctgcagctgcagctggtggagtatcgggttttgattttggtgtggatcctaacctggaccccgaacttgctctggctcttcgtgtttcaatggaagaagagagggcaaggcaagaagcagctgcaagggctacagaagaagcttcaagaaaagaacaaggagaacagcaatcaacttcacaagatgtaacaatggctgagaatgtcaaagctggaagttctgaagctgaaaataggacagctgacctaatggatgacgacaatgccttgttacatcaggcacttgctatgtccatggatgattctacatcgaatgttactgcacgagacactgacatgccggaggcagctgccgatgatcatgaattacaacttgcccttcaattgtctgtacaagagagccaggactcgtcaaaacagtcagaccaggcagacgtgagcaagttgttgggtgaccagtcatttgtgtcgtccatacttgcttcgcttccaggagttgatccaaatgatccatcagttaaagatttgcttgcatccatgcaaaatcaatctgagcagaagaaggaagaggacaaggcaccaaaagaaggtgacaagaaggaatgatgcacaagtttctactgcgatcttgacccgtttctctttttcaacctggaagtgcatttgaagatgtgcttctgaaaatgaaaccatatattggatttagttattttattaaatctgcatactgctctgatgctcattcttgaaaatgtgtttgtattgacattttaatttctgtggaacatgagatgagcttttctctttcagttttat

SEQ ID NO: 1328 - DNA, 1558 bp, Trifolium pratense
tttctcaccttattcgaaatctcgcttcagaacttgttcaactttccaacaatggtgctcgaggcgactatgatctgtattgacaattctgaatggatgcgtaacggtgattacactccttctcgatttcaagcccaatcagacgctgtaagtctgatttgcggtgctaaaactcagtctaatccggaaaatacggttggagttctcaccatggcggggaagggtgttcgagttttggctactcctaccagtgatttgggcaaaatcttagcttgtatgcatggtctagaaataggcggtgagatgaaccttgctgctggcattcaggtggcacagttggctcttaagcatcggcagaataagaagcaacaacaaaggattattgttttttctggaagtcctatcaatcatgaaaagaaaatgttggagatgattgggagaaagttgaaaaagaatagtgttgcacttgacattgtcaacttcggtgaagaagacgaggggaagacagagaagctggaagcactccttgcagccgtaaacaataatgatagtagccacatggttcaagttccacctggtccaaatgctctttcggatgtacttataagtacacctatatttactggtgacggagaaggtggaagtggttttgcagctgctgctgcagcagcagcatctgcagggggtgtgtctgggtatgattttggtgtggatccaaacttggaccctgaattggctcttgctctacgagtttcaatggaagaggagagagcaaggcaggaagcagctgcgaaaaaggctgcagaggatgcttccaaacaggagaaaggtggtgatcagcaagctatttcccaggatgcaacgatgactgagcgaaccagtacagaagctgagacaaatgatatgatggacgatgagaatgctctactacagcaggcccttgcaatgtcaatggatgatgctgtagttaaccatgatgtaagagatgcagatatgtctgaagctgctacagatgatgttgacttggctcgagctctccaattgtcacaaacccccgcaagcctcgccgcggacccagtggggagattgttggcagatcagtcctttgtatcttctgtccttgcatcgcttcctggggttgacccaaatgacccatctgtcaaggatttactggcttccatgcaaaatcagtctgagtctcacaagaagaatgaagaggagcggccaaatgaggagtcagattaagtcattttgcagttcttatttctgttcctttgacagagatatattggtaatggtaacattttgaaaggtggttctagtcgggacattacttcacatgtactgcagttatgaatttctccagcttattggatcagatctatgtctcttgattaggttagaagcctgctgtcaatgagggaactaagctgagaacatgcatatacattgttttatggtgaagaatattccattgatgttagtcaatgtcattacaaaagtatatgaatccatttatttttatttcttgaagttttagtttacaagcagaggtgct

SEQ ID NO: 1329 - DNA, 1497 bp, Helianthus annuus
atcaataccaaacagttatcgtcgtgagcaagaaaaccctccattcatcttcaaaactctgtaatcgctcgtacgattcacacccgttcttctttaatcttcaacaatggtgctcgaggctaccatgatctgcatcgacaattcagaatggatgcgaaacggtgattattcacctactaggtttcaggctcaagccgacgctgttaatctgatttgtggcgctaaaactcagtctaatccggagaatactgtgggcgtattgacaatggccggcaaaggtgttcgtgttcttgtcactcctactagcgatcttggcaagatcctagcttgcatgcatggtttagaaataggcggtgagatgaacttggcagctgggattcaagttgctcagttggcattgaagcatcgtcaaaacaaaaagcagcaacagagaataattgtgtttgctggaggtcctgtaaaatatgataagaaagtattggagatgatcgggaagaagttaaaaaagaacagtgtcgctcttgacgttgtgaactttggtgaagaagatgaatcgaagacagaaaagctcgaggctcttgttgcggctgtaaacaataacgacagcagtcacattgttcatgttccagctggagcaaatgcactctctgacgtccttttgagtactcctatctttactggtgatggagaaggtggaagtggttttgcagcggcggctgcagcggctgcagctggcggtgtatccggttttgattttggtgttgacccgaatctggatcctgaacttgcacttgcgcttcgggtttcaatggaggaagagagagcgaggcaagaagcggctgcgaaaaaggctgcggacgattcttcaaagcaagggaaagaaggggagtcgacttcacaagatgcaactatgttggaaaatgtcgggacttcggtttctgaatctgagaataaaaaagatgatttgatggatgacgagaatgcgctgctacagcaggctcttgccatgtcaatggatgacccttctgccaccgttacaacaagggacactgatatgtcagaggcggctgccgatgatcaagacttggctctcgctctacaatattctatgcaagaaggtgcaaaagatcaatcggatatgggcaaactgttggcagatcaatcattcgtgtcatcaattcttacttccctccctggagttgacccgaatgatccatcggtcaaagatttgcttgcgtctatgcaaaatcagcctgagaagaaagatgatgatgagaaagcgccgaaagaagatgacaagtgatctatcttttctttaatcagtataatcccgggtgactgcatttggtggaggataatgggatagattacaatgtatgaaatactattcctgttaccatggatttgttttacttttggtgtttgtttaattatgctacttggaaagtcaaattctcgtttgtatgttttaaactgcctcccctcgtttaattcaaa

SEQ ID NO: 1330 - DNA, 1710 bp, Panax ginseng
aaaacatccatatttgaggtaatccttagtaatttttcatcggctagagtagtagccaagtaaaccggaattattcttctattggtgaagagagagaaagatacattattcatcactccgtcactcaatctcgttcgtttttcttcaatctccgatcatggtgctcgaggcgacaatgatctgtgtcgataattccgaatggatgcgcaacggagattactcgcccactaggtttcaagctcaagcagacgccgttaatctaatttgtggggctaaaacacagtcaaatccggagaataccgtgggagtattaacaatggcgggaaaaggggttcgtgttctagtcactcccaccagcgatcttggaaagatcttagcttgcatgcacggtttggacataggtggtgagatgaacttggcagcagggatccaagtagctcagttagccctcaagcatcgccaaaacaagaagcagcaacaaagaattattgtatttgctggaggtcctattaaatatgataagaaggtactagagatgatcggaaggaagttaaaaaagaacagtgttgctcttgatgttgttaactttggcgaggaagatgatgcaaagacagagaagcttgaggccctggttgctgctgtaaataataatgacagcagccacattgttcatgttcctcctggtgcaagtgctctttctgatgtgctaataagtactcctatctttactggtgatggagagggtggaagtgggtttgcagcagctgctgcagccgctgcagctggtggtgtatctggtttcgattttgatgtggatcctaatgtggatcctgaattggctcttgctcttcgagtttcaatggaagaggagagggcacgacaagaagaagctgctaaaaaggctgcagaggaaacttcaaagcaggaaaaaggaggggaacaagaatccacttcacaagatgtaaccatgactggaagtgttgctcctgcagcttctgaagcagaaaataagacagctgatttaatggatgatgagaatgcactgctgcagcaggcacttgcaatgtcagtggatggccctgtggctactgttgctatgcaagacacagatatgttggaggcttctgtagatgatcaagacttggcacttgctcttcaattatctgtgcaggaaggtgagaaagaccaatcaagccagacagatatgagtaatttgttggcggatcaatcatttgtgtcatctatccttgcgtcactcccaggagttgatccaaatgacccttcggttaaagatttgcttgcatctatgcaaaatccatccgagactgagcagaagaaggatgaggacaaggatgctgagaacaagtgatactgcttaaagtgtattccagcatcaggtctgatttcaccatgagagatgggggatagttattgttttttggcagggaacggacgtcatatatattttccacttctctgactcggtacaagcgtcacaaacatgaaattatacattgttagagaatttattttgtaattgcatcatcaatggagaaaaacgcatacagccgactaccactctgaaccagattaaggattataaattacaagtagtacaaatgtgaaactttggttttttttttctctctttcctccttatttgacattataatttctttaaataatttatacttgaaaataaaaaaaaaa

SEQ ID NO: 1331 - DNA, 1492 bp, Panax ginseng
aatctcgttcgtttttcttcaatctccgatcatggtactcgaggcgacaatgatctgtgtcgataattccgaatggatgcgcaacggagattacttgcccactaggtttcaagctcaagcagacgccgttaatctaatatgtggggctaaaacacagtcaaatccggagaataccgtgggagtattaacaatggcgggaaaaggggttcgtgttctagtcactcccaccagcgatcttggaaagatcttagcttgcatgcacggtttggacataggtggtgagatgaacttggcagcagggatccaagtagctcagttagccctcaagcatcgccaaaacaagaagcagcaacaaagaattattgtatttgctggaggtcctattaaatatgataagaaggtactagagatgatcggaaggaagttaaaaaagaacagtgttgctcttgatgttgttaactttggcgaggaagatgatgcaaagacagacaagcttgaggccgtggttgctgctgtaaataataatgacagcagccacattgttcatgttcctcctggtgcaagtgctctttctgatgtgctaataagtactcctatctttactggtgatggagagggtggaagtgggtttgcagcagctgctgcagccgctgcagctggtggtgtatctggtttcgattttgacgtggatcctaatgtggatcctgaattggctcttgctcttcgagtttcaatggaagaggagagggcacgacaagaagaagctgctaaaaaggctgcagaggaagcttcaaagcaggaaaaaggaggggaacaagaatccacttcacaagatgtaaccatgactggaagtgttgctcctgcagcttctgaagcagaaaataagacagctgatttaatggatgatgagaatgcgctgctgcagcaggcacttgcaatgtcagtggatggccctgtggctactgttgctatgcaagacacagatatgttggaggcttctgtagatgatcaagacttggcacttgctcttcaattatctgtgcaggaaggtgcgaaagaccaatcaagccagacagatatgagtaattgttggcggatcaatcatttgtgtcatctatcctttcatcactcccaggagttgatccaaatgacccttcagttaaagatttgcttgcatctatgcaaaatccatccgagcctgagcagaagaaggatgaggacaaggatgctgagaacaagtgagactgcttaaagttttattccagcatcaggtctgatttcaggtggctgtaataatgccttaaccatgaaagatgggggaacggacatcttatatgtatattttctacttctttctctgactcggtactagtgtcacaaacatgaaattttacgttgttagagaatttattttgtaattgcatcatcaatggagaaaaacgcatacagccgactaccactctgaaccagattaaggattataaattacaag

SEQ ID NO: 1332 - DNA, 1599 bp, Lactuca sativa
ttttgtcattgtataatgtataatttacggatctaacttcattcatatgaccagaacgagaacagggctatcgtccggagcaagaaaactctccattcccctctcttcgtccaagtataactctcaaaccttgtaatcactcgctcttttgatttcttcgtcaaccttcaatcatggtgctcgaggctacgatgatctgtatcgataattcagaatggatgcgtaacggggattactcacccactaggtttcaagctcaagccgacgctgttaatctcatttgtggcgctaaaacccagtctaatcctgaaaatactgtgggcgtattgacaatggctggcaaaggcgttcgtgttcttgtcactcctactagcgatcttggcaaaatcctggcgtgcatgcatggtttagaaataggaggtgagatgaacttagcagctgggatccaagttgctcagttagctttaaagcatcggcaaaacaaaaaacagcaacaaaggataattgtgtttgctggaggtcctgtaaaatacgataagaaagtactggagatgatagggaagaagttaaagaagaacagtgtagctcttgatgttgtgaactttggtgaagaagatgaatcaaagtcagaaaagcttgaagctttagttgcagctgtaaacaacaatgacagcagtcacattgttcatgtcccagctggatcaaatgctctttctgatgttcttctaagtactccaatctttactggagatggagaaggtggaagtggatttgcagcagcagcagctgcagctgcagctggtggtgtgtctggttttgactttggtgttgacccgaatcttgatcctgagctggcacttgctcttcgtgtctccatggaagaagaaagagcaaggcaagaagctgctgctaaaaaagctgcagatgattcttcaaagaatgaaggaggggagtctagttcacaagatgcaactatgtctgaaaatgttgggacttctgagaataaaaaagatgatttaatggatgatgagaatgcattgctgcaacaagctcttgccatgtcaatggatgatcctgctgctgctgctactgtgacaacaagggatgctgacatgtcagaggcagctgctgatgatcaagatttggcacttgctctacaattgtctgttgaagaaggtggaaaagatggatcaggatcagggcaagcagatatggggaagcttttggctgatcagtcgtttgtctcatctattcttgcttctctgccaggagttgacccgaatgatccttcagtcaaggatttgcttgcttcaatgcaaaatcagcctgagtctgagcagaagaaagaggaggataaagcacccaaggaagatgacaagtgatttttggtgttgtttatcaactttaatcatgtcatggcacttacttggatttgtaaaagataagatgatcattaattctcatctttcaatggataattttcaaaatggatattgtttgtgatttcaatgttgttgcttgtgtctagttgtcttacacgaaattgaaattgttttttaagtatgctgtatgggaaaaggaaagaggctacaaaagttc

SEQ ID NO: 1333 - DNA, 1633 bp, Nicotiana tabacum
gacccacgtcggacgctacgagcacaactccctcagcaagtaaacccaattcctttcaactttcagcgaacaaacaccgatttctcagtttaatcttctgattgttggttctttcttcaatcgttaatcatggtgcttgaggcgacaatgatctgcatcgacaattcggagtggatgcgaaacggtgattactcgcccaataggtttcaagctctagctgatgcagttaatctcatctgtggtgccaaaacccagtctaatcctgagaatacagttggaattttaactatggccggtaaaggagttcgagtgttagtcactcccaccagcgatcttggaaaaatcttagcttgcatgcacggattagagataggtggtgagatgaatttggctgctggtatccaggtagcccagttagctttgaagcatcggcaaaacaaaaagcaacaacaaaggatcattgtttttgctggcagccctgtgaaatacgacaagaaggtcctggagatgattgggagaaagttaaagaagaatagtgtagctcttgatgtcgttaattttggtgaagatgatgatgggaaagctgagaagctagaggcgctagttgctgcggttaataacaacgagagcagtcacatcattcatgttcctgctggtcctaatgctctctctgatgtgcttataagtactcctattttcactggtgatggtgagggtggaagtggatttgcagcagcagctgcagcggctgccgctggtggagtgtctgggtttgactttggtgtagatcctaatttggatcctgaacttgctctagcactccgagtttcaatggaggaggaaagggcgaggcaagaagcagctgcaaagaaggctgcagacgaaactgctacacaagagaaaggagaaacttcccaggatgttactatggctgaaaatgtcaatgttggaactcctgaacccgaaaacaaggcaactgatctaatggaagatgagaatgccttgttacagcaagcccttgcaatgtcgatggatgatgcttcctctaatgttgctacacgagatactgacatgtcggaagcagcttccgaagatcaagacttggcacttgctcttcaattgtctgtgcaggacagcacaaatgatcagtcaagtcagacagatatgagtaagctgttggcagatcaatcatttgtgtcatcaatccttgcctcccttccaggcgttgatccaaatgatccctcagttaaagatttgcttgcttccatgcaaggccagtccgagaagaaggacgaggacacggacacggaccagaaagaagagaagaagtaataatgcgtacaagtatgttcagctgaggcaaagaagttcagatggtaatggggtatgggtgctactgaaattgcttattggaatggggcttattatgtctgtggaaaaggactgtatcgtgttacaattgagggattcattgaatcgttctttctttaaaatatactgttataagattatgaaactctttatctagcttgatttgtggcttccagatgatttgtatttatctctcaaagaaagaaagaacagatctgcctagcaagtgttcatctttgattcgtagtaagacccaacattc

SEQ ID NO: 1334 - DNA, 1431 bp, Chenopodium quinoa
tgttcatctacgtagtataaaactccttcgtcactgaaatcctcttcttcgatctcctggattttctcccctcttctcaaccatggtgctcgaggcgactatgatctgtatcgataattcggagtggatgcgtaatggtgattactcgcccaccagatttcaagctctttctgatgcggttaatctcatctgcggcgctaaaactcagtctaatccggagaatactgtcggaattctgactatggctggaaaaggtgttcgtgttttggtcactcccaccagcgatcttggaaagatattggcttgtatgcacggactggaagttggtggtgaaatgaacttggctgctggaattcaggtggctcaattggctcttaaacatcgacaaaacaaaaaacagcaacaaaggatcatagtttttgcaggaagtcctgtcaaatatgaacaaaaagtattaggagatgattgggaggaagttgaaaaagaacagcgtggcccttgatgttgttgattttggtgaagatgaggaagggaagtcagagaaacttgaggccttagtttctgcagtaaataacaacgaaaccagccatattgtccacgtgcctccaggtgctagtgccctgtccgatgtgctgataagtactcccatatttactggagatggggaaggaggaagtggttttgctgctgctgccgccgctgctgcagctggtggtgtttctggatttgatttcggtgtagatcctaatttggatcctgagctggctcttgcccttagagtttcaatggaagaagagagggcaaggcaagaagcagctgcaaaaagggctgcagaagaagcaactagacaagaaaaaggaggggaacaaagctcccaagacacaactatgggggaaagtagcaatgctgcaaattccgaagctgataagaaaaatgacatgactgaggatgatgagaatgccctactacagcaggcactggcaatgtcaatggatgaccctgcctccactacagctgtgcgagatactgatatgtcagatgcagctgatgaccaggacttgcaacttgctcttcagctctcggtagaggagggtgccaaagagtcaacaagtcagtcaagtcagacagatatgactaaattgctggcagaccagtcttttgtttcatccattcttgcttcgcttcctggagttgacccaaatgatccctcggtgaaggatttgctggcttccatgcacaatcagtctgagaagaaggatgaggataagccaccaagtgaagaggagaagaaatgatgcaatctctttgtcaagtcgaattaatcagaggggctttggtagcttgtaatatggctttgtatttttcacttggaaagggaaggtcacgatatgatccaaatgttgcttacagcatgaagagtttcaacaatgt

SEQ ID NO: 1335 - DNA, 1547 bp, Panax ginseng
tttttcatcggctagagtagtagccaagaaatccggaattattcttctattggtgaagagagagaaagaaacattattcatcactccgtcactcaatctcgttcgtttttcttcaatctccgatcatggtgctcgaggcgacaatgatctgtgtcgataattccgaatggatgcgcaacggagattacttgcccactaggtttcaagctcaagcagacgccgttaatctaatatgtggggctaaaacacagtcaaatccggagaataccgtgggagtattaacaatggcgggaaaaggggttcgtgttctagtcactcccaccagcgatcttggaaagatcctagcttgcatgcacggtttggacataggtggtgagatgaacttggcagcagggatccaagtagctcagttagccctcaagcatcgccaaaacaagaagcagcaacaaagaattattgtatttgctggaggtcctattaaatatgataagaaggtactagagatgatcggaaggaagttaaaaaagaacagtgttgctcttgatgttgttaactttggcgaggaagatgatgcaaagacagacaagcttgaggccgtggttgctgctgtaaataataatgacagcagccacattgttcatgttcctcctggtgcaagtgctctttctgatgtgctaataagtactcctatctttactggtgatggagagggtggaagtgggtttgcagcagctgctgcagccgctgcagctggtggtgtatctggtttcgattttgacgtggatcctaatgtggatcctgaattggctcttgctcttcgagtttcaatggaagaggagagggcacgacaagaagaagctgctaaaaaggctgcagaggaagcttcaaagcaggaaaaaggaggggaacaagaatccacttcacaagatgtaaccatgactggaagtgttgctcctgcagcttctgaagcagaaaataagacagctgatttaatggatgatgagaatgcgctgctgcagcaggcacttgcaatgtcagtggatggccctgtggctactgttgctatgcaagacacagatatgttggaggcttctgtagatgatcaagacttggcacttgctcttcaattatctgtgcaggaaggtgcgaaagaccaatcaagccagacagatatgagtaatttgttggcggatcaatcatttgtgtcatctatcctttcatcactcccaggagttgatccaaatgacccttcagttaaagatttgcttgcatctatgcaaaatccatccgagcctgagcagaagaaggatgaggacaaggatgctgagaacaagtgagactgcttaaagttttattccagcatcaggtctgatttcaggtggctgtaataatgccttaaccatgaaagatgggggaacggacatcttatatgtatattttctacttctttctctgactcggtactagtgtcacaaacatgaaattttacgttgttagagaatttattttgtaattgcatcatcaatggagaaaaacacatacagccg

SEQ ID NO: 1336 - DNA, 1536 bp, Citrullus lanatus
cttcttcagttccagaccttccggcttctgctgcaagaaacctctcccttcctcttcgattctctcttactccttcgatttcttgggtgttttcaatctctcaacaatggtgctcgaggctacaatgatctgcatcgacaattccgaatggatgaggaacggcgattatgctccttccagattccaagcccaagccgatgccgttaatctcatttgcggagctaaaacccagtctaacccggagaatacagtaggagttcttacaatggccggaaaaggggttcgggttttggtaactcctacaagtgatcttggcaagattctagcgtgcatgcacggtttagagataggtggagagacaaacttggctgctgggattcaggtggctcagttggctctgaagcatcgtcaaaacaagaagcaacaacaaagaattattgtttttgcaggaagtcctgccaatcatgaaaagaagttgttggagatgattggaaagaaattaaaaaagaacaatgtggcactagatattattgattttggtgaagaagatgatggtaagccagagaagctggaagcccttctttcggctgtaaatagtaacgactccagtcacattgttcatgttccctcaggtccaaatgctctttctgatgtacttattagtactccaatcttcactggtgatggggagggaggaagtggatttgctgcagctgctgctgcagcttcagctggtggggccggttttgattttggtgtggatcccaacttagaccctgaactagcacttgcacttcgagtgtcaatggaagaggaaagggccagacaggaggcagctgctaagagagctgctgaggagacttcaaagcaggaaaaaggaggggaacagccatctggctcacaggatacaactatgaatgaacgtgctagtgctgaatcttctgatgctcagaagacaaatgatccaatggaggatgaaaatgctctgttacaacaagcccttgcaatgtcaatggaagatcctgcctcaagtcaggacctgcgggatacagaaatgtcagatgcagcaatggatccagagttggctcttgctcttcagttgtccgtgcaggaggatgctaaagactcaacaagccaacctgatatgagtaaattactggcagaccagtcatttgtatcgtccattcttgcatcgcttccaggggttgatccaaatgatccatcagttaaagatttactggcttccatgcaaagtcagtcaaagccagaggacaagaagaatgaagaaaaaggccccaaggaagacgacgacaaatgatggaatccatctcccaaagttgaataattctgctaggtattcatatttcgcctcgtagaattgttgcatcgtgtgttcatctgcaaaagttagtcacttattcttttgctgaaaacaagaatatgcatcactttgatgtctaaaatagtgatgcccggatcttttattatgtactatgatattatactcttagtcttaattcaactcttgttttcttt

SEQ ID NO: 1337 - DNA, 1529 bp, Cucurbita pepo
ggttcttcagttccagaccttccggcttacgctgcaagaaacctcagccttctgccttctctgcgattctctcttactccttcgatttctcggtgttttcaatctctcaacatggtgctcgaggcgacgatgatctgcatcgataattcggaatggatgaggaacggcgattatgctccttcgagattccaagctcaagcggatgccgtcaatctcatttgcggagctaaaacccagtccaatccggagaatacggtaggagttcttacgatggccggaaaaggggttcgggttttggtaactcctaccagtgatcttggcaagattctagcgtgcatgcatggtttagagttgggtggagagacaaacttggctgcagggattcaggtggcacagttggctctgaagcatcgtcaaaataagaaacagcaacaaagaattattgtttttgcgggaagtcctgccaatcatgacaaaaagttgttggagacaataggaaagaaattaaagaagaataatgtggcacttgatattattgattttggtgaagaagatgatggtaagccagagaagctggaagcccttctttcggctgtaatagtaatgactccagtcacattgttcatgttccctccggtccaaatgcactttccgatgtacttattagtactccaatcttcaccggtgatggggagggaggaagtggatttgcagcagctgctgctgcagcttcagctggtggggctggttttgattttggtgtggatcccaatctagaccctgaactggcacttgcattacgagtctcaatggaagaggaaagggccagacaggagacagctgctaagaaagctgctgaggagacttcaaagcaggaaaaaggagaggcacaaccatctggctcacaggatacaactatgaacgaacgtgctagtgctgaaacttctgatgctcaaaagacaagtgatccaatggacgatgataatgctctgctacaacaagcccttgcaatgtcaatggaagatcctgcctcaagtcatgacgtgcgggatacagaaatgtcagatgcagctatagatccagagttagctcttgcacttcagttgtccgtgcaggaggatgctaaagactcaacaagccaacctgatatgagtaaattactggcagaccagtcattcgtgtcgtccattcttgcatcgcttccaggggttgatccaaatgatccatcagttaaagatttactggcttccatgcaaagtcagtcaaagccagaggacaagaagaacgaagaaaacccgcccaaggaagacgacgacaaggacaaatgatccatccatcttccgaagttgaataattccgctaggtaatttgtatttccctcgtaaaagcgttgcgtcgtgttcatctgcagaagttagtcactcttgtttttgcttttgatttggctgaaaacaagaatatgcttcactctgatgtctaaaaagtctgtgctatgatatatcatactcttaatcttaaatcaactcttg

SEQ ID NO: 1338 - DNA, 1279 bp, Conyza canadensis
ctctcacgactcactgtaatttcttcttcaatattcaatcatggtgctcgaggcaacgatgatctgtatcgataattctgaatggatgcgtaatggagattattcacctactagatttcaagctcaagctgatgctgttaatcttatttgtggtgctaaaacccagtctaatccggagaatactgtgggagtgttgacaatgtctggaaaaggcgttcgtgttctcgtcactcctactagtgatcttggaaagatccttgcttgcatgcatgggttagaaataggcggtgagatgaacatggcttctgggatccaggttgctcagttggctttgaaacatcgacaaaacaaaaagcagcaacagaggattattgtgtttgctggaggccctgtaaagtatgataagaaagttttggagatgattggaaagagttaaaaaagaatagtgtcgctcttgatgttgtgaactttggtgaggaggatgaagaaaagaaggaaaagcttgaggcccttgttgctgctgttaataataatgatagcagccacattgtttatgttccggccggatctaatgccctttccgatgtcctattgagtactcctatcttcactggtgatggagaaggtggaagcggtttcgcagcagcagctgctgccgccgcagctgggggtgtatctggttatgattttggtgtggatccaaatctcgatccggaacttgcacttgctcttcgtgtgtcgatggaagaggagagagcaaggcaagaagctgctgcaaagaaggctgcagatgagtcttctaagcaaggaggggaatctacatcacaagatgcaactatgtctgaaaatgctggcacttcagcttccgaatctgaaaataaaaaggatgatctaatggatgatgagaatgccctgcttcagcaggctcttgccatgtcaatggatgatcctgccgctactgttacgcccagggacactgatatgtcagaagcagccgcggatgatcaagacttggcacttgctctacaattgtctgttcaagaagaggcaaaagaccaatcaggacaggcagatatgggcaagctgttggcagatcaatcgtttgtgtcgtcaattcttgcttcactcccaggagttgaccctaatgacccttcagtaaaagatttgcttgcatcaatgcaaaatcagcctgagtctgagcagaagaaagatgaggacaaagcacccaaggaagatgacaagtgatcttattcgttcttttatcagtctaatcccagga

SEQ ID NO: 1339 - DNA, 1449 bp, Ambrosia trifida
ctttcgtcgtgagcaagaaaaccctcaattcatccaaaacacacacacaactccgtaacccttcttcaatcatcaatcatggtgctcgaggcaacgatgatctgtattgataattctgaatggatgcgcaacggcgattattcacccactaggtttcaggctcaagctgatgcagtcaatcttatttgtggcgctaaaactcagtctaatccagaaaatactgtgggtgtgttgacaatggctggaaaaggtgttcgtgtttggtactcctaccagtgatcttggcaagatcctggcttgcatgcatggtctagaaataggcggtgagatgaacttggcagctgggattcaggttgctcagttggcacttaagcatcgccagaataaaaagcaacagcaacggataatcgtgtttgcaggaggtcctgtaaagtatgataagaaagtattggagatgattgggaaaaagttaaaaagaacagtgtagctcttgatgttgtgaactttggtgaagaagatgaagccaagacagaaaagcttgaggctcttgttgctgctgtaaataataacgacagtagtcacattgttcatgttccagctggatctaatgcactctctgatgttcttttaagtactcctatcttcactggtgatggagaaggcggaagtggctttgctgcggcggctgcagcagcggcagctggcggtgtatctggttttgattttggtgtcgatccaaatcttgaccctgaacttgcacttgcccttcgtgtttcaatggaagaagagagagcaaggcaagaagctgctgctaaaaaagctgcggatgattcgacaaagcaagataaagaaggggcttctagctcacaagatgcaactatgtctgaaaatgttgccacctcagcttctgaatctgagataaaaaagaatgatctaatggatgatgagaatgcactgctacagcaggcgcttgccatgtcaatggatgaccctgctactactgttaacacgagggacactgatatgtcagaagcagctgctgatgatcaagatttggcacttgctctacagttatccgtgcaagaaggtgcaaaggatcaatcaggggagactgatatgggcaaacttttggcagatcaatcgtttgtgtcatccgttcttgcttcccttccaggagttgacccaaatgacccttcagtcaaagatttgcttgcttctatgcaaaatcagcctgagaagaaagatgaggaggacaaggaagaggacaagtgatcgaacttatctgttcttaaatcaatataatcccaggttataagttttgctgcgtttggctgagagatatcttggatgaactgtataatgggataatagattacaatcacaatgtagtcaaaaagagtaccttggaattttgtttgtcatttggtggctgtttatgaacttttagtc

SEQ ID NO: 1340 - DNA, 1602 bp, Amaranthus tuberculatus
cctgcacaagttaaacaccatattttttgttcatcgcgaaaactcttcactctgtccttcgtctctgaaatctctatctcggatctccacctcaatactaaaccatggtgctagaggcgactatgatatgcattgacaattcagagtggatgcgcaatggtgactactcgcctaatagatttcaagctctttctgacgctgtcaatctaatttgcggcgctaagactcagtctaatccagagaatactgtggggattttaactatggccggaaagggtgttcgtgttttagttactccgactagtgaccttggaaagatattggcttgtatgcatggcttagaaataggtggtgaaatgaacttggctgctggaattcaggttgcacagttagctcttaagcatcgtcaaaacaagaaacaacaacaaagaatcattgtgtttgctggaagtcctgttaaatatgataaaaaagtgttggaaatgattgggaggaagttaaaaaagaatagtgtggcacttgatgttgttgattttggtgaagacgaggaaggcaaatcagagaaacttgaggccttggttgctgctgtaaataataatgaaaccagccatattgtccgtgtgcctccaggtgccaatgccctatctgatgtgctgattagtactccaatatttactggagatggggaaggaggaagtggatttgctgctgcagcagctgcagctgcagctggtggtgtttctgggtttgactttggtgtggatccaaatttggatcctgagttggctcttgctcttagagtctcaatggaagaagagagggctagacaagaagcggctgcaaaaagggctgcagaagaagcatctagacaggataaaggaggggaacaatcaggctcccaagaagccactatgggagaaagtaacaatgctgcaagctcagaagctgataagagaaatgacatgacagaggatgatgatgccctgctgcaacaagcattggcaatgtcaatggatgatcctgcctccagtatggcggtgcgagatatagatatgtcggatgcagctgatgaccaggacttgcaacttgctctgcagctctctaaggaggaaggtgcaaaagagtccacaagtcagtcaagtcagactgatatgagtaaattgttggcagacgagtcctttgtttcatctattcttgcttcgctacctggagtcgacccaaatgatccatccgtgaaggatttgctggctaccatgcagagtcagtctgagaagaaagacgaagacaagccaccgagcgaggaggagaagaaatgatgcaaataaccaggtaaaggtcgcggttaggcacaaaagagaatcaatcccttcgacagcgtttagttccatggacaaactgattcccttcaatgtattgttaaatgaaatttggaaattttcattgaaatattttgtttgttatattgggttggttttagcatctcatatttcacctatactgtcatactgatgtgatcgtgtagagactttctttttactggtttctgaatcatatatttctactctatgggaaatgggaatctaccactttgctgttgtctcc

SEQ ID NO: 1341 - DNA, 1429 bp, Vinca minor
caataatcatggttctcgaggcaacaatgatctgcatcgacaactcagagtggatgcggaatggcgattattctccctctaggtttcaggctcaagccgatgccgttaatctcatctgtggtgccaaaacccagtctaatccggagaatacagtgggagttttgacaatggcgggcaagggtgttcgtgtattagtaactccaaccagcgatcttggcaagatcttagcttgcatgcacggactagaagttggtggcgagatgaacttggcagcagggatccaagtggcacagttagctctgaagcatcgtcagaacaagaagcagcaacaaaggattgtagtatttgctggaagtcctgttaaatatgacaagaaggtattggagatgattggaaagaaattgaaaaagaacagtgttgctcttgatgttgtgaatttcggtgaagaagatgaggggaaggctgagaagcttgaggcactggtcgctgcagttaacaacaatgacagcagtcatattgttcatgttcccccgggtccaagtgctctttccgatgtgttgatcagtactcctatctttactagtgatggtgaaggtggaagtggatttgcggcagccgctgctgcagctgcagctggtggagtatctggttatgactttggtgtggatcctaacctggatcctgagcttgctcttgctcttcgtgtttcaatggaagaagagagagcaagacaagaagcagctgcaagggctgcagaagaagcttacaaaaaaagaacaaggagaacagcaatcaacttcacaagatgtgaccatgaccgagaatgtcaaagctggaagttctgaagccgaaaataggacaactgacctaatggatgacgataatgccttgttacagcaggcacttgctatgtccatggatgattcttcctcaaatgttaccacacgagacaccgacatgccggaggcagctgccgatgatcatgaattacaacttgcacttcaaatgtctgcacaagagggtcatgatgcatcaaaacagtcagaccaggaagatgtgagcaagttgttgggtgaccagtcatttatgtcgtccatccttgcttcgcttccaggagttgatccaaatgatccatcagttaaagatctgcttgcctccatgcaaagtcaacctgagcagaagaaggaagaggacaaggcacccaaagaagatgacaagaaggaatgatgcacaagtttctactgcgatcagactcgttctcgttttcaatatggaagtgtgtctgaaaatgaaaacatatattggtttggttaattttaaatctgcattggtctgatgctcattcttgaaaatgtgtttgtattgtcattttaatttctatggaacatgaaatgagtttttctcttatttgttttgtttatttgaaggg

SEQ ID NO: 1342 - DNA, 1257 bp, Platanus occidentalis
tcgcttcccctccgatcttccacaatggtgctcgaggctaccatgatctgtatcgataattccgaatggatgagaaatggcgattattcgccctcgcggtttcaagcgcaagcggatgcagttaatctcatatgcggagctaaaacacagtctaatccggagaacactgtgggagttttaacgatggcaggaaaaggagttcgtgttttggttactccgaccagcgacctcggcaagattctggcttgcatgcacggtttagacattggtggtgagatgaacttggctgccgggatccaagtagcccagctcgctcttaagcatcgccaaaacaaaaagcagcaacagagaattattgtttttgctggaagtccggtcaaatatgataagaaagtactggaaatgattgggaggaaattaaaaaagaatagcgtagcgcttgatattgttgattttggggaagacgatgatggtaagccagagaagctggaagccctccttgctgctgtaaataataatgacagcagtcacattgttcacgttcctcctggtcctaatgctctttctgatgtgcttataagcacacccatattcactggagatggggaaggaggaagcggttttgcagcagctgctgcagcggcagctgctgcaggtggtacctctggatttgattttggtgtggatcccaacatagatcctgagctggcccttgctcttagagtttcaatggaagaggagagggcaaggcaagaagctgctgctaagagggctgcagaagaagcttcaagacaaggaaaaggagaacaaccatcaaattcacaggatgcaactatgactgaacgtggtagcattacagcacctgaagttgaaaccaaaagaaatgatctaacggatgatgagacagcattgctagagcaggctcttgcaatgtcaatggatgaccctacatctggtcgcgcaatgggagacgcagatatgtcagaggcaactacagaggatcaagatttggcttttgctcttaaaatgtccgttcaagatgatgcaaaagattcagcaacccaggcagagatgagcaaggtgttgggagaccaatcttttatgtcatctatacttgcttcgcttccaggagttgaccctaatgacccttctgtgaaagatttgcttgcatctctgcaaggccaatcagagcaaaaggatgaagataacccacaaatgaagagcaaaagtgatggttttcaggagcttctgattttt

SEQ ID NO: 1343 - DNA, 1588 bp, Chrysanthemum coronarium
ccggaaccttaataaccaaacataccctttcgtcctactcaagaaaacccaatattcattatcatcatcatcgtccccgatcttaaaccatttcccaaacactaccaattccaataatcaacgataataatcaacaatggttctcgaggcaacgatgatctgtattgacaactcagaatggatgcgtaacggtgattattctcctactcggtttcaagctcaagctgatgctgtcaatcttatttgcggtgctaaaacacagtctaatccggagaataccgtgggtgtattgacaatggccggaaaaggagtgcgtgttttggttactcctactagtgatcttggaaagattctcgcttgcatgcatggtttagagataggcggtgagatgaacttggctgccggaatccaggttgctcagttggcgttgaagcatcgtcaaaacaagaagcaacaacaaaggattattgtgtttgcaggaggtcccgtgaaatacgataagaaagtattggagatgattggaaagaagttaaaaaagaacagtgtcgctcttgatgttgtgaacttcggtgaagaggacgaacctaagaaggaaaagcttgaggccctggtcgccgctgtgaataataatgacagcagtcatattgttcatgttccggctgaatctaatgccctttcggacgttctactgagtactccaatcttcaccggtgatggagaaggtggtagcgggtttgcagcagctgctgccgcggccgcagctggcggtgtatctggttttgattttggcgtcgatcccaatttggaccctgaacttgcacttgctcttcgtgtttctatggaggaggagagagcgaggcaagaagctgccgcgaaaaaggctgcagacgattcctctaagccggggaaagaaggggagtctacttcacaagatgtaaccatgtctgaaaatgttgggacttctgaatctgagaataaaaaagacgatttaatggatgatgagaatgctctgctacagcaagctcttgccatgtcaatggatgatcctgctgctactgttacaacaagggacgttgatatgtccgaggcagcaactgatgatcaagacttggcccttgctctacaattgtctgtgcaagaaggtgcacaagatcaagcaggacaggcggacatgggcaagctgttggcagatcagtcatttgtgtcatcaattcttgcttcactcccaggagttgatcctaacgacccttcagtcaaagatttgcttgcttcaatgcaaaatcagcctgagtcttctgagcaaaagaaagacgaggacaaaaaggaaggcgacaagtgatcttctatgtttcctcttataagtataatctcaggttacaacttgtgctgcatttggttgagatttctttgatgaactgcataacgggatcgattgcaatacgttgaatgtacggactattgttcttgttaccatggatcagtttctcagttgatgcttgttatattataactttaatcatggtacctggataatcaaattgttattttagctgttctcatgtatgttttttgaaaatgctgaactttt

SEQ ID NO: 1344 - DNA, 1543 bp, Chrysanthemum coronarium
cattatcatcatcatcgtccccgatcttaaaccatttcccaaacactaccaattccaataatcaacgataataatcaacaatggttctcgaggcaacgatgatctgtattgacaactcagaatggatgcgtaacggtgattattcgcctactcggtttcaagctcaagctgatgctgtcaatcttatttgcggtgctaaaacacaatctaatccggagaatacagtgggtgtattgacaatggctggaaaaggagttcgtgttttggttactcctactagtgaccttggaaagatcctcgcttgcatgcatggtttagaaataggtggtgagatgaacttggccgccggaatccaggttgctcagttggcgttgaagcatcgtcaaaacaagaagcaacaacaaaggattattgtgtttgcaggaggtcctgtgaaatacgataagaaagtattggagatgattggaaagaagttaaaaaagaacagtgttgcacttgatgttgtgaacttcggtgaagaggatgaacctaagaaggaaaagcttgaggccctggttgctgctgtgaataataatgacagcagtcatattgttcatgttccggctgaatctaatgccctttctgatgttctattgagtactccaatcttcaccggtgatggagaaggtggtagcgggtttgcagcagctgctgccgcggccgcagctggcggtgtatctggttttgattttggcgttgatcccaatttggaccctgaacttgcacttgctcttcgtgtttctatggaggaggagagagcgaggcaagaagctgccgcgaaaaaggctgcagacgattcctctaagccggggaaagaaggggagtctacttcacaagatgtaaccatgtctgaaaatgttgggacttctgaatctgagaataaaaaagacgatttaatggatgatgagaatgctctactacagcaagctcttgccatgtcaatggatgatcctgctgctactgttacaacaagggacgttgatatgtccgaggcagccactgatgatcaagacttggcacttgctctacaattgtctgtgcaagaaggtgcacaagatcaagcaggacaggcggacatgggcaagctgttggcagatcagtcatttgtgtcatcaattcttgcttcactcccaggagttgatcctaacgacccttcagtcaaagatttgcttgcttcaatgcaaaatcagcctgagtcttctgagcaaaagaaagacgaggacaaaaaggaaggcgacaagtgatcttctatgtttcctcttataagtataatctcaggttacaacttgtgctgcatttggttgagatttctttgatgaactgcataacgggatcgattgcaatgcgttgaatgtacggactattgttcttgttaccatggatcagtttctcagttgatgcttgttatattataactttaatcatggtacctggataatcaaattgttattttagctgttctcatgtatgttttttgaaaatgctgaacttttacgagtagtgt

SEQ ID NO: 1345 - DNA, 1494 bp, Cucumis sativus
ctccttcagttcatcaccttccggcttctgctgcaagaaacctcctctcttctctccgattctctctttctccttccatttcttccctcttttcattctctcaacaatggtgcttgaggcgacaatgatctgtatcgataattccgagtggatgaggaacggcgattatgctccttccagattccaagctcaagctgatgccgtcaatctaatttgcggagctaaaacccagtctaacccggagaatacagtaggagttcttacgatggctggaaagggggttcgggttttggtaactcctacaagtgatcttggcaagattctagcgtgcatgcacggtttagagataggtggagagacaaacttggctgctgggattcaggtggctcagttggctctgaagcatcgtcaaaataagaagcagcaacaaagaattattgtttttgcaggaagtcctgccaatcatgaaaagaagttgttggagatgattggaaagaaattaaaaaagaacaatgttgcactagatattattgactttggtgaagaagatgatgctaagccagagaagctggaagctcttctttcggctgtaaatagcaatgactccagtcacattgttcacgttccatcaggtccaaatgctctttccgatgtacttattagtactccaatcttcaccggtgatggggagggaggaagtggatttgccgcagctgctgctgcagcttcagctggtgggggcggttttgattttggtgtggatcccaacctagaccctgaactagcacttgcacttcgagtgtcaatggaagaggaaagggccagacaggaggcagctgctaagagggctgctgacgagacttcaaagcaggaaaaaggaggggaacagccatctggctcacaggatacaactatgaatgagcgtgctagtgctgaatcttctgatgctcagaagacaagtgatccaatggaggatgaaaatgccctgttacaacaagcccttgcaatgtcgatggaagatcctgcctcaagtgacattcgggatacagaaatgtcagatgccgcaatggatccagagttagctcttgctcttcagttgtcagtgcaggaggaatctaaagactcaacaagccaacctgatatgagtaaattactggcagaccagtcgttcgtatcatccattcttgcatcgcttccaggggttgatccaaatgatccatcagttaaagatttactagcttccatgcaaagtcaatctaagccagaggacaagaagaacgaagaaaacccaccgaaggaagacgatgacaagtaatcaaatccatcttccaaagttgaataattctgctaggcattcgtatttctccccgtaaaagtgttgcatagtgtgttttgatcatctgcagacaagagaatatgcatcactttgatcttttaatttgtactatgatattatactcttcagtcttaattcaactcttgtttccttttctc

SEQ ID NO: 1346 - DNA, 1807 bp, Mimulus guttatus
agtcaccccagattccaaatttctctgtctctcgcacataaacaaaccaacatttctctgtgttgcaaaaaatctcccctgtttaccgctattttacttttttcttggttaatctacctccaatttcgtgcaataatggtgctcgaggcgacgatgatctgcgttgacaactcggagtggatgcggaatggtgattattcacccaatcgatttcaagctcaagccgacgccgttaacctaatttgtggagctaaaactcaatccaatccggaaaatacagtgggagtcttaacaatggctggaaaaggtgttcgcgtgttggttactcctactagtgatcttggcaagatcctggcctgcatgcacggtttagagataggtggtgaaatgaatttggcggctgggatccaggttgcacagttggccctgaagcatcgtcagaacaagaagcagcaacaaaggataattgtgtttgtgggaagtcctgttaaatatgataagaaggcgttagagttgattggaaggaaattgaaaaagaacagtgtagctctggacattgtaagctttggtgaagaagatgaagaaaagaatgagaagcttgaggcattgcttgctgccgtaaataacaatgacagcagtcatattgttcacgttccttgtggtccaagtgctctttcggatgtgcttatcagtaccccaatctttactggcgatggagaaggggggagtggttttgcagcagctgcagctgcttctgggtatgaatttgtggatccaaacatggatcctgaacttgctcttgcacttcgtgtatcaatggaagaggagagagcaaggcaagaagcagctgcaaagaaggctgcagaagaagttgcaaatcaagaaaaaggagaacagcagtccacttcacaggatacaaccatgactgacagtgtgaaccttgaaacttcaagacctgaaaaaaagatacaagatctgacggatgatgagaatgcattgttacagcaagccctggctatgtccatggatgatccttccaccaaagctgctgtgcaggacattgacatgtcagacgcctctgctgaccatgatttgcaacttgcccttcaattgtctgtgcaagaagaaagtgcagcagatcaatcaaaccagacagatgtgaataagctgttggcagatcaatccttcatgtcctccatccttgcttcactcccaggtgttgatccaaatgacccccatgtcaaagacttgcttgcttccatgcagaatcagtctgagaccaaggaagaagacaaggcaccgaaagaagaggaaaagaaatgaacatgtttgtgtcaaatgtctttctcaggtcaagcatctattacagaaaagaagttgtgcgaggtgtataagttggcactcaagatggttgtagtttttgtcaattaggaggcatatgccatgaacaatcttgttatgatcaagaattaaatgagctgtctagtactatataacctactgactttcgaaaatgttatgttgtctcattctatgtcaaacagtgactttgttgcatatataggtggcgtgaattactcaatcttggtcgggaactttgttcttgttttttcaagtgtttatttgaatcaaatgccatcttttgttgcagcagatatacctgatggttgggggagggctcgtcatgttatttttttctttctcgttttccggtcagctagaccttttgagtttttttcttttttgggcttaaacaaacggtgatcattattttcaaattgaaatgttacttaccattgctgttagc

SEQ ID NO: 1347 - DNA, 1481 bp, Silene vulgaris
ccatggtgctcgaggcgactatgatctgcatcgataattcggagtggatgcgcaacggcgattactctcccaacagatttcaatctctttctgacgccgttaatctaatctgcggcgccaaaactcagtctaatccagaaaatacagttggattattgacaatggctggtaaaggtgttcgtgtcttggttactcccaccagtgaccttggcaaaatcttggcttgtatgcacggccttgaaattggtggcgaaatggacctagcagctggaattcaagtggcccaattggctctaaaacatcgtcaaaacaaaaaacaacagcagagaattatcgtatttgctggaagtcctgttgaatacgagaaaaagacgttagagatgattgggcgtaagttaaagaagaacagtgttgctcttgatgttgttgattttggtgaagatgaagaaggcaaatcagagaaactcgaggccttagtggctgcagtgaacaacaatgaaaccagtcactatgtccatgtgcccccaggttccaatgctttgtccgatgtacttataagtactccaatatttactggtgatggggaaggaggaagtggtttcgctgcagctgcagcagctgccgctgctggtggtgtgactggatttgattttggtgttgatccaaacctcgatcccgagctggcacttgctcttagagtttcaatggaggaagagagggcaaggcaggaggcagctgcaaaaaaggctgcagaagaagcttctggacagcaaaaaggagaatcgagctctcaagatgcgattatgggagaaagtagcggttcaaaagatgaagcggataagaaaattgatataatggacgatgagaatgctctactgcagcaggcattagcaatgtcaatggatgaacctgcctccacaacgactgtgagagatatagatatgtcagatgcagctgtagacgaggacttgcagcttgctctccaactctctgtggaggacagtgcgaaagactcatcaagtcagtcaagtcagacagatatgagcaaattgctgtctgaccaatcttttgtatcatcaattcttgcgtcgcttccaggagtggaccctaatgatccttcagttaaagatttgctggcttctatgcaaaatcagtctgagaagaaagatgatgataagccaagcgaggagaagtgacgcgtatgtctctcaaatcccaggtctttctgccgaagttcatgccaactagactacaagctactcttgctgtattgactttttatgatttctactgcattgtggtttgttgttggacaaatagcttcagggggcaaaagaggatggaagaatttggactctgtttatttgcattatcttcctatgtattgtcaattcaacagtttgggttcatctccatctgacatttctcggtgccatcagcctgtacttttacttgccttttgcagataattatttgtttcg

SEQ ID NO: 1348 - DNA, 1575 bp, Glycine max
tgttgcgctgcaccagattattggtttcgtttaagagaattaagcactcggttacagaacaaacttctttcactctttcgcttctgaatcttcaacaatggtgctcgaggcgacgatgatctgtatcgacaattctgaatggatgcgtaacggtgattactctccttctcgatttcaagctcaagcagacgctgtgaatctcatttgcggtgctaaaacgcagtctaatccagaaaatacagtgggagttctcacaatggcagggaaaggcgttcgtgttttggtcacccctaccagtgatctgggcaagatcttagcctgcatgcatgggctagatataggtggtgagatgaacctagctgctggcattcaggttgcacaactggctcttaagcatcggcaaaataaaaaacaacagcagaggattattgtctttgctggaagccctgtcaagcatgaaaagaagatgttggagatgataggaagaaagttgaaaaagaatagtgttgcacttgatattgttaattttggtgaagaagatgaggggaagacagagaagctggaagcactcctcgcagctgttaacaataatgataccagccacattgttcatgttccatctggtcctaatgccctttctgatgtacttataagtacacctattttcactggtgatggggaaggtggaagtggttttgcagctgctgctgctgccgctgcagctggtggtgtatcaggatttgagtttggcgtggatccaaacttggatccagaattggctcttgctctaagagtttcaatggaagaggagcgagccaggcaggaagcagctgcaaaaaaggctgcagaggatgctgcaaaacaagagaagggaggtgagcagcaagccagctcacaagatgcaacaatgactgagcgtgccagtgcagcaatgtctgaagctgagaataagacaagtgatttgatggatgatgagaatgccttactacagcaggcgcttgcaatgtctatggatgatcctgccattagccatgatgtaaaagatacagatatgtcagaagcttctgcaagtgatcctgacttggctctgggcaatggacactgcattacagtacaatttaagtgtcccaactcccatgaggcattgaagcgtggtgtcttatgtgtccaacatggaatcacagaccccttttttaagtatcctgctctttatgcgtcatatttcttacattaagcatggacacatgtttttgcaaattgcaagtcttcttttttaatccagtcttttgtatgacaaatgccttgtttttatatcttgatgatttaagatgatttcttcatgtgtttccacttcagtgaagtagatagttcttattcctttttggtgaaaagaaggatttcaatgtgtttgttttgtctgcatttacatatttacttacctaactcctacttgttttgaggattttggtatgcttactgtgacctgtacatggggttaaattaatttacatcttagaatttctaagtcacagtaaagcttcattggtggttataatcttttgttggtttggtcat

SEQ ID NO: 1349 - DNA, 1507 bp, Valeriana officinalis
ttcttccattgttccgatttggagagctcttacactgaaaaatttctcaatcttacgattcttcacttttcaacaaccatggtgctcgaggcgacaatgatctgtatcgataattcggaatggatgcgaaacggagactattctccgactaggtttcaagctcaggccgacgctgttaatctaatctgcggagccaaaacacagtcgaatccggagaatactgttggagttttgacaatggctggaaaaggtgttcgtgttttggtcactcctactagtgatcttggaaagatcttagcttgtatgcacgggttagatgttgggggtgagatgaacttagcttctggaattcaggtagctcaattagctttgaagcatcgtcagaacaagaagcagcaacagaggattattgtattctgcggaggcccggtgaattatgagaagaaggtactggaaatgattggaaggaagcttaagaaaaacagtgtagctcttgatgttgttaactttggtgaagatgatgattcgaaatcagaaaagcttgaagctcttgttgctgctgtaaataataatgatagcagtcacattgttcatgttcctgctggcgcaaatgctctttctgatgtgcttatcagtacacctatctttaccggcgacggagagggaggaagcggttttgcagcggcagcagcagcagtggcagccggtggagtatctggttatgattttggtgtggatccaaacctagatccagagctagctcttgcactccgagtgtcaatggaagaagaaagagccaggcaagaagctgctgccagaaaggctgctgaagcggcatcttctaatcaagaaagcacttcacaagatgctactatgactgaaaatcccgattctcagaacaaaacaaccgatctcacggacgatgagaatgctctgttacagcaagcacttgccatgtcgatggatgaccctactactacacgtgatgtcgatatgtctgaagcagctgctgatgatcaagatttggctcttgcgcttcagttgtcagtacaggagactgacaaaagaagaatcgagtcagtcagatatgagtagtttgctggccgatcagtccttcgtttcatctattcttgcttctctgccaggtgtcgatcctagtgacccgtctgtcaaagatttgcttgcctccatgcaaagccagtctgagccggagcagaaaaaggacgaggacaaggctcctaaagaggacgagaacaagtgaattaagctttcgaggcgaatgtagtttcttgaatgctggctcgaatcatcattattgaatactagtaaacagttaaaaaggacatgtaatgtggtgtttatcttcaaccaactgtttgtttagtgtaacagtaactctttgtttttactgcacttttcctttttctaagaagggtatactattatgtttgtgtcgtgctaagaattgcaacatcttattcagaatttcattcaaatatataccggg

SEQ ID NO: 1350 - DNA, 1507 bp, Chrysanthemum coronarium
cattattatcatcatcatcgtccccgatcttaaaccatttcccaaacactaccaattccaataatcaacgataataatcaacaatggttcttgaggcaacgatgatctgtattgacaactcagaatggatgcgtaacggtgattattcgcctactcggtttcaagctcaagctgatgctgtcaatcttatttgcggtgctaaaacacagtctaatccagagaataccgtcggtgtattaacaatggccggaaaaggagtgcgtgtgttggttactcctactagtgatcttggaaagatcctcgcttgcatgcatggtttagagataggcggtgagatgaacttggctgccggaatccaggttgctcagttggcgttgaagcatcgtcaaaataagaagcagcaacaaaggattattgtgtttgcaggaggtcccgtgaaatacgataagaaagtattggagatgattggaaagaagttaaaaaagaacagtgtcgctcttgatgttgtgaacttcggtgaagaggacgaacctaagaaggaaaagcttgaggccctggtcgccgctgtgaataataatgacagcagtcatattgttcatgttccggctgaatctaatgccctttctgacgtcctactgagtactccaatcttcaccggtgatggagaaggtggtagcgggtttgcagcagctgctgccgcggccgcagctggcggtgtatctggttttgattttggcgttgatcccaatttggaccctgaacttgcacttgctcttcgtgtttctatggaggaggagagagcgaggcaagaagctgccgcgaaaaaggctgcagatgattcctctaagccggggaaagaaggggagtctacttcacaagatgtaaccatgtctgaaaatgttgggacttctgaatctgagaataaaaaagacgatttaatggatgatgagaatgctctgctacagcaagctcttgccatgtcaatggatgatcctgctgctactgttacaacaagggacgttgatatgtccgaggcagccactgatgatcaagacttggcacttgccctacaattgtctgtccaagaaggagaccaatcaggccaggcggacatgggaaaggtgttggcagatcagtcatttgtgtcatcaattcttgcttcactcccaggagttgatccaaacgacccttcagtcaaagatttgcttgcttcaatgcaaaatcagcctgagtcttctgagcaaaagaaagacgaggacaaaaaggaaggcgacaagtgatcttctatgtttcctctataagtataatctcaggttacaacttgtgctgcatttggtcgagatttctttgatgaactgcataacgggatcgattgcaatgcgttgaatgtacggactattgttcttgttaccatggatcagtttctcagttgatgcttgttattatgaactttaatcatggtacttgaataatcaaattgttattttggctgttctcatgtatgttt

SEQ ID NO: 1351 - DNA, 1543 bp, Chrysanthemum coronarium
caagaaaacccaatattcattatcatcatcatcgtccccgatcttaaaccatttcccaaacactaccaattccaataatcaacgataataatcaacaatggttctcgaggcaacgatgatctgtattgacaactcagaatggatgcgtaacggtgattattcgcctactcggtttcaagctcaagctgatgctgtcaatcttatttgcggtgctaaaacacagtctaatccagagaataccgtcggtgtattaacaatggccggaaaaggagtgcgtgtgttggttactcctactagtgatcttggaaagatcctcgcttgcatgcatggtttagagataggcggtgagatgaacttggccgccggaattcaagttgctcagttagctttgaagcatcgtcaaaacaagaagcagcaacagaggattattgtgtttggtggaggtcctatgaaatacgataagaaagcattggagatgattggaaagaagttaaaaaagaacagtgtcgctcttgatgttgtgaacttcggtgaagaggacgaacctaagaaggaaaagcttgaggccctggtcgccgctgtgaataataatgacagcagtcatattgttcatgttccggctgaatctaatgccctttctgacgtcctactgagtactccaatcttcaccggtgatggagaaggtggtagcgggtttgcagcagctgctgccgcggccgcagctggcggtgtatctggttttgattttggcgttgatcccaatttggaccctgaacttgcacttgctcttcgtgtttctatggaggaggagagagcgaggcaagaagctgccgcgaaaaaggctgcagatgattcctctaagccggggaaagaaggggagtctacttcacaagatgtaaccatgtctgaaaatgttgggacttctgaatctgagaataaaaaagacgatttaatggatgatgagaatgctctgctacagcaagctcttgccatgtcaatggatgatcctgctgctactgttacaacaagggacgttgatatgtccgaggcagccactgatgatcaagacttggcacttgctctacaattgtctgtgcaagaaggtgcaaaagatcaagcaggacaggcggacatgggcaagctgttggcagatcagtcatttgtgtcatcaattcttgcttcactcccaggagttgatccaaacgacccttcagtcaaagatttgcttgcttcaatgcaaaatcagcctgagtcttctgagcaaaagaaagacgaggacaaaaaggaaggcgacaagtgatcttctatgtttcctctataagtataatctcaggttacaacttgtgctgcatttggtcgagatttctttgatgaactgcataacgggatcgattgcaatgcgttgaatgtacggactattgttcttgttaccatggatcagtttctcagttgatgcttgttatattataactttaatcatggtgttcaaattgttattttagctgttctcatgtatgttttttgaaaatgctgaagatcggaa

SEQ ID NO: 1352 - DNA, 1488 bp, Chrysanthemum coronarium
agagacgccgaccacaccactcgtcaacgataataatcaacaatggttctcgaggcaacgatgatctgtattgacaactcagaatggatgcgtaacggtgattattctcctacacggtttcaagctcaagctgatgctgtcaatcttatttgcggtgctaaaacacagtctaatccggagaataccgtgggtgtattgacaatggccggaaaaggagtgcgtgttttggttactcctactagtgatcttggaaagattctcgcttgcatgcatggtttagagataggcggtgagatgaacttggctgccggaatccaggttgctcagttggcgttgaagcatcgtcaaaacaagaagcaacaacaaaggattattgtgtttgcaggaggtcccgtgaaatacgataagaaagtattggagatgattggaaagaagttaaaaaagaacagtgtcgctcttgatgttgtgaacttcggtgaagaggacgaacctaagaaggaaaagcttgaggccctggtcgccgctgtgaataataatgacagcagtcatattgttcatgttccggctgaatctaatgccctttcggacgttctactgagtactccaatcttcaccggtgatggagaaggtggtagcgggtttgcagcagctgctgccgcggccgcagctggcggtgtatctggttttgattttggcgtcgatcccaatttggaccctgaacttgcacttgctcttcgtgtttctatggaggaggagagagcgaggcaagaagctgccgcgaaaaaggctgcagacgattcctctaagccggggaaagaaggggagtctacttcacaagatgtaaccatgtctgaaaatgttgggacttctgaatctgagaataaaaaagacgatttaatggatgatgagaatgctctgctacagcaagctcttgccatgtcaatggatgatcctgctgctactgttacaacaagggacgttgatatgtccgaggcagccactgatgatcaagacttggcacttgccctacaattgtctgtccaagaaggagaccaatcaggccaggcggacatgggaaaggtgttggcagatcagtcatttgtgtcatcaattcttgcttcactcccaggagttgatccaaacgacccttcagtcaaagatttgcttgcttcaatgcaaaatcagcctgagtcttctgagcaaaagaaagacgaggacaaaaaggaaggcgacaagtgatcttctatgtttcctctataagtataatctcaggttacaacttgtgctgcatttggtcgagatttctttgatgaactgcataacgggatcgattgcaatgcgttgaatgtacggactattgttcttgttaccatggatcagtttctcagttaatgcttgttatattataactttaatcatggtacctggataatcaaattgttattttagctgttctcatgtatgttttttgaaaatgctgaacttttt

SEQ ID NO: 1353 - DNA, 1523 bp, Nicotiana benthamiana
tttattctgctaacgtttttctatcaggcgacaatgatctgcatcgacaattcggagtggatgcgaaacggtgattactcgcccaacagatttcaagctctagctgatgcagttaatctcatctgtggtgccaaaacccagtctaatcctgagaatacagttggaattttgactatggccggtaaaggagttcgggtattagtcactcccaccagcgatcttggaaaaatcttagcttgcatgcacggattagagataggtggtgagatgaatttggctgcgggtatccaggtagcccagttagctttgaagcatcggcaaaacaaaaagcaacaacaaaggatcattgtttttgctggcagccctgtgaaatacgacaagaaggtcttggagatgattgggagaaagttaaagaagaatagtgtagctcttgatgtcgttaattttggtgaagatgatgatgggaaagctgagaagctagaggcgctagttgctgcggttaataacaacgagagcagtcacatcattcatgttcctgctggtcctaatgctctctctgatgtgcttataagtactcctattttcactggtgatggtgagggtggaagtggatttgcagcagcagctgcagcggctgccgctggtggagtgtctgggtttgactttggtgtagatcctaatttggatcctgaacttgctctagcactccgagtttcaatggaggaggaaagggcgaggcaagaagcagctgcaaagaaggctgcagacgaaactgctacacaagagaaaggagaaacttcccaggatgttactatggctgaaaatgtcaatgctggaactcctgaacctgaaaacaaggcaactgatctgatggaagatgagaatgccttgttacagcaagcccttgcaatgtcgatggatgatgcttcctctaatgttgctacacgagacactgacatgtcggaagcggcttccgaagatcaagacttagcacttgctcttcaattgtctgtgcaggacagcacaaatgatcagtcaagtcagacagatatgagtaagctgttggcagatcaatcttttgtgtcatcaatccttgcctcacttccaggcgttgatccaaatgatccctcagttaaagatttgcttgcttccatgcaaggccagtcggagaagaaggacgaggacacggacaaggaacagaaagaagagaagaagtaataatgcgtacaagtatgttcagctgaggcaaagaagttcagatggtaatgaggtatgggtgctgctgaaattgcttattggaatggggattattatgcctgtggaaaaggactgtatcttgttacaattgagggattcattgaatcgttctttctttaaaatatactgttaagattatggaactcttcagatagcttgatttgttgcttccagatgatttgtatttatttctcaaagaaagaaagaacagatctgcctagccaagtgttcatctttgattcgtagtaagacccaatgttcaacta

SEQ ID NO: 1354 - DNA, 1468 bp, Chenopodium quinoa
aaaactccttcgtcactgaaatcttcttcttcgatctctcaattataggattttctctcctcttctcaatctggtgctcgaggcgactatgatctgcattgataattcggagtggatgcgtaatggtgattactcgcccaccagatttcaagctctttctgatgctgttaatctcatctgcggcgctaaaactcagtctaatccggagaacactgtcggaattctgactatggctggaaaaggtgttcgtgttttggtcactcccaccagtgatcttggaaagatattggcttgtatgcacggactggaagttggtggtgaaatggacttggctgctggaattcaggtggcccaattggctcttaaacatagacaaaataaaaaacagcaacaaaggatcatagtttttgctggaagtcctgtcaaatatgacaaaaaagtattggagatgattgggaggaagttgaaaaagaacagcgtggcccttgatgttgttgattttggtgaagatgaggaagggaagtcagagaaacttgaggccttagtttctgcagtaaataacaacgaaaccagccatattgtccatgtgcctccaggtgctagtgccctgtccgatgtgctgataagtactcccatatttactggagatggggaaggaggaagcggttttgctgctgctgctgctgcagctgcagctggtggtgtttctggatttgatttcggtgtagatcctaatttggatcctgagctggctcttgcccttagagtttcaatggaagaagagagggcaaggcaagaagcagctgcaaaaagggccgcagaagaagaaactagacaagaaaaaggaggggaacaaagctcccaagatacaattatggggaaagtagcaatgctgcaaattccgaagctgataagaaaaatgacatgactgaggatgatgagaatgccctactacagcaagcactggcaatgtcaatggatgaccctgcctccactacagctgtacgagatactgatatgtcagatgcagctgacgaccaggacttgcaacttgctcttcagctctcggtagaggagggtgccaaagaatcaacaagtcagtcaagtcagacagatatgactaaattgctggcagaccagtcttttgtttcatccattcttgcttcgcttcctggagttgacccaaatgatccctcggtgaaggatttgttggcttctatgcacaatcagtctgagaagaaggatgaggataagccaccaagtgaagaggagaaaaaatgatgcaatctctttgtcaagtcgaattaatggtctctggtagcttgtaatatggctttgtatttttcacttaaaaagggaaggtcacgttatgatctaaaagttgcttatatagcatgaagagcttcaacaatgtttttagtcccatgccaagtctgtgaagcactgagacaatgtgcatttcttcatt

SEQ ID NO: 1355 - DNA, 1541 bp, Flaveria ramosissima
caagaaaacagatatcgtcttcagcaagaaaaccatcgattcatctaataaactctgtaatcgctctcacgatttactcccttcattcttcaatcttccacaatggtgctcgaggctacgatgatctgcatcgacaattcggaatggatgcgcaacggtgattacgcacccactaggtttcaggctcaagccgacgccgttaatctgatctgtggcgctaaaacccagtctaatccggagaatactgtgggcatattgacaatggctggcaaaggtgtccgtgttctggtcactcctactagtgatctgggcaaaatcctggcttgcatgcatggattagaaataggtggtgagatgaacttggcagctgggattcaggttgctcagttggcgttgaagcatcgccaaaacaaaaagcagcaacaaagaataattgtgtttgctggaggtcctgtaaaatatgacaagaaagtgttggagatgattggaaagaaattaaaaaagaacagtgttgctcttgatgttgtgaactttggtgaagaagatgaatctaagacagaaaagcttgaggcccttgttgctgctgtaaataataatgacagcagtcacattgttcatgttccagctggatcaaatgcactctctgatgttcttttgagtactcctatctttactggcgacggagaaggtggaagtggttttgcagcagcggctgcagcagctgcagctggtggtgtatctggttttgattttggtgttgatccaaatctggatcctgaacttgcacttgctcttcgtgtttcaatggaggaagagagagctagacaagaagcggctgcaaaaaaggctgcagatgattcttcaaagcaagggaaagaaggggagtctacatcacaagatgcaactatgtctgaaaatgttggtgcttcagcttctgaatctgagaataaaaaagatgatttgatggatgatgagaatgcactgctacagcaggctcttgctatgtcaatggatgatcctgctgctactgttaccacaagagacactgatatgtcagaagcagctgcggatgatcaagatttggcacttgccctacagtactctatgcaagaagacacaaaagatcaatcagatgtgggcaaactgttggcagatcaagcatttgtgtcgtcaattcttactaacctcccaggggttgacccaaatgatccttcagtcaaagagttgcttgcttctatgcaaactcagccagagaagaaagacgaagatgacaaagcacccaaggaagatgacaagtgatcttatatgttcttatattcagtataaccccaggctactgtatttggtggaggatgaagtgcaaaacaggatagattacaatgtacgaaatgctattcttgttaccatggacttgttttacttttggtgcttgtttatcgactttagtcatggtacttggataatcaacttcttcctttagtttcatgtttgtatgttttaaaatggtgaatttatttcgtctttgatgaaataaaggttat

SEQ ID NO: 1356 - DNA, 1461 bp, Flaveria ramosissima
aatcttccacaatggtgctcgaggctacgatgatctgcatcgacaattcggaatggatgcgcaacggtgattacgcacccactaggtttcaggctcaagccgacgccgttaatctgatctgtggcgctaaaacccagtctaatccggagaatactgtgggcatattgacaatggctggcaaaggtgtccgtgttctggtcactcctactagtgatctgggcaagatcctggcttgcatgcatggtttagaaataggtggtgagatgaacttggcagctgggattcaggttgctcagttggcgttgaagcatcgccaaaacaaaaagcagcaacaaagaataatcgtgtttgctggaggtcctgtaaaatatgacaagaaagtattggagatgattggaaagaaattaaaaaagaacagtgtagctcttgatgttgtgaactttggtgaagaagatgaatctaagacagaaaagcttgaggcccttgttgctgctgtaaataataatgacagcagtcacattgttcatgttccagctggatcaaatgcactctctgatgttcttttgagtactcctatctttactggcgacggagaaggtggaagtggttttgcagcagcggctgcagcagctgcagctggtggtgtatctggttttgattttggtgttgatccaaatctggatcctgaacttgcacttgctcttcgtgtttcaatggaggaagagagagctagacaagaagcggctgcaaaaaaggctgcagatgattcttcaaagcaagggaaagaaggggagtctacatcacaagatgcaactatgtctgaaaatgttggcgcttcagcttctgaatctgagaataaaaaagatgatttgatggatgatgagaatgcactgctacagcaggctcttgctatgtcaatggatgatcctgctgctactgttaccacaagggacactgatatgtcagaagcagctgctgatgatcaagatttggcacttgccctacagtactctatgcaagaagacacaaaagatcaatcagatgtgggcaaactgttggcagatcaagcatttgtgtcgtcaattcttactaacctcccaggggtcgacccgaatgatccttcagtcaaagagttgcttgcttctatgcaaactcagccagagaagaaagacgaagatgacaaagcacccaaggaagatgacaagtgatcttatatgttcttatattcagtatagccccaggctacaggttactgtatttggtggaggatgaagtgcaaaacaggatagattacaatgtacgaaatgctattcttgttaccatgggacttgttttacttttggtgcttgtttatcgactttagtcatggtacttggataatcaacttcttcctttagtttcatgtttgtatgttttaaaatggtgaagttatttcgtctttgatgaaataaaggttatggg

SEQ ID NO: 1357 - DNA, 1534 bp, Cucumis melo
ctccttcagttcaattaccttccggcttctgctgcaagaaacctcttctcttctctccgattctctctttctccttccttttctttcctgttttcaatctatcaacaatggtgctcgaggccacaatgatctgtatcgataattccgaatggatgaggaacggtgattatgctccttccagattccaagctcaagctgatgccgtcaatctcatttgcggagctaaaacccagtctaacccggagaatacagtaggagttcttacaatggctggaaagggagttcgggttttggtaactcctacaagtgatcttggcaagattctagcgtgcatgcacggtttagagattggtggagagacaaacttggctgctgggattcaggtggctcagttggctctgaagcatcgtcaaaataagaagcagcaacaaagaattattgtttttgcaggaagtcctgccaatcatgaaaagaagttgttggagatgatcggaaagaaattaaaaaagaacaatgttgctctagatattattgactttggtgaagaagatgatgctaagccagagaagctggaagcccttctttcggctgtaaatagcaatgactccagtcacattgttcacgttccatcaggtccaaatgctctttccgatgtacttattagtactccaatcttcaccggtgatggggagggaggaagtggatttgtcgcagctgctgctgcagcttcagctggtggggccggttttgattttggtgtggatcccaacctagaccctgaactagcacttgcacttcgagtgtcaatggaagaggaaagggccagacaggaggcagctgctaagagggctgctgaggagacttcaaagcaggaaaaaggaggggaacagccatctggctcacaggatacaactatgaatgaacgtgctagtgctgaatcttctgatgctcagaagacaaatgatccaatggaggatgaaaatgccctgttacaacaagcccttgcaatgtcaatggaagatcctgcctcaagtgacattcgggatacagaaatgtcagatgcagcaatggatccagagttagctcttgctcttcagttgtcagtgcaggaggaatctaaagactcaacaaaccagcccgatatgagtaaattactggcagaccagtcgttcgtatcgtccattcttgcatcgcttccaggggttgatccaaatgatccatcagtaaaagatttactagcttccatgcaaagtcaatcaaagccggaggacaagaagaacgaagaaaacccaccgaaggaagacgacaagtaatcaaatccatcttccaaagttgaatatctctgctaggcatttgtatttctccccataaaagtgttgcattgtgtgttttgatcatctgcaaacaagcgaatatgcatcactttgatgtctaaaaagaaaagtgttgcccttgatcttttaatttgtactatgatattatatacgcttcagtcttaattcaactctcgtttccttttctacaaaaaaaaaaa

SEQ ID NO: 1358 - DNA, 1677 bp, Populus trichocarpa
tagcgatcacactttaatcccagtgtcccctttcacaagtaaactctgtttcctctcctatctctctgctgttctcataaaccgaaacgacgagtagccctccctctctcccgccgtaaccatggttctcgaggcaacaatgatttgtatcgataattcagagtggatgcgaaatggtgattactctccgtcaagatttcaagctctatcagatgctgttaatctcatttgtggagctcaaactcagtcgaatccagagaacacggttggaattcttacaatggctggaaaaggggttcgtgttttggttacacctactagtgaccttggcaagatcttagcttgcatgcatggtctagaaataggtggtgaggtgaacttggttgctggtatacaggtggctcaattggctctcaagcatcgtcaaaataaaaagcagcaacaaaggattattgtctttgttggaagtcccatcaaacatgacaagaaggtattggagatgattggaagaaagttgaaaaagaataatgtagcacttgatattgttgatttcggtgaagaaggtgatgggaaggcagagaaactggaagcacttcttgctgctgtgaacagtaatgacaccagccatattgttcatgtcccccctggtccaagtgctctttctgatgtgcttataaatacacctatcttcactggggatggggaaggtgggagtggttttgctgctgcagcagcagctgctgccgctgatggtgtctctggttttgagtttggggtggatcccaatcttgatcctgaactggcgcttgctcttagagtttcaatggaagaggagagggccaggcaagaagcagctgctaaaacggcagcagaggaggctgctaaacaagaaaaagcaagggaacaaccatctagctcacaggatgcaacaatgactgaaaataacagtgtcccagctcctgatgcttacaataaaaaaaatgagttaatggatgaggagaattctctgctacaacaggctcttgcaatgtcgatggatagccctggctctagtcatgatgtgagagatatggatatgtctgaggcaaccacagatgacccaaagttggcaccagctcttcaattacctatgcaggacagttcaagggattcatcaagccagatggatataagtaaattgttggctaatcaatcttttgtgtcctccatcctagcatcacttccaggcgttgatccaaacaatccttcagttaaagatttgcttgcttccatgcaaagccaatccaagccccaagagaagaaggatgaagacaaacagccaaaggaggagaagtgatatttctatattgctttctcatgccaggttttagtctctgaatttacccatttcaggatctgttgtcagctttcggagagatgcttccattcttaagggcattaaaccggtctattaaagcttaccagtcatcaagctttctagctgacttttaaaggtccgaaagctcgtcattctggttgtgtacatgcatgttttcattatacggtttaatcttgagagggcactagaaggacagacattatacgattgccaaagaacatcgaaatgttctttctattgtttcattatccaaatgaaggaaactgtaatttgtatctgatgttgtttcgttctttcgc

SEQ ID NO: 1359 - DNA, 1803 bp, Rosmarinus officinalis
ggccggggggaccaaaccggaaataaaaactgtatgtaagaaaccctctctatttaaaaaagtgtatattttctgcccctcttccaagtaaccccaaattctctcacaaaacaattctactaatttctcctcattatttagctgtccatagttcgattccaataccaattcgctgcaatcatggtgctcgaggctacgatgatctgcatcgataattcggagtggatgcgtaacggcgactactcccccactcgcttcgacgctcagaaggacgctgttagcctaatttgtggagctaagacgcagaataatccagagaatacggtgggagtgttgacaatggccggaaaaggggttcgtgtcttggtcactccgaccagtgatcttggcaagatcttggcctgcgcacatggtgtagaagtaggtggtgagatgaacttggcagctgggatccaagttgcacagttggccctcaaacatcgccaaaacaagaagcagcagcaacgaataattgtgtttgtgggaagtcctgttaaatacgacaagaaggtgctggagttgattggaagaaaattgaaaaagaacagtgtagctcttgatattgtaaactttggtgaagcagatgaagagaagacagagaagcttgaggcattacttgctgctgtaaataacaacgatagcagtcatattgtacacattcctcctggtcccagtgctctttcagatgtgcttatcagtaccccgatatttacaggtgatggagaaggagcaagtggctacgttgcagctgcagctgctgctggtggtagcgggtttgagttcggcgtggatcctaacttggatcctgaacttgctcttgcacttagagtatcaatggaagaggagagagcaagacaagaagcagccgcaaagaaggcttcagaagaagctgctgcaaaaggggagcagcaatccacttcacaggatgcgaccatgaccgagaatgtgaaccctggaacatctgaacctgaaaagaagacacatgatctaatggatgatgagaatgcattgttacagcaagccctagctatgtccatggatgattcttcgtccaaagttgctgtgagggacactgatatgtcggatgcatctgctgatgaccatgatttgcaacttgctctgcaattgtccgtgcaagatagtcaaggtgatcaatcaaacccgaacgatgcgaataaaatattagcagatcaatcctttatgtcctccatgctggctcaacttccaggagttgatccgaatgaccccgccatcaaagatttgcttgcttccatgcagaatcagtctgagaagaaggaagaaggcaaagaaccagaggaagaggaaaagaagtgaacatgcgccttcaggtcaaggggatctcttatgcagaaagtgatgagaatcgttcaagtgggcactcggggtgatgatattttgttgccagtcagagcaatatgccatgaaccatctaatatatggtgaagaatacatgttatgaactgatctagcattacctagtgaacttggatgtcaaaattgttgcattttaattcaaatggtattgttgatggatctatggcttggcttattcaatctttatgtggaactcttttcttctttgcctagtttgtgtccggattcgttgttgtcctttttgtgcatcttagtcgtggaagggcacttggtggtgatatctttcctataattttcactgattttgcctgcttccctgtcttaactgagatgcactgcttcagaagtttcttagattccaagtgtgtg

SEQ ID NO: 1360 - DNA, 1970 bp, Mimulus guttatus
acggacccctctctataaaccatttcagaatccctttctgcaagtaaatctcaaaaatccttccctacacaagtgtacgaatcaagagggtttcatcttctcactcttcaaaaacatttcctttattcacattaatctttcgattaatcatggtgctcgaggcgacgatgatctgcatcgataattcggagtggatgcgtaatggcgattaccctcccaatcgatttcaggctcaggccgacgccattagcctaatttgtggcgctaaaactcaatccaatccggagaatacagtgggagtgttgacaatggctggaaagggggtgcgtgttttggtcactccgactagtgatcttggaaagatattggcttgcatgcacggtctagaaataggtggcgagatgaatttggcagctgggatccaggtcgcgcagttggctctcaaacatcgccaaaacaagaagcaacaacaaaggataattttgtttgctggaagtcctattggttatgagaaaaaggtgttggagttgattggaaagaaattgaaaaagaacagtgtagctcttgatattgtaaattttggcgaagaagatggcgaaaagtctgagaagattgaggcgttgctttctgcggtaaataacaatgacagcagccatattgttcacgttgctcctggtccaagtgctctttctgatgtgcttatcagtaccccaatctttactggtgatggagagggaggaagtggttttgctgcagctggtggagtatccgggcttgactttggtgtggacccaaatgtggatccagaacttgctcttgcactccgagtttctatggaagaggagagggcaagacaagaagctgctgcaaagaaggctgccgaagaagctactaaacaggaaaccggagaagggcagtctgctccacaagatgcaactatgactgaaagtgcaacttctatacctgaaaaaaagacaaacgatctaatggatgatgagaatgcattgttacagcaggctctggcaatgtccatggacgatccttcctcctctgctgttgttagggatactgacatgttagacgcatctgctgatgatcatgatttgcagctcgcccttcagttgtctgtagaagaccgtgcagtagatcaatcgaaccagacagatgtgaacaaacttttggcagaccaatcttttgtgtcttccatcctggcttcacttccgggagtcgatccaaatgacccgcatgtgaaagatttacttgcttccatgcagaatcagtctgagaaagaggatgaagacaagggttcgaaagatgaagataagaagtgaagatgctctagttattaatctctactgtcaggtgcaacatctagctttacccaaacttatattctgagcttatacgacaacacggaaatttttcatttgaattaatttgttaaatgtaactggtatcatatttttaatttctgtttatcgagtgttatgccactagttgtcatgcaaccaagtggggtttaatcggttgagctaaatgggtaaacttgtatttgcaacggttcagcaatctttttctacgcatgcagaattctcccaagtggttctagtttgcacagaaactgaagattggagtttgccatgagcaatcttgttatgttcttatatggagagcttgctgtgaattgatgtacaacccatgaacttgggaatttagatattgttcattcatcggtattttgtcgaatattacgacatttggaaatatgcatatgacatcgcatgtgtttgcttagttaatgactttatattactgcatgctgtcctattctctctttttatttttggtaaattacgaaaacccccatgaacttaggctacataacaaaaaacaatcccacctatccgtaataaccaaaatccccctctgattaactgttgatcgagttttttaacagaaaatgtgtacag

SEQ ID NO: 1361 - DNA, 1568 bp, Trigonella foenum-graecum
acctccatcgcaagtagtaccttcaattctttcatctctctcgttcagaaaaaaaaagtgttctctccttctaaatctcgcttccgaatttcttcaactttccaacaatggttctcgaggcgacaatgatctgtatggataactctgaacatatgcgtaacggtgattactctcctactcgatttcaagctcaatccgacgctactagtctgatttgcggtgctaaaactcagtctaatcctgaaaatacggttggacttattaccatggccgggaagggcgttcgggttttggctacccctaccagtgatttgggcaaaatcttgggttgtatgcatggtctagaaataggtggtgagatgaacctagctgctgccattcaggtggcacagttggctcttaagcatcggcagaataagaagcagcaacaaaggatcattgtcttctgtggaagtcctgtcaagcacgagaagaaaatgttggagatgattgggagaaagttgaaaaagaatagtgttgcacttgacattatcaactttggagaagaagatgaggggaagacagagaagctggaagcactccttgcagctgtaaacaataatgatagtagtcacatggttcatgttccacctggtccaaatgctttgtcggatgtacttataagtacacctatttttactggtgatggagaaggtggaagtggttttgcagctgctgccgcagcagcatctgcaggtggtgtatctggatatgattttggtgtggatccaaacttggaccctgaattggctcttgctctgagagtttcaatggaagaggagagagccaggcaggaagcagctgcgaaaaaggctgcagaggatgcttccaaacaggagaaaggtggtgagcagcaagctatttcccaggatgcaactatgactgagcgaaccagtacagaagctgaaactatggatgatgagaatgctctactacaacaggcccttgcaatgtcaatggatgatcctgctgttaaccatgatgtaagagatgcagatatgtctgaagcagctacagatgaccctgagttggctcgagctctccaattgtcagtatcagacaccaccacggacgaagtgactagattgttggcggatcagtcctttgtatctcatgtccttgcaacgcttcctggggttgacccaaatgacccatcagtcaaagatttgctggcttccatgcaaagtcagtcaaacgctcagaagaagaaagaagaggaaggaccaaatgaggagtagtaatcttgagtcattttgcagttcttatttctttctgttcctttgacagacatattggtattggtagcatgttggtatgtggttctagtgtgggcattacttcacttgcactgcagttatgagtctccctagcttattgtggaacagatgtatgtctattgattaggttaagaagccttgttgtccatgagggcattaagcgagaacatacatatatacattgttttatggtgaagaatattccattgatatgttagtcaatgcatcgcaaaagtatatgaatccattttc

SEQ ID NO: 1362 - DNA, 1707 bp, Daucus carota
cacaaagccatcgcccccaaagtagcacaacataattatccatcacattcgagagttgttatatttgtagagtactatccaagaaataaaacccctctttcagctcacacacatcgaatcaaatccctcttattaatctccaagccaattatttttctcaattttactaattcgcttcatcaaaatggtgctcgaggcgacaatgatctgcgttgataactcggagtggatgcgcaacggtgattattcgccttccaggtttctagctcaagctgatgctgttaatctcatttgcggtgccaaaactcagtctaatccggagaatactgtgggagtgttgacaatggcggggaaaggggttcgtgttttggtcactcctactagtgatcttggaaagatcttggcgtgcatgcacggtcttgaaattgggggtgagatgaacttggctgcgggaattcagattgctcagttggctcttaagcatcgccagaataagaagcagcaacagagaattatcgtgtttgttgggggtccagttaagtatgataaaaaggttcttgagatgattggaagaaagctgaaaaagaacagtgttgcacttgatgttgttaactttggggaggaggatgatgataaaacagagaagcttcaggccttagtttctgctgtaaacaataatgatagtagtcacattgttcatgttcctgctggtgctaatgctctttcggatgtgcttataagtactcctatatttactggtgatggagaggggggaagtgggtttgcagcggcggcagcagcagctgcagctggcggtgtatctggctttgattttgatgtggatcccaatgtggatcctgaacttgctcttgcccttagagtttcaatggaggaagaaagggctaggcaagaagaagctgctaagaaggctgcagaagaaggggcacagacagagaagacaggagaacaagcatccacttcgcaagatgtaaccatggcaggaactgctgctcctacagcttctgaaactgagaataaggcggttaatttaatggatgatgagaacgcactgctacagcaggcacttgcaatgtctatggatgaccctgcagcttctgctattatgagagacacagatatgtcagaggctgccgctgatgatcaagacttggcacttgctcttcagttatctgtgcaggggggtgcggaagatggatcaagtcatatggacatgagtaatgtgttggcggaccagacgtttatgtcaacgattctttcatcactcccaggagttgatccgaatgacccgtctgttaaagagttgcttgcttccatgcaaaatgcaagtgagcctgagcataaaaaagatgaggacaacaaaccaggagaagagaagtaaaatcctgtagcatatgcctgaccacaggtctcagttaagctacagtgccgcctctagaaaaggaatgcttgttactgccgttaatgaacaataatagagactaaaagccgattcttgtattttctagtgttactctgttgatgtaatttgggatcatgatactattttaatttgtggtgctgatatgtgatctttgttgctataaacggtctggtaacaagagccagaaaagtgtatctcgtcctagattgaagaattttattgcatttcacgagcacaaagtatagtacctagtgacaattcttagt

SEQ ID NO: 1363 - DNA, 2166 bp, Aristolochia fimbriata
cctatcccctgtgtgccttggagcccatttgtgaaattacgtttcttttcaaaaataccaaaacgcccacacccatttattagcaaaatctagccttctttcccaagtagaagttcgttctagactcaattttcttccttctcactcattccccctcgccgctgcaaccatggttctcgaggcgacgatgatctgtatcgacaattcggagtggatgaggaatggggattattcgccgacaaggtttcaagcgcaagccgacgctgttaatcttatctgcggagctaaaacccagtctaacccggagaatacagtcggtgttttgactatggctggaaaaggagttcgggtgctggtcacgcccactagcgatctaggcaaaattctggcgtgcatgcacggcctggagattggtggtgagatgaacttgacagcaggcatccaggttgctcagttagcccttaagcaccggcaaaacaaaaaacagcagcagagaattatagtttttgctggaagtccagtcaaatatgacaagaaagtattggagacaattggaaaaaagttgaaaaagaatagtgtagcccttgatattgttgattttggtgaagaagatgatggtaaacatgaaaagcttgaggcccttattgctgctgtgaacaacaacgacagcagccatattgttcatgttccttcaggccaaaatgcactttctgatgttctcttaactactcctatattcacaggagatggagaaggaggaagtggttttgctgcagcagctgcagcagctgctgcaggtggtggtggttttgattttggtgtagatccaaacttagatcctgagctggcgcttgctcttagggtttcaatggaagaggagagagcaaggcaggaagcggcagctaaaaaggctgcagaagaagcttcaaggcagggaaaagaaggggaacaggcatcaagttctcaggatgccaccatggctgaacctgttagtgcttcagatcctgctgataataaaagaaacgagctaacggattatgaaacagctttactagagcaggcccttgcaatgtcaatggatgatcctagatctagtcaatctgagggtggtgctgtgggagacacagatatgtcagaggccacagcagaagatcaagaattagcttttgctcttcagatgtctgtgcaggacagtgcgaaagaccagccctcccagtctgaaatgaacaaagtcttgggcgaccagtcttttgtaacatccattcttgcgtcgctccctggagttgaccccaatgacccttcagtgaaggacttacttgcatctttacaaggtcaatcagagcaaaagaaagatgaagatcaaccacctaaagaagaagataaatgatggtctactccgcctgcagctgcatggactggacatgatggtctgctcaaccttgtgtcatagatttcaaagaacttttcccagttgtagaccaaattgaagagttgatgtcatttctatcgaggaatggggattggactttgttcaggtgtttgaacgctttatgttgattttcaacgtgctctttgttgttaatcatactacttgttctggcgtctcttggcaggtgatggcggtcagtgctctatgttgagcttattatatttactccatgtttgggtaatactgaaagaatgtttgcttgatgaaacaagtagttcaatttatatggataagagtacgagcggcggaatgctttacagcaccaatattctaaccatccacatacgaatccgaccgacatgtcgtgaaataaagcgcgtctttccgctcatactcgaaaattgtgtttaaacatctcgaaaattgacaggcagcacgagagtcgaacaaaaagagtcgtaagaaaatagatttctagttttgtaagctgggtttctctatttatgaaagcatagtaattaagaaattttttgaggaaatatgaaatgaattttcgatagagagcatatcaaagactataataaacgaatatgattaaaaatcttgagataaaattataattaggggatataaaattctactgtaaagtaatataaaattataaatttaaattttgacaaaagagcaatagtaaacgaatacgaaggagtatctcaacaaataccttaaataaggaa

SEQ ID NO: 1364 - DNA, 1161 bp, Actinidia deliciosa
tagagagagacgtcctgcgactgaatcactccatccgattatcttcaaatctccaatcatggtgctcgaggcgacgatgatttgcattgataattcggaatggatgcgaaacggcgattactctcccacaaggtttcaagctcaaaccgatgctgttaatctaatatgcggagccaaaactcagtctaatccggagaatactgtgggtgttatgacaatggcgggcaaaggggttcgtgttttggtgactcctaccagcgatcttggaaagatcttagcttgcatgcacggtttagaagttggtggtgagtgtaacttggcagcagggatccaagtggcacagttggctctcaagcatcgccaaaacaaaaagcagcaacagaggattattgtatttgtggggagtcctgtcaaatatgacaagaaggtattggaaatgattggaagaaagttaaaaaagaacagtgtagctcttgatattgttaattttggtgaagaagatgaggggaaaactgagaagctcgaggcccttcttgctgctgtaaacaataatgacagcagtcacattgttcatgttcccactggcccaaatgctctctctgatgttctgataagtactcctatctttactggggatggtgaaggtggaagtggttttgcagcagcagctgcagcagctgcagctggtggcgtttctggttttgattttggtgtcgatccaaatctggatcctgaactggctcttgctctccgagtttcaatggaagaggagagggcaaggcaagaagcagctgctaaaaaagctgcagaggaagctgcaaaacaggaaaaaggaggggagcagcaatccacctcacaagatgcaactatgactgaaaatgttagtgctgcagctccagaagctgaaaataagacaagtgatctaatggatgatgagaatgctttgctacagcaggctcttgcaatgtcaatggatggccctgctgctagccttgcaatgcgagacacagacatgtcagaggcagctgcagatgatcaagacttggcacttgctctacagttgtcggtgcaggacagtacaaaagatcagggtagcgagacagatatgagtaagctgttggcagaccaatcatttgtgtcgtcaatccttgcttcgcttcc

SEQ ID NO: 1365 - DNA, 1489 bp, Medicago truncatula
aagcaccttcaattcaattctctcatctttcagaaaaaaagtgttctctactctttcaaatctcgtttccgaatttcttcaactttccaacaatggtgctcgaggcgacacttatcattatggataactctgaacatatgcgtaacggtgattactctccttctcgatttcaagctcaatctgacactgttagtcttatttgcggtgctaaaactcagtctaatcctgaaaatactgttggagttatgactatggctgggaagggagttcgagttttgtctacccctaccagtgatttgggcaaaatcttgggttgtatgcatggtctagaaataggcggtgagataaacctagctgctgccattcaggtggcacagttggctcttaagcatcggcagaataagaagcagcagcaaaggattgtcgtcttttgtggaagtcctgtcaagcatgagaagaaaatgttggagatgattgggagaaagttgaaaaagaatagtgttgcacttgacattgtcaactttggagaagaagatgaggggaagacagagaagctggaagcactccttacagctgtaaacaataatgatagtagccacatggttcatgttccacccggtccaaatgctctgtcggatgtacttataagtacacctatttttactggtgatggagaaggtggaagcggttttgcagctgctgcagcagcagcatctgcaggtggtgtatctggatatgattttggtgtggatccaaacttggaccctgaattagctcttgctctgagagtttcaatggaagaggagagagccaggcaggaagcagctgcgaaaaaggctgcagaggatgcttccaaacaggagaaaggtggtgagcagcaagctacttcccaggatgcaactatgactgagcgaaccagtacagaagctgagcctatggacgatgagaatgctctactacaacaggcccttgcaatgtcaatggatgatcctgcagttaaccatgatggaagagatgcagatatgtctgaagcagctacagatgaccctgagttggctcgagctctccaattgtcagtatcagacaccaccacggacgaagtgactagattgttggcggatcagtcttttgtatctcatgtccttgcaacacttcctggggttgacccaaatgacccatctgtcaaagatttgctggcttccatgcaaaatcagtccaacgctcataagaagaatgaagaggagggaccaaatgaggagtagtaatcttgagtcattttgcttttcttatttctgttcctttgacagacacattggtattggtaacatgttggttggtggttctaatgtgggcattacttcacttgcactgcagttatgggtctccgtagcttattggaacagatgtatgtcttttgaataggttaagaagcctgttatcaatgaaggcattaagcgagaacatacgtatacattgttttatggtgaag

SEQ ID NO: 1366 - DNA, 659 bp, Arabidopsis lyrata
aaggaagcaaaagagtttgatttcgtcgtcgagcttgcgatcttcagcttttcaggcgacgtcgttgtgattctaatcgttttccggtaaaattgatttcggaggctattcgatggcttacgtcgaccatgcgttctcaatatcggacgaagacctaatgattgggacttcgtacaccgttagtaatcgaccaccggtgaaggagatctcactcgcggtggctctactcgtattcggaaccctaggaattgtttcaggtttcttcatggcgtataaccgagttggtggtgatcgaggtcacgggattttcttcattgtactcggatgtcttctgtttatcccggggttttactatacacggattgcatattacgcttacaaaggatacaaaggtttctccttctcaaatataccatccgtttaagccttatgactcggtgtctcttctctcttcttactcaatgtataggttgttttcgcttatattgcttttaaaccagtgacttattctctttagtgtgagtttacatgacttgaatgacccatgtttgatatatgtgtatctcttttggtttctctttctctatgttagatcattaatcttcgataaccatccttgtaaaatatagaacaagctaatcacacgtgatgtaattggt

SEQ ID NO: 1367 - DNA, 678 bp, Eutrema halophilum
tcaagattgaaattaaacgacacgtagttctcgtttaaataacaaatccggcgagacttggctgcttaagcgatgcgattactatcaatctccgtcgtcttcgagctcgcgatctttagcttccacgcgacagaacccttcaaattgacgtcgatttggttccgactgttttccggtgaagttgattcagagggtattcgatggcatacgtcgaccacgcgttctcgatatcggacgaggacctaatgattgggacttcgtacaccgtcagtaatcgaccgccggtgaaagagatctcactcgcggtggctctcctcgtgttcggaaccctaggaattgtttccggtttcttcatggcgtacaataaagttggtggtgatcgaggccatgggatcttcttcattgtcctcgggtgtcttctgtttatcccagggttttactatacacggattgcatattacgcttacaaaggatacaaaggtttctccttctcaaacataccatcggtttaaccccttatgaatcctcggtctcttctctcttactcgatgtataggtggttgtttctgagggcaggttttattttgcttaaaagcaatgacttcttctctttagtgtgattttaatttttaacattacttgaatgatccatgtttgatatgtatctctagttttagt

SEQ ID NO: 1368 - DNA, 690 bp, Brassica oleracea
aagcgacacgtagttctcgtctagatagcacatccggcaagacttggttgctttaatgaaaccatactcaatctgcatcttccgcattaactcaaaaaggaagcaaaagtttttgattttgtcttcaagttaacatcgctgtgattctaatctttctctggtgaattcgattcgaagtagctagctatatggcgtacgtggaccacgcgttctcgatatcggacgaggacctaatgattgggacttcgtacaccgtcagcaatcgaccgccggtgaaggagatctcgctggcggtgtctctcctcttgttcggaatcctgggaatcgtctccggtttcttcatggcgtacaaccgagtcggcggcgatcgaggccacggtatcttcttcatagtcctcgggtgtcttctgtttatcccgggcttttactatacacggatcgcatactacgcatacaaaggatacaaaggtttctccttctcaaacataccctccgtttaacacggtctcttctttcttactccatgtatagtactgagggcaggtttttaatattgcttaatgactagtgtgatgatgtttacatgacttgaatgatccctgtttgatatgtaatctcttttaatttctcattctctatgtaaacatatactactttgtccgtgttagaaaaaaacatgaaatgcaaaac

SEQ ID NO: 1369 - DNA, 590 bp, Brassica napus
accttcaagttaacatcgctgtgattctaatctttctctggtgaattcgattcgaagtagctagctataataatcaatggcgtacgtggaccacgcgttctcgatatcggacgaggacctaatgattgggacttcgtacaccgtcagcaatcgaccgccggtgaaggaaatctcgctcgcggtgtctctcctcttgttcggaatcctgggaatcgtctccggtttcttcatggcgtacaaccgagtcggcggcgatcgaggccacggtatcttcttcatagtcctcgggtgtcttctgtttatcccgggcttttactatacacggatcgcatactacgcatacaaaggatacaaaggtttctccttctcaaacataccctccgtttaacacggtctcttctttcttactccatgtatagtactgagggcaggtttttaatattgcttaatgactagtgtgatgatgtttacatgacttgaatgatccctgtttgatatgtactctcttttaatttctcactctctatgtaaacatatactactttgtccgtgttagaaaaaaacatgaaatgcaaaacaactagttttag

SEQ ID NO: 1370 - DNA, 720 bp, Raphanus sativus
ggaactcatggaacccagcaaaagtgattgatttcgtcttgttcaacctttgcgatcttcagctcttctcacgccacaaaaccccttcaaattgacatcgttctgatcttgaattcgattggaagtagctatactattaaaaaatggcgtatgtggaccacgcgttctcaatatcggacgaggacctaatgatcgggacttcgtacacggtgagtaatcggccgccggtgaaggagatctcgctggcggtgtctctcctcttgttcggaatcttgggaatcgtctccggtttcttcatggcctacaaccgagtcggcggcgatcgaggccacgggattttcttcattgttctgggttgtcttctgtttatcccgggcttttactatacacggattgcatactacgcatacaaaggatacaaaggcttctccttctcaaacataccctccgtttaacacgaacgcctatgtctcttctttcttactcaatgtatagtactagtagtagtagtagtaggtggtggttgtttctgatggatggcaggtttttaatgacttcttctctttagtgtgatatttgtttacatgacttgaatgatcgatccgtgtttgatatgtaatctctctttttataatttctcattctctatgtaaacatatactactttaccctcccatgcaaaatcatgaatgcaaacactatagctttagttgatgatac

SEQ ID NO: 1371 - DNA, 726 bp, Brassica rapa
acgacacgtagttctcgtgtagatagcatatccggcaggacttgggttgctttaatgaaaccatactcaatctgcatcttccgcattaactcaaaaaggaagcaaaagttttagatttcgtcttcaagttaacatcgctgtgattctaatctttctctctggtgaagtagctagctatggcgtacgtggaccacgcgttctcgatatcggacgaggacctaatgattgggacttcgtacaccgtcagcaatcgaccgccggtgaaggagatctcgctggcggtgtctctcctcttgttcggaatcctgggaatcgtctccggtttcttcatggcgtacaaccgagtcggcggcgatcgaggccacggtatcttcttcatagtcctcgggtgtcttctgtttatcccgggcttttactatacacggatcgcatactacgcatacaaaggatacaaaggtttctccttctcaaacataccctccctttaacacgctctcttctttctttctttctccatgttgtatagtagtagtaggtggttgttgtttctgagggcagttttttaatattgcttaatgactagtgtgatgattgtttacatgacttgaatgatcccatccctgtttgatatgtaatctcttttaattttctcattctctacgtaaacatatactactttgtccgtgttagaaaaaaaacaactagtttttagttgatgatacaaaa

SEQ ID NO: 1372 - DNA, 511 bp, Cleome gynandra
tcggggtactaacattccctcgacatagagctgattccatctctctaaatcggtccgattatcttccggtgagcttgatccggcgccgtcaatggcttacgtagaccatgcgttttcgatttcggacgaagatctcatgatcgggacttcatacgccgtcaataaccgacctccggtgaaggagatctctctcgccgtcgctctcctcgtgttcggaaccctaggtattgtccttggcttcttcatggcgtacaaccgagtaggcggtgaccaaggccacgggattttcttcgtggtactaggctgtattctgtttatcccggggttttactatacaaggattgcttattacgcatacaaaggatacaaaggcttctccttttcaaccataccgtctgtttagcattcgaagataacatccaaatctctcatgttcattgtatatattccaacactatgttttacagtagctttagcttagatgatgagtcttgtcctttttttcttatat

SEQ ID NO: 1373 - DNA, 670 bp, Eutrema halophilum
acagtttgatttcatttcgcgagcttcgaatattccgcttttcacgctgatttcgacgtcattctggtttcttctagatcggtgcccattgatctcgatccggagctgtgtaaatggcgtacgtcgaccatgcgttctcgatatcggacgaggacatcatgattgagacttcatacaccgtcaataaccgaccgccggtgaaggagatcgcactcgcggtggctctcctcgtgttcggaaccctgggaattgtctccggcttcttcatggcgtacaatcgagttggcggtgatcgaggccacgggattttcttcatcgtcctcgggtgtcttctgttcatcccggggttttactatacgcggatcgcatattacgcttacaaaggatacaaaggtttctcattctcaaacataccgccagtttagtcctttttttttaatctctcctactcagtgtatagagatgttttattgccttaaagcaattaccggcttgtttactctttagtgtagttttacaggagttgagtccatacttaatagttaacatatataaatatcccttcttgcttctagttttcttgttaaataattgtgagtctgtgaattgtccggatttaatatttacatttctatctatctatacacccggttcagaaagagagttgttt

SEQ ID NO: 1374 - DNA, 2065 bp, Arabidopsis lyrata
aagtctgagacttgtggagtcgattaaagttgtgtgttctctctcttggtttctctattacaagagttttggttttgtgtagaagctaaatcagagatgagtaagagacctccgcctgatccggttgctgtgcttagaggacaccgtcactctgttatggacgtttcgtttcatccatcaaaacctctgcttttcactggttcagctgatggagagttgaggatttgggataccattcagcatcgtgcagtttcgtctgcgtgggctcatagtagagcaaatggggttttagctgttgcagctagtccatggttaggagagaacaagattatcagccagggaagagatggaactgtcaaatgttgggatattgaagatggtggtctatcaagagatccattactaatacttgagacaagcgcctatcatttttgcaagttctctcttgttaagaagcctaagacttctctgcaagaagctgtaagtcacttacagaattgtgatgagcaggatgatggagacacgcgtagtgttcaactgggagatgatagtgaacgatcggtggaggattctggtctgcttcaggatggagatcatgctgaaggtaccacttttgtagcagtagtaggggagcaacctactgaggtagagatatgggatatcaataccggagacaagatcatacagcttcctcaaagtagccttgacgaatcccccaatgcttctaccaaaggaagaggaatgtgtatggctgttcaattgttttgccctcctgaatcacagggtttcttacatgtcttagctggttatgaggatggttcaatgctgctttgggatatacgcaatgctaagattcctctaacaagtgtgaagtttcattctgagccagttttaagtctaagtattgcatcatcatgtgatggaggtatctcaggaggggcagatgacaaaattgtgatgtataatctcaaccattctgctggttcttgtacaatgaggaaagagattactttggaaaggcccggtgtatcgggcacctcaattcgacccgatgggaaaattgcagcaacggctggttgggaccacagaataagggtctataattaccgcaaaggaaatgctctagcaatactaaagtaccaccgagcaacgtgcaacgctgtgtcctactctccagactgtgagctaatggcgtctgcgtctgaagatgcaactgttgctctctggaaactctatcctccccataaatctctatgatcttctatatggttcggttttggtttgatttcttgacctgaatcccttgaatttgtaaatacattatgtcatcatcaaaagaacaaatgaataatacagagtaaagtaatctgtggtttgttaatggtccactttgattagttgatttgttcaaactcgcacgttctgccgttttcctagaaaagaaaaatcaaacgacgcgtagtttgcatcaccgtacgttgagtagaattcacgaccaaaagaaattgcaccaaactaatccgtcaccgtcgcaggagactcataaacatctgaagacctaaaatcaaacactgtgtaaatggcgtacgtcgaccatgcgttctcgataaccgacgaggacattatgattgaaacttcatacaccgtcaataaccgaccgccggtgaaggagatcgcactcgcggtggctttactcgtgttcggaaccctaggaattgtctccggcttcttcatggcttataatcgagttggcggtgatcgaggccacgggattttcttcatcgtcctcgggtgtcttctgttcatccccgggttttactatactcggattgcgtattatgcttacaaaggatacaaaggtttctccttctcaaacataccgcccgtttagcctcgcctttcgaacctctcctactcaatgtatagagatgttttattgctctaagcaatgatcgacttgtttttctcttttgtgtagttttataggatttgagtccagtcccttcttgctttctcgttcttcttgttaaataaattcgagtctgtgacagttagtcagatttat

SEQ ID NO: 1375 - DNA, 659 bp, Arabidopsis lyrata
actcataaacatctgaagacctaaaatcaaacagtacgattttcgattctctcgagctctagatcatccgctttctgattcaaacgtcattctgttttttctagatcgatcccgattgtttctcattgatctttgatccggaagctgtgtaaatggcgtacgtcgaccatgcgttctcgataaccgacgaggacattatgattgaaacttcatacaccgtcaataaccgaccgccggtgaaggagatcgcactcgcggtggctttactcgtgttcggaaccctaggaattgtctccggcttcttcatggcttataatcgagttggcggtgatcgaggccacgggattttcttcatcgtcctcgggtgtcttctgttcatccccgggttttactatactcggattgcgtattatgcttacaaaggatacaaaggtttctccttctcaaacataccgcccgtttagcctcgcctttcgaacctctcctactcaatgtatagagatgttttattgctctaagcaatgatcgacttgtttttctcttttgtgtagttttataggatttgagtccagtcccttcttgctttctcgttcttcttgttaaataaattcgagtctgtgacagttagtcagatttatacatacatatctatataaata

SEQ ID NO: 1376 - DNA, 689 bp, Arabidopsis thaliana
tttgcaccaaactaatccgtcaccgtcgtaggagactcataacatctgaagacctaaaattcaaacagtacgatttcatctttctcgagctctagatcaatcgtcattctgctttcttctagatcggtcctgattgtttcccattgatctttgatccggaagctgtgtaaaatggcgtacgtcgaccatgcgttctcgataacggacgaggacattatgattgagacttcatacaccgtcaataaccgaccgccggtgaaggagatcgcactcgcggtggctttactcgtgttcggaaccctaggaattgtctccggtttcttcatggcttataatcgagttggcggtgatcgaggccacgggattttcttcatcgtcctcgggtgtcttctgttcattcccgggttttactatacacggattgcgtattatgcttacaaaggatacaaaggtttctccttctcaaacataccgcccgtttaggtgtccccttttgaatctctcctactcaaaatgtatagagatgttttattactctatagcaatgattgacttgttttctcttttgtgtagttttatagaatttgagtccagtcctttcttactttctccttcttcttgtcaaataaattcgagtctgtgacagtttagtcagatttatacttacatatctataaatatacacccgg

SEQ ID NO: 1377 - DNA, 782 bp, Brassica juncea
tcacgattgaaattaaacgacacgtacttcccgtatagaaaactaatccggcgagatttggctgctttaacgaaaactatcatcaacccccgtcgtcttcgagcttccgatcttcatcttatctcacgacgaaaccctaaaatcggcatcgctgttgattctaatcgttttctggtgaagttgattcaaaagtagctattcaatggcttacgtagaccacgcgttctcgatatcggacgaggacctaatgattgggacttcgtacaccgtcagtaatcgaccgccggtgaaggagatctcactcgcggtggctctcctcttgttcggaatcgtaggaatcgtctccggtttcttcatggcgtacaaccgcgttggcggtgatcgaggccacggtgtcttcttcattgtactcgggtgtcttgtgtttctcccggggttttactatacgcggattgcatattacgcttacaaaggatatacaggcttctccttctccaacataccatccgtttaaccacccttatgaatctcgctctcttctctcccttactcaatgtataggctgttgttgtttctaatggtaggttttgtattgcttaatgacttcttctctttagtgtgatgtttgcatgacttgaatgatccgtgtttgatatgtaatctcttttgatttctcattctctatgttaggtcattattactcattagttttgtgtctttatatacctcagccgtgttaaaaaatagtcaaaacttgtcatatgtaatgattcttgtttaaa

SEQ ID NO: 1378 - DNA, 573 bp, Brassica oleracea
cgagcttcacgctgattgattcacagtcattttggtttcttctagatcttatacgattgatctcgatccacggagctgtgagaatggcgtacgtggaccatgcgttctcgatatcggacgaggacatgatgatcgagacgtcatacaccgtgaataaccgaccgccggttaaggagatcgcgctcgcggtggctctcctcgtgttcggagccttaggaatcgtctccggcttcttcatggcgtacaatcgagtcggcggtgatcgaggccacggaattttcttcatcgtcctcgggtgtcttctgttcatcccagggttttactacacacggatcgcgtactatgcttacaaaggataccaaggcttctccttctctaacatacccccagtttagtactagtccgccttttgtatctctcctcacactcatcaatgtatagagatgtttttaagcaaatgggctgactttgttttgctctctagtgtagttttagaggagagtctaagtgagtccatgtttgacatatgtatcacttcttgtttcctcattccacttgttaaataattacgcg

SEQ ID NO: 1379 - DNA, 707 bp, Brassica oleracea
gaaattaaacgacacgtacttcccgtatagaaaactaatccggcgagatttggctgctttaacgaaaactatcatcaacccccgtcgtcttcgagcttccgatcttcagcatcccaataatcggcatcgctgtggtgaagttgattcgaagtagctattcaatggcttacgtagaccacgcgttctcgatctcggacgaggacctaatgattgggacttcgtacaccgtcagtaatcgaccgccggtgaaggagatctcactcgcggtggccctcctcttgttcggaatcgtaggaatcgtctccggtttcttcatggcgtacaaccgcgttggcggtgatcgaggccacggtgtcttcttcattgtcctagggtgtcttgtgtttatcccggggttttactatacacggattgcatattacgcttacaaaggatataaaggtttctccttctccagcataccatccgcttagccccttatgaatctcagtctcttttctctcttactcaatgtataggctgttgttgtttctggtggtaggttttgtattgcttaatgacttcttctctttagtgtgatgtttgcatgacttgaatgatccgtgtttgatatgtaatctcttttgatttctcattctgtatgttaggtcattactcattagttttgtgtctatatatacctcagccgtgttaaaaaatagtcaaaa

SEQ ID NO: 1380 - DNA, 648 bp, Brassica rapa
aaacttctgaagcaacctcgagctcacgctgattgattcacagtcattttggtttcttctagatcttatacgattgatctcgatccacggagctgtgagaatggcgtacgtggaccatgcgttctcgatatcggacgaggacatgatgatcgagacgtcatacaccgtgaacaaccgaccgccggttaaggagatcgcactcgcggtggctctcctcgtgttcggagccttaggaatcgtctccggcttcttcatggcgtacaatcgagtcggcggtgatcgaggccacgggattttcttcatcgtcctcgggtgtcttctgttcatcccagggttttactacacacggatcgcgtactatgcttacaaaggataccaaggcttctccttctctaacatacccccagtttagtactagtccgccttttgtatctctcctcctacggctactatagagagatgtttttaagaaaatgggctgacttgttttgctctctagtgtagtttttagaggagagtcttaagtgagtccatgtttgatatatatatatcaatactattaaaaaggaagcagtctaaaaaaatctacctataaagttgtaaaagttgtttggatcctttcatttaactcattattttttgatctta

SEQ ID NO: 1381 - DNA, 767 bp, Brassica rapa
ataactaatccggcgagattttggctgctttaacgaaaactatcatcaacccccgtcgtcttcgagcttccgatcttcagcttttctcacgacgcaaccctgaaatcgacatcgctgttgattctaatcgttttccggtgaagttgattcaaaagtagctattcaatggcttacgtagaccacgcgttctcgatctcggacgaggacctaatgattgggacttcgtacaccgtcagtaatcgaccgccggtgaaggagatctcactcgcggtggctctcctcttgttcggaatcgtaggaatcgtctccggtttcttcatggcgtacaaccgcgttggcggtgatcgaggccacggtgtcttcttcattgtactcgggtgtcttgtgtttctcccggggttttactatacgcggattgcatattacgcttacaaaggatatacaggcttctccttctccaacataccatctgtttaaccccccttatgaatctcgctctcttctctcccttactcaatgtataggctgttgttgtttctaatggtaggttttgtattgcttaatgacttcttctctttagtgtgatgttttgtttacaagacttgaatgatccgtgtttgatatgtaatctcttttgatttctcattctgtatgttaggtcattactcattagttttgtgtctatatatactttcagccgtgttaaaaaaatagataaaacttgtcacatgtgatgattcttgtttaaaaaaaaacgttatccttac

SEQ ID NO: 1382 - DNA, 713 bp, Brassica napus
acagtcattttggtttcttctagatcttatacgattgatctcgatccacggagctgtgagaatggcgtacgtggaccatgcgttctcgatatcggacgaggacatgatgatcgagacgtcatacaccgtgaacaaccggccgccggttaaggagatcgcgctcgcggtggctctcctcgtgttcggagccttaggaatcgtctccggcttcttcatggcgtacaatcgagtcggcggtgatcgaggccacggaattttcttcatcgtcctcgggtgtcttctgttcatcccagggttttactacacacggatcgcgtactatgcttacaaaggataccaaggcttctccttctctaacatacccccagtttagtggtagtccccttttgtatctctcctcacactcatccttttgtatctctcctcacactcatcaatgtatagagatgtttttaagcaaatgggctgactttgttttgctctctagtgtagttttagaggagagtctaagtgagtccatgtttgacatatgtatcacttcttgtttcctcattccacttgttaaataattacgcgtatatgacaagtagtcagatccatatatacccggttcatgtttgatatatgtatcacctcttgttctaaaactttttcaattcgaacaatgttatatgagttttcacatgttgatttcaagtgcaaaattagatagt

SEQ ID NO: 1383 - DNA, 453 bp, Brassica napus
cgatccacggagctgtgagaatggcgtacgtggaccatgcgttctcgatatcggacgaggacatgatgatcgagacgtcatacaccgtgaataaccgaccgccggttaaggagatcgcgctcgcggtggctctcctcgtgttcggagccttaggaatcgtctccggcttcttcatggcgtacaatcgagtcggcggtgatcgaggccacggaattttcttcatcgtcctcgggtgtcttctgttcatcccagggttttactacacacggatcgcgtactatgcttacaaaggataccaaggcttctccttctctaacatacccccagtttagtactagtccgccttttgtatctctcctcctacggctactatagagagatgtttttaacgaaatgggctgacttgttttgctctctagtgtagtttttagaggagagtctaagtgagtccat

SEQ ID NO: 1384 - DNA, 633 bp, Brassica napus
ggtgaagttgattcgaagtagctattcaatggcttacgtagaccacgcgttctcgatctcggacgaggacctaatgattgggacttcgtacaccgtcagtaatcgaccgccggtgaaggagatctcactcgcggtggccctcctcttgttcggaatcgtaggaatcgtctccggtttcttcatggcgtacaaccgcgttggcggtgatcgaggccacggtgtcttcttcattgtcctagggtgtcttgtgtttattcctgggttttactatacacggattgcatattacgcttacaaaggatataaaggtttctccttctccagcataccatccgcttagccccccccccttgtgaatctcggtctcttttctctcttactcaatgtataggttgttgttgtttctggtggtaggttttgtattgcttaatgacttcttatgtttagtgtgatgtttacatgacttgaatgatatccatgtttaatatgtaactcttttgatttctcattctgtatgttaggtcattactcattagttttgtgtctatatatacctcagccgtgttaaaaaaaatagacaaaactagtcacatgtaatgattgttgtttaaaaaacgttatccttacacacag

SEQ ID NO: 1385 - DNA, 707 bp, Brassica napus
tcaggtacttcccgtataagaaaactaatccggcgagattttggctgctttaacgaaaactatcatcaacccccgtcgtcttcgagcttccgatcttcatcttatctcacgacgaaaccctaaaatcggcatcgctgttgattctaatcgttttccggtgaagttgattcaaaagtagctattcaatggcttacgtagaccacgcgttctcgatctcggacgaggacctaatgattgggacgtcgtacaccgtcagtaatcgaccgccggtgaaggagatctcactcgcggtggctctcctcttgttcggaatcgtaggaatcgtctccggtttcttcatggcgtacaaccgcgttggcggtgatcgaggccacggtgtcttcttcattgtactcgggtgtcttgtgtttctcccggggttttactatacgcggattgcatattacgcttacaaaggatatacaggcttctccttctccaacataccatccgtttaaccacccttatgaatctcgctctcttctctcccttactcaatgtataggctgttgttgtttctaatggtaggttttgtattgcttaatgacttcttctctttagtgtgatgtttgcatgacttgaatgatccgtgtttgatatgtaatctcttttgatttctcattctctatgttaggtcattattactcattagttttgtgtctttatat

SEQ ID NO: 1386 - DNA, 693 bp, Cleome spinosa
cacgacaaaaacttgatactacgttgttctcgcttccttcttctatattggtccgatcatcttctggtgagcttgctctggtgctatcgatggcgtacgtggatcatgcgttctcgatttcggacgaagatatcatgatcgggacttcctacaccgtgaataatcgacctccggtgaaggagatctctctagccgtagctcttctcgtgttggaaccctaggtattgtctctggcttcttcatggcgtacaaccgagtaggcggtgatcgcggccacggtattttctttgtgattctcggctgtatcctgtttatccccgggttttactatacacggattgcgtattacgcttacaaaggatacaaaggcttctccttttcaaacataccgcccgtttagcctctttgaagatcgccccaaatctcgcatctgcccaatgtatatagttcactctcactagagttcgtcgctgaaacgctgtgttttctgtgagcttttagcttagctgagtcgagtccacgtctgatatgtatcccttctttcttgtgattcttgttctgtgttaaataattttgtgatcaatagtcatgccagatctatatatgccattgtctttgatcaatttgagtccaatcaggatagaaatggatgcattttgtgtatcccgggaaatggatagagacaatatgcta

SEQ ID NO: 1387 - DNA, 441 bp, Brassica juncea
cgcggggattggatcgtttcgttttaccagtgatctggatctggagctgtgttaatggcgtacgtcgatcatgcgttctcgatatcggacgaggacatgatgattgggactgcatacaccgtgaataaccgaccgccggtaaaggagatcgcactcgcggtggctcttctggtgttcggaaccctaggaatcgtctcaggcttcttcatggcgtacaatctagttggtggtgatcgaggccacgggattttcttcatggtcctggggtgtctgctgttcatcccagggttttactatactcggatcgcttattacgcttacaaaggataccaaggtttctccttctcaaacataccccccgtttagtctaatgtatagagaatgatgtttaagcaatggcctgacttgttttcgttctagtgtaatagttttagaggagtt

SEQ ID NO: 1388 - DNA, 707 bp, Raphanus sativus
ggaagagagactcatatattgtaaaacttctcgagctttggaatcttctggtcttcacagtgattctggtttctttctagatcgtttcgtttcaccattgattgatctctcgatccacggagctgtgggcaaatggcgtacgtggaccacgcgttctcgatatcagacgaggacatgatgttcgagacctcatacaccgtcaacaaccgaccgccggttaaggagatcgcactcgcggtggctctcctcgtgttcggagccttaggaatcgtctccggcttcttcatggcgtacaatcgagtcggcggcgatcgaggccacgggattttcttcatcgtcctcgggtgtcttctgttcatcccagggttttactacacacggatcgcgtattatgcttacaaaggataccaaggtttctccttctctaacataccccctgtttagtagcactccccccttttggttctcgatgtatagagatgtttttattaagcaaatgggcagactttgttttgctctctagtctagttttagaggagtctgtctaagtgagtgagtcccatgtttgatataatgtatctctcctcttcttcttttctccttccacttgttaaataattacgccgtctatgacgatttgtcatatccatatatacccctgttcacatgaatctttgtttctaccatgctatatgagagttttttca

SEQ ID NO: 1389 - DNA, 1982 bp, Brassica oleracea
aagggcttagctggggtagaaggtaaaacggagatgagcaagagaccgccgcctgatccggtggctgtgcttagaggacaccgtcactctgttatggacgtttcgttccatccatcaaagtctctgcttttcactggttcagctgatggagagttgaggatttgggataccattcagcaccgtacagtttcttctgcttgggctcatagtagagcaaatggggttttagctgtagcagctagtccttggttaggagagaacaagattatcagtcagggaagagatggaactgtcaagtgttgggatattgaagatggtggtctatcaagggatccattactagtactcaatacaagcgcctatcatttttgcaagttctctcttgtcaagaagcctaagacttctctcaaagaagctgaaggacagtccaacaatcacgatgagcaggatgctggagacaagcgtaatgttcaatgtacagatgatagtgagggatctgtgggggattctggtttgcttcaagatggagatcatgctgaaagtgccacttacgtagcagtagcaggggaggaacctactgaggtagagatatgggatctgaataccagaagcaagatcatacagcttcctcaaggtagtcctgatgaatccgccagtgcttctactaaagaaagaggaatgtgtatggctgttcaattattttcccctcctgaatcacagggtttcttacatgtcttagctggttatgaggatgggtcaacactgctttgggacatacgcaatccgaaaattcctctaacaagtgtgaggtttcattcagagccagttctaagtctctgtgttgcatcgtcatgcgatggaggtatctcaggaggggcagatgacaaaattgtgatgtataatatcaaccattcaactggctctttaacactgaggaaagagattattttggaaaggccaggcatctcgggtacctcaatccgacctgatgggaagattgcagccacagctggttgggatcacagagtaagggtgtacaattaccgcaaaggaagtcctctagcgatactaaagtaccacggagcaacgtgcaacgccgtgtcctactctccagactgtgagctaatggcgtctgcttccgaggatgcaactgttgctctctggaaactctatcctccccacaaatctcactgaccgaacgttaaaaataaactcgcacgttgtgccgttttaagtggaagggggaataaatcaaacgacgcgtagtttgcatctagataatagaaccggcatgaagtcgtacgtttgagtagaagtcacgataaatgaaattgcaccaaaccacgatccgtgaccaaggagaagagtctctctctctcataactttctgaagcaaacagctcgatttgatcgtttattcttggatcgtttaccactgatctggatctggaactgtgttaaatggcgtacgtggatcatgcgttctcgatatcggacgaggacatgatgattgggactgcgtacaccgtgaataaccggccgccggttaaggagatcgcactcgcggtggctctactcgtgttcggaaccctaggaatcgtctcaggcttcttcatggcgtacaatctagttggcggtgatcgaggccacgggatattcttcatggtcctggggtgtctgctcttcattccagggttttactatactcggatggcctattacgcttacaaaggataccaaggtttctctttctctaacataccccctgtctagtccccccacttaaatgtatagagatgatgtttaagcaatggcctcgcctgttttctttctagtgtagtcaagtgagtccatgtttgatacatatatatatcccttcttgctttcctccttacctttgttaaataattgcaagtctgtgacagttagtccgatacatattttacatatatatatacctggttcagagatatatttgtctc

SEQ ID NO: 1390 - DNA, 618 bp, Brassica juncea
aaggagaagagtctctctctcataactttctcaagcaaactgctcgatttgatttctcgagatttgatcgtttaccacggatctggatccggagctgtgttaaatggcgtacgtggatcatgcgttctcgatatcggacgaggacatgatgattgggactgcgtacaccgtgaatagccggccgccggttaaggagatcgcactcgcggtggcgctactcgtgttcggagccttaggaatcgtctccggcttcttcatggcgtataatcgagtcggtggcgatcgaggccacgggattttcttcatggtcctggggtgtcttctgttcatcccagggttttactatactcggatcgcctattacgcttacaaaggataccaaggtttctccttctcaaacataccccccgtttagtctaatgtatagagaatgatgtttaagcaatggcctgacttgttttcgttctagtgtaatagttttagaggagttaagtgattccatgtttgatatacatatgtatcccttcctgctttcctccttactcttgttaaataattgcgagtctgtgacagttcgtccgtccgatacatattacatatatatacctggttcagaga

SEQ ID NO: 1391 - DNA, 914 bp, Brassica napus
aacgttaaaaataaactcgcacgttgtgccgttttaagtggaagggggaataaatcaaacgacgcgtagtttgcatctagataatagaaccggcatgaagtcgtacgtttgagtagaagtcacgataaatgaaattgcaccaaaccacgatccgtgaccaaggagaagagtctctctctctcataactttctgaagcaaacagctcgatctgatttctcgagatttgatcgtttcttcttgatcgtttaccacggatctggatctggagctgtgttaaatggcgtacgtggatcatgcgttctcgatatcggacgaggacatgatgattgggactgcatacaccgtgaataaccgaccgccggttaaggagatcgcactcgcggtggcgctactcgtgttcggagccttaggaatcgtctcaggcttcttcatggcgtacaatctagttggcggtgatcgaggccacgggatattcttcgtggtcctggggtgtctgctcttcattccagggttttactatactcggatcgcctattacgcttacaaaggataccaaggtttctctttctctaacataccccctgtctagtcccccacttaaatgtatagagatggtgtttaagcaatggcctcgcctgttttctttctagtgtagtagttttagaggagttaagttgagtccatgtttgatacatatatacatatatatatcccttcttgctttcctccttacctttgttaaataattgcgagtctgtgacagttagtcggatacatatttacatatacacacctggttcagagaagtatttgtttctaaaaattgcaattctatatgtgatgcttgagtactcttctttcacatgttgatttccaatgtaaattcaaatgtagctttgtctattttacctga

SEQ ID NO: 1392 - DNA, 646 bp, Brassica juncea
tgatgattgggactgcatacaccattgacacagctcgatttgatttctagagatttgatcgtttcgtttaccatcgatctggatctggagctgtgtcaatggcgtatgtcgatcatgcgttctcgatatcggacgaggacatgatgattgggactgcgtacaccgtgaataaccggccgccggttaaggagatcgcactcgcggtggcgctactcgtgttcggagccttaggaatcgtctcaggcttcttcatggcgtacaatctagttggcggtgatcgaggccacgggatattcttcatggtcctggggtgtctgctcttcattccagggttttactatactcggatggcctattacgcttacaaaggataccaaggtttctctttctctaacataccccctgtctagtccccccacttaaatgtatagagatgatgtttaagcaatggcctcgcctgttttctttctagtgtagtagttttagaggagttaagttgagtccatgtttgatacatataatattccttcttgctttcctccttacctttgttaaataattgcaagtctgtgacagttagtccgatacatattttacatatatatatacctggttcagagatatatttgtctctaaaaaattgcat

SEQ ID NO: 1393 - DNA, 819 bp, Brassica rapa
cgtacgtttgagtagaagtcacgataaatgaaattgcaccaaactacgatccgtgaccaaggagaagagtctctctctcataactttctcaagcaaactgctcgatttgatttctcgagatttgattttcttcttggatcgtttaccactgatctggatccggagctgtgttaaatggcgtacgtggatcatgcgttctcgatatcggacgaggacatgatgattgggactgcgtacaccgtgaatagccggccgccggttaaggagatcgcactcgcggtggcgctactcgtgttcggagccttaggaatcgtctcaggcttcttcatggcgtacaatctagttgggggtgatcgaggccacgggattttcttcatggtcctggggtgtctgctgttcatcccagggttttactatactcggatcgcttattacgcttacaaaggataccaaggtttctccttctcaaacataccccccgtttagtctaatgtatagagaatgatgtttaagcaatggcctgacttgttttcgttctagtgtaatagttttagaggagttaagtgattccatgtttgatatacatatgtatcccttcctgctttcctccttactcttgttaaataattgcgagtctgtgacagttcgtccgtccgatacatattacatatatatacctggttcagagatttatttgtctctaaaaaattgcatttctaaccaagttatatgatatgcttgagtactcttctttcacatcttgatttcaaatgtaaattcaaatgtagatcatctccattccttgcaaatatgagaaag

SEQ ID NO: 1394 - DNA, 768 bp, Tropaeolum majus
caatttgaaaaatcttcgagctttttagagcttctgaatctcatataaagggagaggaaaaaaaaatccattcttgaaacaatttaacttggcatcacacacaccctaaagtaccgaacaattcaaacccccaccctctaatttgattaaaatatcgagatttggtttgtttgtttgtgtttttgagtaattttttggatcttctacataaatggcgtatgtggatcatgccttctcgatttccgacgaggatattatgatggagacgtcgtacacagtcaataatcggcctccgatcaaagagatctcactcgctgttgggcttctcatcttcggaacgattgggatcattctaggtttcttcatggcttacaacagaatcggtggtgaccgagcccacggagttttcttcggagtacttgggtgcctcttgtttattcccggggcctactatacacggatagcatattatgcttacaagggatataaaggcttttctttttccaacatacctcctgtttagtggacaaacaaacacccaaagcgtatcatgtacagctcttccatttgctaagtacttctacttttacttgtctgtttttttagttctagatatgttttcgacaatatggtgtatctaaatgcttatggttttttccaagtgtatttcttacacgtacctgtgaacccttttgggattccacgtgtaaagctgagatttttaacctgtctgcagatatatgttcaatgtagctctatcgtttttct

SEQ ID NO: 1395 - DNA, 764 bp, Carica papaya
ggagcatcttcgtctctttcctcctttacctttgaaaaatctttagctttggattcaatttacttctctcgccaaatccaccagcctccgtcaaatctccaaaagaagaaagaaaaagaaaagagaaaatttcaatctttgttggttagaaattccagaagcgaactcgattctaggcatcgatggcttacgtcgaccatgccttctcgatttcggacgaggacataatgatggagacatcttatgctgtcaacaatcggccgccaataaaggagatctccctcgccgttgctcttctcgtatttggaacccttgggattgtctccggcatcatcatggcctacaatagagtcggtggtgaccgagggcatgggattttcttcactgtgctgggttgcattttgtttcttccggggttttactatacacggatagcatattatgcttacaagggatacaaaggcttttctttttccaacataccccctgtctagtggatgaatacctaaagctcttcgtgcttggccacatctgtacagctatctcattacagtcttcctttttgttttctttccctgtaatcttgtctaggtctggtttgatgataatgtgtattcagattcagttgctaaagatttggaccttggttgtttgatttcctgttgcaatatagttgtgaactcattaacattaacaagttatgttgattactgtattagaatcttcctgtcatacttttgatcaatcagtgtttgttagccaga

SEQ ID NO: 1396 - DNA, 882 bp, Humulus lupulus
agaaaaaattactcatcgtagcacctccgttgagtgctctttagattagatcctttatcttccaaatctaagcatcctaacctctgaagaagtgtacgcagcacgccaccggaacccgcacacagattagcgtatacattgctcaaaaagcgacccaacatctttctcctgctgtctttttccagcaacagcttcatttcggagtttcgtcgaacacctctcctgcaatctggctcagctcccttgctgctcaatttgagaaaccctaatctcccctcccgaaattcgaaaatggcgtacgtggaccacgccttctcgatcacggacgaggacattatgatgggtacttcgtacaccgtcaacaatcggcctcctattaaggagatcgcgctcgccgtggcacttctcgtcttcggcactcttggcatcgttctcggcattttcatggcctacaaccgtgtcggcggtgaccgagctcacggatcattctttgcgattcttggagcgatcttgtttattccgggcttttactacacgcggattgcttactatgcttacaaaggttacaaaggcttctctttctccaacattccgccagtttagcccatcttcgtatttccctcaccgacatgtacaaatctttccctctctgagttgttgttctgcctataatttttcttttcttttcgttttcttggttagtaatgtctgtaattatgtgctaatagctgttctgaacatatttgtctaagtagtttaactttgtactgaaagttaatatgtttacgttttaagaacatgtaattacgagcacagcagcattcccatttcttgttttcgtttcgacttcgaatataagtatatttacttctaaactttcaa

SEQ ID NO: 1397 - DNA, 721 bp, Theobroma cacao
aacctttgctttgcttgtagcgagagccacctcttagcttaaaattcttctacaactcccaaccacctcctcctccaagaaaaatcaattcaacctccaaattcctgaaaggaattgcatagcagactggactgcaataaaaattcttcagagatcttgactctgtgcggttacagatggcgtacgtagaccatgccttctcgatatcggacgaggacatcatgatggagacatcctacgctgttaacaatcggcctccgttcaaggagatcggcctcgctgttgctcttcttgtctttgggacacttgggattatcttgggtaccttcatggcctacaacaaagtcggcggtgaccgaggccatgggcttttctttgcaatactgggatgcatattgttcattccaggcttctattacacaaggattgcctattatgcttataagggatacaaaggcttctctttctccaacattccccctgtctagaggaactctcctgctccgccctatgtacagaacttttttcatttttctgctttcccttaaatgtttcgtgttccctgttcggtgttcaacgttctttccttctttctgtatccacaataacttgacttatatgttatttgttccatagtaacattgtcaccaatagtcttgcttttgctggttgttttgtgacattatataatatctaatcttactgtctactactactacta

SEQ ID NO: 1398 - DNA, 613 bp, Cleome spinosa
cgagttgtctcattcttcgtccaaactccaaagtcttcaatttctctgtgagcaaaaacatttgaaaccctagaaatcacgccattgatcgcgtgttcaatccctgctcccatggcgtatgtggatcacgcgttctccatttctgacgaagacatcatggtggggacgtcttacaccgtcaacaatcgaccgccgatcaaggagatctccctcgccgtcgcgcttctcgtgttcggaaccctaggcatcgtctccggtgttctcatggcttacaacaaagtcggtggcgatcgcgcccacgggcttttcttcacgatccttggctgcattttgtttataccaggcttctactacacccggatagcttatttcgcgtacaagggatataaaggtttctccttttccaatatccctcctgtatagcaaacagatatatgaacacgcacctccccaccattactgtacaaagccttgaccttgtttattattagttcctcaatggttgcagcgaagcttgtgttgctgtatggcttgatccatgtgtcatgaaatgtggtgtagactagtttttttttaaattcaaataatagaaagatacggtgagacaaattat

SEQ ID NO: 1399 - DNA, 914 bp, Cannabis sativa
cggcagttaaaataacaacaagatgagcttgaaagttaaaatcacattacgttgccttccctcttcctacctccgtctgagtgaggataaatcctctctattctattaatctattaccaattccaaatctaagcaacctaacctaacctcaacaagtgtacgcagcacgccaccggaacacgcacacagattattagcatttagtgtacaattcattactcaaacagcgatccaatccaacaacatctatctcctgcaatccgactcagctcccttcccttgctgcccaatttcagaaaccttaatctaatcccctccctgaattcgaaaatggcgtacgtcgaccatgccttctccatcacggacgaggacattatgatggggacttcctacaccgttaacaatcgccctcctattaaggagatcgcgctcgccgtcgcacttctcttcttcggcaccctcggcatcgttctcggcattttcatggcctacaatcgtatcggcggtgaccgagctcacggatcattctttgcaatacttggagcgatcttgttcattccgggcttttactacacgcggattgcgtactatgcttacaaaggttacaaaggcttttcgttctccaacattcctccagtttagcccatcttctccgtatttccattaccgacatgtacaaatttttcccctctctgatttgttgtttgcctttaaaaaaaaaaaagaaagagtttttgttcgtttttctggttattaatgcgtgtaattatgtgctaatagttgttctgaatatatttgtctaagtagttgaactttgtaatgaatataagtatattacgagcttatttcctcttttatacaagtatatttacatccttacttattaagcttaattttgtagcatgcttgtaaat

SEQ ID NO: 1400 - DNA, 817 bp, Euonymus alatus
cggccgggggacacccgtgtgcctacgccacgcaatctttatcctttgtttgcgttagcaaagtccctccccggtacagcccctgttcagctcctacgccgccaaactcagaaatctcagttgatcggatctgagtcccatcaaagtgctcgatcaaacatggcgtacgtagatcacgcgttctcgatttcggacgaggacatcatgatcgggacatcttacactgtcaacaatcgccctcctatcaaggagatcgcactcgccgttgctcttctcgtctttggaacactcggaatggtccttggcattatcatgtcctacaatagggtcggcggtgaccgaggtcacggtattttcttcgctataatgggaatagtccttttcataccggggttttattacacgcggattgcatattatgcttataagggatacacaggcttctctttctccaatatacctcctttgtagcgactagcgagtgatcggtcaggcttgcattcccttgttgttcatgtacagtcttttctgagttgcagtttttctaccactgtctctttagttctcttcatgaatagttatgtttctatatatactattcccaatgatggatgttctgattactatatgcgaagttgtgtacatttcttttactgaaggaaccatgtgtgagaagaacaactctagaatgtgcttgaatatatttcctcaagtagcgaactcttggtactctgttataccgtgttttataattcaaagatcctattgatgcttgcgggttatacatttgtgtttggtcatttgcttagagtttcag

SEQ ID NO: 1401 - DNA, 674 bp, Euonymus alatus
ttttcgttcgaaaagtccttcctttgaacaactttgttcagctcctacgcccaccaaactcattctctgttgatcggatctgaagaatcaaatcgaagtcctcgatcaaaaatggcgtacgtggatcacgctttctcgatttccgacgaggacatcatgatcgggacgtcttacgctgtcaacaatcgcccaccaatcaaggagatcgctctcgccgttgctcttcttgtctttggaacactcggaatggtctctggcattatcatgtcctacaatagggttggcggtgaccgaggtcacggtattttcttcatgatactggggatagtccttttcatacctgggttttattacacacggattgcatattatgcttataagggatacaaaggcttctctttctccaatatacctcctttgtagggagaggcggttcaggcttgagttcccctgttgctcgtgtacaggtcttttctgggttacagtttttctaccgttatttttctctagtgctctttatgaatagttatgtttctatagatactattctgaatgatgtatgttctgattatgatatgcgaagttgtgtacatttcttctactgatgatgaacatcaaatatgtataaatatatatattcagattgctaatgaaccatgtgcaaagaagaacaa

SEQ ID NO: 1402 - DNA, 635 bp, Tripterygium wilfordii
ctgttcagctcctacgccaccaaactcagaaatctctgttcaccggatctaaatcccatcgaagttcttgatcaaacatggcgtacgtggatcacgcgttctcgatttccgacgaggatatcatgatcgaggcatcttacactgtaaacaatcgcccacctatcaaggagattgctctcgccgttggtcttctcgtctttggcacactcggaatggtctctggcattatcatgtcctacaatagggtcggcggtgaccgaggtcacggtattttcttcgcgatactggggatagtccttttcatacctgggttttattacacgcggattgcatattatgcttataaaggatataaaggcttctctttctccaatatacctcctctgtagggagtgatcagtcaggcttgcgttcccttgttgcccatgtacaggtcttttctgagttgcagttttcctaccactgtctctctctctagtgctctttatgaattgttatgtttgtattgatactattccgaatgattgatgttctgatactatatgcggagttgtgtacatttcttctactgaagggaatgacgtttaagtaactgactgatgatagacatacatcaaatatatatataagtatat

SEQ ID NO: 1403 - DNA, 802 bp, Aristolochia fimbriata
gggggggtcaaagtttgcgtctcgcgcaggtttgctttcctctcggtcttaacaaacgcccatcgccttaggctcggcaaagccatctgctgcaagcctgcaagtcgtttgacggtcgaagctcggtagtaagaatggcgtacgttgatcactctttctcgatctctgatgaagatctaatgatggaaacctcttacgttgtccacaatcgacctccaatcaaagaaattgctctggctgtttctttgctgatttttggaaccctgggcatcgtgatggggatttttatggcttacgatagggttggaggcgatagagctcatggtatatttttcgcgatattgggatcaatgctgttcataccaggattctattacacgagaatagcttattatgcgtataagggctacaaaggattctctttctccaacatacctcccgtataatgagttatggatttgcttcaagtgcaatgcggttatcttcatgtacaggcctttcacagtaattttttttcttttttcctttctcgtgtcatactcctacataaagtaatctgcttgtaaataataaacatgattacggaccgtgtcttttctgtttaatatctggtgaaagtatttcttaatctattctacttttgtggacttactaagatgtttagctctaagtatgaaaaatgtttgtacagctggaatgtgttctcgactctggactcccggttgctttcattttgctgtttttctgtactatgttggataaacattcacaatatcatcatcaccagcagtctttctgttgt

SEQ ID NO: 1404 - DNA, 721 bp, Citrus clementina
ttgattgattagaactttctctttgaattgaaaagtctcgagctttgagaactagaaaactccaacgcaaggcacgcaagcagccaaaccctagacaagaatcaaaacctcccactatacgaaaaaatccgaaattggaattcacgaatcgaacaatggcgtacgtggaccacgctttctcgatatccgacgaggacataatgatggagacatcatacaccgtcaacaatcggcctccgatcaaagagatcgtccttgccgtttctctcctcgttttcggcactttcggcatcatctgcggcaccatcatggcctacaacagagtcggcggtgaccgcgctcacggggttttctttgcagtactgggcgcgattctgtttataccgggattttattatacacgaattgcgtattatgcgtacaagggatacaaaggcttttctttcaataatataccttctgtttgagctgatctcttactcaatgtacagatctccccacaagttgtactttgtcttttttttttttttttgggaatattgatttttatttttgtttgaataatatttgtgtatattggttactaatattgtgaacaaggtgcggttatatagtgatatgctgtgttgttctcaatgtaacctttgttggtttttgcaattgacttgtttaaagtatcatttttgtttagagtttgtacaagtgttgtctttgtagctcc

SEQ ID NO: 1405 - DNA, 724 bp, Gossypium raimondii
gacggatatctcttagcttaagattctagaaagttgaaaaccctcacctcttaccctaattctggagtggagtaatcatattgttttagatatcttggcattgtatggcgtacgtagaccatgccttctccataaccgacgaggacatcttggtggacacctcctacgccgttaacaatcggcctccgttcaaggagatcggcctcgctgtgtctcttctcgtctttggcacgcttgggatcatattgggtatcttcatggcctacaacagagtcggcggtgaccgagcccatgggcttttctttacactactaggctgcgtattattcattccgggattctattatacgaggattgcttattatgcatataagggatacaaaggtttctccttctccaacattccccctgtttagtgtcttccttctatgtacagatcttctttcatttatctatgtttcgttacttatttgtgtatccagaataacttcagagtttgaatgttatttgttcgtattagaattgtgagcagccactagtccaatcattgtttgagtgaatggaaggatagatgttggaaagttgtctcttcccctgttttattgcctcggttctatgattggagttatcaaaggcatattagaaacattccttgtaaccagagcttccgcttgcctccttacaatatgcacaagatacagcttccatttatttgattgtaatc

SEQ ID NO: 1406 - DNA, 686 bp, Tropaeolum majus
cggccagggaactttgctaactttgaactttaactcaacccaaaacccccagccgaacaaattacttttcacacaaaaaattctcttaaaaatctcttaatttggtcctgttattcaagggttttgattcttcctttgtatcaatggcgtatgtggaccatgccttctccatatccgacgaagacataatgatagagacttcctacaccgtcaacgatagacctccgatcaaagagatatccctctccgttgcgcttctcgtattcgggacgcttgggattatctctggtttcttcatggcttacaacagagtcggcggtgatcgcgcccatgggctgttcttcgcactactcggttccattttatttatccctgggttttactatacccgaatagcatattatgcttacaaaggataccaaggcttttcctttgccaacatacctcccgtttagtatatgaatacccaatacaaggtgtgtctctccatcatgtacagctcttccattatcattacagttaccttttttggttcagttgtaggcctcttttgacagtactgtgtatttagatgctttgtttcgaacaaagttacttgctttgtcgtcacaatatacatataaggtgggtgtgtatgtttcaaaatttgtatttcaaacctttactaatttgatatcggaacgttt

SEQ ID NO: 1407 - DNA, 721 bp, Citrus sinensis
ttgattgattagaactttctctttgaattgaaaagtctcgagctttgagaactagaaaactccaacgcaaggcacgcaagcagccaaaccctagacaagaatcaaaacctcccactatacgaaaaaatccgaaattggaattcacgaatcgaacaatggcgtacgtggaccacgctttctcgatatccgacgaggacataatgatggagacatcatacaccgtcaacaatcggcctccgatcaaagagatcgtccttgccgtttctctcctcgttttcggcactttcggcatcatctgcggcaccatcatggcctacaacagagtcggcggtgaccgcgctcacggggttttctttgcagtactgggtgcgattctgtttataccgggattttattatacacgaattgcgtattatgcgtacaagggatacaaaggcttttctttcaataatataccttctgtttgagctgatctcttactcaatgtacagatctccccacaagttgtactttgtcttttttttttttttttgggaatattgatttttatttttgtttgaataatatttgtgtatattggttactaatattgtgaacaaggtgcggttatatagtgatatgctgtgttgttctcaatgtaacctttgttggtttttgcaattgacttgtttaaagtatcatttttgtttagagtttgtacaagtgttgtctttgtagctcc

SEQ ID NO: 1408 - DNA, 622 bp, Trifolium pratense
aaaacaaaacaatggcatacgtagatcatgctttttcgatttcagacgaggatatcatgattggaacctcttacactgtcaacaacaaacctcccatcaaggagatcgccctcgctgtttctcttctcgtattcggtttcctcagtatcatcatcggtttcttcatggcttataatcatgtcggtggtgacattgctcatgggttattctttgcaatactcggaatgttagtgttcataccgggtttctactacacgcggattgcttattatgcttacaaaggatacaaagggttctctttctctaacattcctcccgtctagctatcataatttcagtttctcgctcggcatcattatgtacagatcttcacttgttgtacttgtactctactctactctcttccttttttcttgtattttattctatttttcttgtcttgcccgatgtaaaatgagtgcctagatttagattgtaattgctcttaatatatactactacaacttactactgctgtttagattttgttgtttagtgttaattgtcatgctccgaatctgttgttgaatagcttgtgctccgcattttctttatgattttaataatagaagcacacttgaag

SEQ ID NO: 1409 - DNA, 1287 bp, Vitis vinifera
gataaaatcacccacccccacgcaacacagtgaaaagaagaagccgagtcttcagacatttcatcgaacacgcaaagagcgaattctgagaagccttccacctccggctctccaatggcgtacgtcgaccacgctttctccatctccgatgaggacatcatgatggagacctcttacatcgtccacaaccgccctccgattaaggagatcgccctcgccgtcgcgctcctcgtcttcggaaccctagggatcatcctcggcattctcatggtctacaacagagtcggcggcgacagagctcacgggttgttttttgctattttgggggcgatcttgtttattcccgggttctattatacgcggattgcctactacgcgtacaagggctacaaggggttctctttctccaatataccgcctgtttgatgctggtgcagctgattttctctcgtgtacatacgtggcttactgagttcgatgttcttttaacttttttggtggatttacttggttattttgtttgaataatgtgtatttagctgctacatgttaaaacgagggcattgccgtggtgaattattgtatttgttctggagtcaccagtggttttacggaacaatcaatgtattgaagccttctataattctaattaaaggttcctctacggacactgcatcttcccattatgcaaaattgttgtcttggctattggtgtgagcatatccgatttgtttctgtcaatatgatatagtggcctaggattgtctttactaaggatggttgttgatggttatcttatttggtgggttttgaatctagctggaatttacaccttatactgtactatgccctaattaactgagcttaatatttgaaagctgttattgggactttatatgtaaagttgggtatggtttattcgttgagttggatttaaaacagaaggggaccgaggtgattcacacaatttctaaagagatggggaaaattgatttttatgtgccaagctggcattgatggcaagtgttttaaccaagaggtggattctgtgaaggaagcatgcagcaataagtttgctgcacttgattgaagggtggggtttttaaagaatgtgattcagtacctaagggcttccatcactatgaaggaagtggaggtacaaaagctgactatttcaaatttgaagctctgttatggagccctgaagaaggatgttgcttggctagaagtgtggactatgaactatttctaaagaaaccattaagaaattctaggctactgtttttg

SEQ ID NO: 1410 - DNA, 707 bp, Vitis vinifera
ggactcgccgttcagataaaatcacccacccccacgcaacacagtgaaaagaagaagccgagtcttcagacatttcatcgaacacgcaaagagcgaattctgagaagccttccacctccggctctccaatggcgtacgtcgaccacgctttctccatctccgatgaggacatcatgatggagacctcttacatcgtccacaaccgccctccgattaaggagatcgccctcgccgtcgcactcctcgtcttcggaaccctagggatcatcctcggcattctcatggtctacaacagagtcggcggcgacagagctcacgggttgttttttgctattttgggggcgatcttgtttattcccgggttctattatacgcggattgcctactacgcgtacaaggggtacaaggggttctctttctccaatataccgcctgtttgatgctggtgcagctgattttctctcgtgtacatacgtggcttactgagttcgatgttcttttaacttttttggtggatttacttggttattttgtttgaataatgtgtatttagctgcttcatgttaaaacgagggcattgccgtggtgaattattgtatttgttctggagtcaccagtggttttacggaacaatcaatgtattgaagccttctataattctaattaaaggttcctctacggacactgcatcttcccattatgcaaaa

SEQ ID NO: 1411 - DNA, 1061 bp, Medicago truncatula
taggattccaacacgagacgagaccatattaataaactcatttaattgtcaaactaataagaaatctcaacccaaagcaacaaaattcatcaatactcaacccatcccaaaaccctccacccaaacaacaacctccaaaatccaaatctagctaccaacaaagcaaaacaaaacaatggcatacgtagatcacgctttttcgatttcagacgaggatatcatgataggaacctcgtacactgtcaacaacaaaccacccgtcaaagagatcgcactcgctgtttcacttctcgtctttggttttctcagtatcatcatcggttctctcatggcttataaccatgtcggtggtgacactgctcatgggcttttctttgcaatactgggaatgttattgttcatacctggtttctactacacgaggattgcatattatgcttacaaaggatacaaagggttctctttctctaacatacctcctgtgtagctctcataattcaagttcagtttcacagcttccttatgtacatatcttcccttattgtactccaccacctttcttgtatttttttcttttgttcttgccggacatacaatgagtgtttagatttagattgtagtctgtaattgctcttaatatatactgctgctgttaagattttgttcttcattgttaattgtcctgctccaaacccgttgttgaatagtttgtgtttctcatctttctttatgattttaataatagcacaccttgataaagtatttcgtattttcttctgatatgctatgataggagggaaatgtctaaggattgaggaaattaatgaaattgattcatattatattttatagctttttacccttgggatggaatctctgaattttagcttggtaattgtggcttatttgatcattaggatcaattgacgatgataatactacactatactctcatggtgcagcccccttaccggattccaaacaccagaaaccgccgtcaaatgaccaaccgatggtggttaacagatccatgaggtctccagaggttgttgtgaaaatgg

SEQ ID NO: 1412 - DNA, 881 bp, Populus trichocarpa
aagccaagtacgttagcaactgacataagaagaagagaacataacagaacagaaatggtctctgctttctctctctatctctatctttacctttgaaaagtctcaatctttacaacttcaaccccaaggaaaacctaaccaaaccaaacaaacaaaccttaaaaagaaaacccagatcacaagatcgatctcaacaacaaaagaagcatcaaagatggcatatgtggatcatgcattctcaataactgatgaagatttaatggtggagacttcatatacagtcaataataagccaccgattaaggagattgctcttgctgttgctcttcttgtttttggtgttgttggtattgttttgggtactttcatgacttacaacagagttggtggtgatagaggtcacgggcttttctttgcgatattgggagtggttctgtttattccagggttttattacacaaggattgcatattttgcgtataaaggatacaagggcttctctttctccaacataccacctgtgtaattgatgataaacaagctcaacaagctggaatcctgtctctacgcgcatgtacatatcgttcttgagttgtacttctttctttaatgtgccttcttttgtgttttttttttaaataattatgtgcagtagatgctagtttcctaaagaactgatctgtcatgtgatgtgattggattgtttttcatgtctacaaaggatgaaaatatagcacttacaatttttagtttcaatttctttctcgaggcttgaatcttatgaagcttgatcttgtacaccgagtaggcgaatgtgtattacctaagagttttggcatgagtgatctatctcctgtctttcatgatgctcagatctcata

SEQ ID NO: 1413 - DNA, 757 bp, Arachis hypogaea
acacccattcttgaacaccaagcgaaagctgaatttcaacccaccgcttcttcttcttcttcttcttcgttcaaagtcacaaaacgccaacgaagacagcgatctgactgaccaagaacaccgaacaattatatacttagaaatcttcttgcaaaacaaagggcaaaaacagaaaatgtatgtggatcacgcgttttcgatctcggacgaggacatgatgatgggtacctcgtacactgtgaataacaagcccccaatcaaggagatctcactcgctgtcgctcttcttgtttttggaacccttggaatcatcatcggttctctcatggcttataaccatgtcggcggtgacactgctcacgggttgttctttgcgatcttgggaacgctgttgttcataccagggttctactacacaaggattgcatattatgcttacaagggttacaagggattctctttctctaacatacctccagtttagtttacttatatatgtatgtcatattgttaagatgatcatatacccttctcttgtacagatctttttttttgttgaactttgtactctactttcttttgtgtctaaactaaaccatatatactgctacttgctactgctgttaggatttgttctatcaagtgaatcattctgctctgaaatcgttaactaggacatggatgaatggtgatagtttaagttttgcgtgtcatgtgtaagcgtggattaaatgatatagaagtatgatttgagggc

SEQ ID NO: 1414 - DNA, 585 bp, Arachis hypogaea
cgaacaattatatacttagaaatcttcttagcaaaacaaaagggcaaaaaacagaaaaatgtatgtggatcacgcgttttcgatctcggacgaggacatgatgatgggtacctcgtacactgtgaataacaagcccccaattaaggagatctcactcgctgtcgctcttcttgtttttggaacccttggaatcatcatcggttctctcatggcttataaccatgtcggcggtgacactgctcacgggttgttctttgcgatcttgggaacgctgttgttcataccagggttctactacacaaggattgcatattatgcttacaagggttacaagggattctctttctctaacatacctccagtttagtttacttatatatgtatgtcatattgttaagatgatcatatacccttctcttgtacagatctcttttcttgttgaactttgtactctactttcttttgtgtcttcctccacaggcctcccacttccccttctttctcccttagatccatcttccactacacaccatcacgcaggttttagggctcaaatctttttacctgttgttctttgaagttgtt

SEQ ID NO: 1415 - DNA, 606 bp, Zostera marina
tcggggtctagtagttacgcggggggacgcgggattgacggaaaaaagaaaagaagtggcataacggtggggacgagagacgaagcgtaaatccaaggtcaattccaatcgattcgttgccgtattccgtctctttagcttcagatggcgtacgtagaccatgcgttctctatcaccgacgaagacatcatgatggaaacgtcgtacatcgttcaaaacaagccacctatcaaagaaatcgcacttgccgtgtccttgcttgtgttcggtactctagggattgttcttggattgatcatggctgccaatcgagtcggcggtgatcgtgctcacgggatcttcttcgcggtgttgggatcggttctgttcctcccgggattctattatacgagaattgcgtactatgcatataagggatataaagggttctccttcgccaacattcctcccgtctaggtcatcactgcatccgtgtttgtacagatctgtgtcggtatgcttttacaattttactccttatactgttttttaccacttatgtaatttttctatggaataatcttattatattaatttaatagatttgagatttctaccaccactcca

SEQ ID NO: 1416 - DNA, 627 bp, Fagus grandifolia
acgcacttagtagcggggcacccgatttggactttggattcttccataaagccacgcagtgcgccgaagtgcagttcacgcacgaagaacgcgcacagagcaagattcgtgttcgattagatagcttacctcatttttaacaacctagaagcacaacagcagaaaagtctttctttcttctacttcaactccaagcaaactcagccgggtcaagaacacataccaacatcaatctttatctatctatctgaaaaaaccttaatccgaacttaaaattcaaacaaagagaccagaaacagagagcaagaagaaatggcgtacgtggaccacgcattttcgattacagacgaggacataatgatggaaacatcgtacacggtaaacaacaggcctcccatcaaagagatcgctctcgctatctccctcctcgttttcggtactctcggaatcatcctcggcttcttcatggccttcaaccatatcggcggcgaccgtgcccacggtgtcttctttgcaatattgggtgcgatcttgttcattcctgggttttattatacgcggattgcgtactatgcttataagggttacaaaggtcttttctttctccaacatacctgctgtgtaata

SEQ ID NO: 1417 - DNA, 533 bp, Pteridium aquilinum
acgtagaccatgccttctcgatatcggacgaggacatcatgatggagacatcctacgctgttaacaatcggcctccgttcaaggagatcggcctcgctgtttgctcttcttgtctttgggaccttggggttatcttgggaccttcatggcctacaacaaagtcggcggtgaccgaggccatgggcttttctttgcaatactgggatgcatattgttcattccaggcttctattacacaaggattgcctattatgcttataagggatacaaaggcttctctttctccaacattccccctgtctagaggaactctcctgctccgccctatgtacagaacttttttcatttttctgctttcccttaaatgtttcgtgttccctgttcggtgttcaacgttctttccttctttctgtatccacaataacttgacttatatgttatttgttccatagtaacattgtcaccaatagtcttgcttttgctggttgttttgtgacattatataatatctaatcttactgtctaaaaaagaa

SEQ ID NO: 1418 - DNA, 1530 bp, Arabidopsis lyrata
agtccccatgttttaatgacaatggctctactttccacgtttataatattacaaaatctttttttttctcagacacaacttgcttccttcttcttcttcttcttcttcttcttctttagattctctgtagcttgaagtggattcattaatctataatctcgtctctgtatctaaaagcttctgcttttacattatctctgtttcataagcttctacaagcttcaatggcggagtatatctgtttattcggcaaggatagtgcagcgattgttataaagcaaccaaagaaatcaccattgttcttaagaatgatagttttggtgtttgctatggtttgtggtctctacatttgctctgtttgcttaaaacagttaagtaatgtcagtttccaaagctcacaacttgtccaaactactccttttgattctcactcgttaggctttgttactcggattcattacccaaagcctcagacttttaatagagctgaatgtggacataatccggtgaggtactttgcgatattgtcgatgcagagatcaggaagtggttggttcgaaacactgttgaatagtcatagcaatgtgagttctaatggagagattttctcggttttggatcgaaggaaaaacatttcttcaatcattcagactcttgatagagtttataatcttgattggttcacaagtgcttcaaagaacgaatgctctgctgcaattggattcaaatggatgcttaaccagggtttgttggacaaccataaagaaatagtagattactttaaccgaagaggcgtatcggcgatatttctgtttagaaggaatcctttaagaagaatggtttctgtgttggcaaattcttatgaccgttatgctaagcttttgaatggaactcacaagtctcatgttcattctcctgaagaggcagatgcactttctagatataagcccgtaatcaactcgacatcgttgattcacgatctacaagaaacagagaattcagctgcaaaggctttagaatatttcaataccacacgtcatatcgttgtcttctacgaagatctcataacaaatcaaacgacattgaaacaagttcaagagtttttgaacattccagtgaaggatttgtcaagcagacaggtgaaaatacacagaggagatttgtcagatcacataaagaactgggaagatataaacaagacattgaatgggaccgagtacgagaaatttctacgagcagattattagtgtttttaactatcttagagactttcttcaacaatcaactaaagggtttgcaaagtgccttcttgttctacttcttaggttcttcggctcaactacttgttgatcttctcctttctcgtctttttagaacagaaatgattttgttttctttgttctttagtcttctcattgcttgtataggaactcgaaaatgtatttgcttatttttagaggttgattaagttcttttgtgattgttgatttgagtttatgctctgttcttaacattctttttttttttttt

SEQ ID NO: 1419 - DNA, 1384 bp, Eutrema halophilum
agtccccatgttttcatgacagtggctcgactttccacgagggaaactttatattatacaaaatctttgctcagaccaccaaatgcttaaactcttttggcttcttcttcttctttcttctcatattctctggacccggaagaggattcatgaatccatcacgtctctgtaactaagctcctgtttctcgttttctctgttccagaagcttctagaagcatcaatggcggagttcgtctgtttattcggcaaggacagtgcatcgattgttataaagccaccaaagaagtcacctttgttcttgaggatgatagttttggtgtttgctatggtttgtggtctctacatctgctccgtttgcttaaaacagtttggtaatgtcaatctccaaagctcccaacttgttccaaatcctattgattctcgttcattacacgttgttactcggattcattacccaaagccacagacttttaatagagctgaatgtgggcacaatccggtgaggttctttgcgatattgtcgatgcagagatctggaagtggttggttcgaaacattgttgaatagtcataacaatgtgagttctaacggagagatcttctcggttttggatcgaagaagaaacatttcttcaatcattcagactctcgatagagtttataatcttgattggcttacgagcgcttcaaagaacgaatgctctgctgcaattggattcaaatggatgtttaatcagggtttgttggataatcatgaagcaatagtagattactttaaccggagaggtgtctcggctatatttctattcagaaagaaccctctaagaagaatggtctctgtgttggcaaattcttatgaccgttatgctaagttattgaatggaactcacaagtctcatgttcattctcctgaagaggcagatgcactttctaggtataagccggtgatcaactcaacatcgttgatccatgatttacaagaaacagagaatttagctgcaaaggctttagaatatttcaataccacccgtcatatggttgtcttctatgaagatcttattacaaatcgaacgaaattgaaacaagttcaagagtttttgaacattcctgtgaaggatttgtcaagcagacaggtgaaaatacacagaggggatttgtcagatcacatcaagaactgggaagatataaacaagacgttgaatgggaccgagtacgagaaatttctacgagcagattattagtgtttttagccatataaagagactttcttctacactcagctaaagagtttgcaaaatgcaaaagggtcttcttgtttgaagcttttctactttctaggttcttctgctcaactacttgttgatctttcgtttctcctcttt

SEQ ID NO: 1420 - DNA, 1227 bp, Brassica oleracea
acattctgctcttttgattcctcggcttctagaagcatcaatggcggagtttatctgtttattcggaaaggacagtgcatcgattgtaataaagcaaccaaagaagtcgcctctgttcttaagaatgatagtcttagtgtttgcaatggtctgtggtctctacatttgctctgtttgcttaaaacagtttagtttccaaacctcccagcttgttccaaatcctgttggttctcactcatcacacgttctcactcggattcattacccaaagccacagacttttaatcgagctgaatgtgggcacaatccagtgaggttctttgcgatactctcgatgcagagatcaggaagcggttggttcgaaacgttgttgaacagtcacgacaacgtgagttccaacggagagatcttctctgttctggaacgaagaaagaacgtttcttccatcgtcgagactctcgatagagtttataatcttgattggttcacgagcgcttcgaagaacgaatgctctgctgcgattgggttcaaatggatgcttaaccaaggcttgttggctaaccatgtggagattgtggattactttaaccggagaggcgtctcggctatattcttgttcagaaggaatcctctgaggagaatggtttctctgttggcaaactcttatgaccgttacgctaagctgttgaatggaactcacaagtctcatgttcattctcctgaagaggcagatgcactttctaggtacaagcctgtgattaactcgacgtcgttgatccatgatttacaagaaacagagagtttagctgcaaaggctttggagtatttcaataccactcgtcatatggttgttttctatgaagatctgataacaaatcgaacgaggttgaaggaagttcaggagtttttgagcattcctgtgaaggatttgtcaagcagacaggtgaaaatacacagaggagatttgtcggatcatatcaagaattgggaagatataaacaagacattgaatgggactgagtacgagaagtttctacgggcagattactagttttttggttatctaatgactctttcttctacatttaaactaaatgttttgcaacatgcaaaaaaaaaaagtcttcttgttatgaaactttctactctttttttttctgctcaactacttgttgatcttttcctttagtattctcagttagttgtaaatggactggaggattgatt

SEQ ID NO: 1421 - DNA, 1230 bp, Brassica rapa
atagttttatacaaaatctttgctcaaataccaaactcctttggcttcttcttcttcttctttcttctcagattctctggaccaagaagatggattcgtgaatccatatatctcctctctctatctaaccttttgctctttcgcttcctcagcttctagaagcatcaatggcggagttcatctgtttattcgcaaaggacagtgcatcgattgtaataaagcaaccaaagaagtcgcctttgttcttaagaatgatagtcttagtgtttgcaatggtctgtggtctcttcatttgctctgtttgcttaaaacagtttagtctccaaacctcccaactcgttccaagtcctgttgtttctcactcattacacgttctcactcggattcattacccaatgccacagacttttaatcgagctgaatgtgggcacaaccccgtgaggttctttgcgatactctcgatgcagagatcaggaagcggttggttcgaaacgttgttgaacagtcacgacaacgtgagctccaacggagagatcttctctgttctggaacgaagaaagaacgtttcttccatcgtcgagactctcgatagagtttataatcttgattggttcacgagcgcttcgaagaacgaatgctctgccgcgattgggttcaaatggatgcttaaccaaggcttgttagctaaccatgtggagattgtggattactttaaccggagaggcgtctcggctatattcttgttcagaaggaatcctctgaggagaatggtttctctgttggcaaactcttatgaccgttacgctaagctgttgaatggaactcacaagtctcatgttcattctcctgaagaggcagatgcactttctaggtacaagcctgtgattaactcgacgtcgttgatccatgatttacaagaaacagagagtttagctgcaaaggctttggagtatttcaataccactcgtcatatggttgttttctatgaagatttgataacaaatcgaacgaggttgaaggaagttcaggagtttttgagcattcctgtgaaggatttgtcaagcagacaggtgaaaatacacagaggagatttgtcggatcatatcaagaattgggaagatataaacaagacattgaatgggactgagtacgagaagtttctacgggcagattactagttttttggttatctaatgactctttcttctacatttaaactaaatgttttgc

SEQ ID NO: 1422 - DNA, 1340 bp, Brassica oleracea
atacaaaatctctctttgcccagacccttaaaatgctaatctcttttggccttcttcttccttctcagattctctgtagaaaatcaatgaatccatctcctccccctatctaagctccctcttcttctcttctaacgtttgctctgtttcagaagcttccagaagcatcaatggcggagttcatctgtttatacggaaaggacagtgcatctattgtaataaagcaaccaaagagatcacctttgttcctaagaatgatagttttggtgtttgcaatggtctgtggtctctacatttcctccgtctgcttaaaacagttcagtttccaaacctcacaacttgtcccaactcctatcactactcggattcattacccaaagccacagactttcaatagatctgaatgtgggcacaatccagtgaggttctttgcgatactctcaatgcagagatcaggaagcggctggttcgaaacgttgttaaacagtcacgacaacgtgagttccaacggagagatcttctcggttttggaccggagaaggaacgtttcttcaatcgttaagactcttgatagagtttataatctcgattggtttacgagcgcttcgaagaacgaatgctctgctgcgattgggttcaaatggatgcttaaccagggtttgattgataaccaccaagagattgttgattactttaaccggagaggtgtctcggctatatttttgttcagaaggaatcctctgaggagaatggtttctgtgttggctaattcttatgatcgctacgctaagcttttgaatggaacacacaagtctcatgttcattctcctgaagaggcagatgcactttctaggtacaaacctgtaatcaactcaacatcgttgattcatgatttgcaagaaacagagagtttagctgcaaaggcattggaatatttcaataccactcgtcatatggttgtattctatgaagatctcataacaaatcgaacgagactggaacaagttcaagagtttttgaacattcctgtgaagaatttgtcaagcagacaggtgaagatacacagaggggatttgtcagatcacatcaagaactgggaagatataaataagacattgaatgggactgagtatgagaagtttctacgagcagattactaagtgtttttttttgtttttaattatgccatgactcttttcttctacgtttaattaaaggttttgcaaaatgcaaaatagggtctttcttgttttgaaacttctatattagcaactggctgtataggggactggaagatgtatttgcttttggagttaattgctcccttttagagatcaacg

SEQ ID NO: 1423 - DNA, 1246 bp, Brassica napus
ggaaactttataattttatacaaaatctctctgcccagacccttaaaatgctaatctcttttggcctccttcttcttcttccttctcagattctctgtagaaaatcaatgaatccatctcctccccctatctaagctccctcttcttctcttctatcgtttactctgtttcagaagcttccagaagcttccagaagcatcaatggcggagttcatctgtttatacggaaaggacagtgcatctattgtaataaagcaaccaaagagatcacctttgttcctaagaatgatagttttggtgtttgcaatggtctgtggtctctacatttcctccgtctgcttaaaacagttcagtttccaaacctcacaacttgttccaactcctatcactactcggattcattacccaaagccacagactttcaatagatctgaatgtgggcacaatccggtgaggttctttgcgatactctcaatgcagagatcaggaagcggttggttcgaaacgttgttaaacagtcacgacaacgtgagttccaacggagagatcttctcggttttggaccggagaatgaacgtttcttcaatcgttaagactcttgatagagtttataatctcgattggtttacgagcgcttcgaagaacgaatgctctgctgcgattgggttcaaatggatgcttaaccagggtttgattgataaccaccaagagattgttgattactttaaccggagaggtgtctcggctatttttttgttcaggaggaatcctctgaggagaatggtttctgtgttggctaattcttatgatcgctacgctaagcttttgaatggaacacacaagtctcatgttcattctcctgaagaggcagatgcactttctaggtacaagcctgttatcaactcaacatcgttgattcatgatttgcaagaaacagagagtttagctgcaaaggctttggagtatttcaacactactcgtcatatggttgtcttctatgaagatctcataaccaatcggacgagactggaacaagttcaagagtttttgaacattcctgtgaagaatttgtcaagcagacaggtgaagatacacagaggggatttgtcagatcacatcaagaactgggaagatataaataagacattgaatgggactgagtatgagaagtttctacgagcagattactagtgtttaaaaaataataataattatgccatgactctttttctacgtttaattaaag

SEQ ID NO: 1424 - DNA, 1697 bp, Brassica napus
tcagattctctgtagaaaatccatgaatccatctcctccccctatctaaagctccctcttcttctcttctaacgtttgctctgtttcagaagcttccagaagcatcaatggcggagttcatctgtttatacggaaaggacagtgcagcgattgtaataaagcaaccaaagagatcacctctgttcctaagaatgatagttttggtgtttgcaatggtctgtggtctctacatttcctccgtctgcttaaaacagttcagttccaacctcacaacttgtcccaactcctatcactactcggattcattacccaaagccacagactttcaatagatctgaatgtgggcacaatccagtgaggttctttgcgatactctcaatgcaaagatcaggaagcggctggttcgaaacgttgttaaacagtcacgacaacgtgagttccaacggagagatcttctcggttttggaccggagaaggaacgtttcttcaatcgttaagactcttgatagagtttataatctggattggtttacgagcgcttcgaagaacgagtgctctgctgcgattgggttcaaatggatgcttaaccagggtttgttggataaccaccaagagattgttgattactttaaccggagaggcgtctccgctatatttttattcagaaggaatcctctgaggagaatggtttctgtgttggctaattcttatgatcgctacgctaagcttttgaatggaacacacaagtctcatgttcattctcctgaagaggcagatgcactttctaggtacaaacctgtaatcaactcaacatcgttgatccatgatttgcatgaaacagagagtttagctgcaaaggcattggaatatttcaataccactcgtcatatggttgtattctatgaagatctcataacaaatcgaacgagactggaacaagttcaagagtttttgaacattcctgtgaagaatttgtcgagcagacaggtgaaaatacatagaggggatttgtcagatcacatcaagaactgggaagatataaacaagacgttgaatgggactgagtatgagaagtttctacgagcagattactaagtttttttttttttcttttaattatgccatgactcttttcttctacgtttaattaaaggttttgcaaaatgcaaaatgcaaaatagggggtctttcttgttttggaacttatatattagcaactggcttgtataggggactggaagatgtttgcttttggagttaattgctcccttttagagatcaacgtgaaaattctttcttaaatgttcttagtaagacacttatttcatggttgaaatgggtctctaaaaaggcccagcaaaccatcaagaatcctgttttttaagatgctaattttgtggccttgatataattcatgttgggcctcttctcgtcgacaaaaagattaatcatggtggagaaataaatgttctcatgcctacacaattaccattccaaatttattttttctagttttttcttataaaatagtagcattctataataaaaatgtgtatcaccaacatattattttatttttccctatttttgctcaatatattttattttaattttacaactaatagtttttatttatgaaagtcaaaaattaactccatttattttaacttttactatatttacttaaaattatgatg

SEQ ID NO: 1425 - DNA, 1296 bp, Brassica napus
gattcgtgaatccatatatctcctctctctatctaacctttgctctttcgcttcctcagcttctagaagcatcaatggcggagttcatctgtttattcggaaaggacagtgcatcgattgtaataaagcaaccaaagaagtcgcctctgttcttaagaatgatagtcttagtgtttgcaatggtctgtggtctctacatttgctctgtttgcttaaaacagtttagtttccaaaccgcccagcttgttccaaatcctgttggttctcactcatcacacgttctcactcggattcattacccaaagccacagacttttaatcgagctgaatgtgggcacaatccagtaaggttctttgtgatactctcgatgcagagatcaggaagcggttggttcgaaacgttgttgaacagtcacgacaacgtgagttccaacggagagatcttctctgttctggaacgaagaaagaacgtttcctccatcgttgagactctcgatagagtttataatcttgattggttcacgagcgcttcgaagaacgaatgctctgcagcgattgggttcaaatggatgcttaaccagggcttgctggctaaccacgaggagattgtggattactttaaccggagaggcgtctcggctatattcttgttcagaaggaatcctctgaggagaatggtttctctgttggcaaactcttatgaccgttacgctaagctgttgagtggaactcacaagtctcatgttcattctcctgaagaggcagatgcactttctaggtacaagcctgtgatcaactcgacgtcgttgatccatgatttacaagaaacagagagtttagctgcaaaggctttggagtatttcaataccactagtcatatggttgtttctatgaagatctgatagcaaatcgaacgaggttgaaggaagttcaggagtttttgagcattcctgtgaaggatttgtcaagcagacaggtgaaatacacagaggagatttgtcggatcatatcaagaattgggaagatataaacaagacattgaatgggactgagtacgagaagtttctacgggcagattactagtttttggttatctaatgactctttcttctacatttaacctaaatgtttgcaaaatgacaaaaaaataagaaaaaagtcttcttgttatgaaactttctactctttttttttcctgctcaactacttgttgatcttttcctttagtttacccagttagttgtaaagggactggaagatggattgcttttagagatcaattaagtttgaatgtga

SEQ ID NO: 1426 - DNA, 1855 bp, Brassica rapa
gaaactttataattttatacaaaatctctctttgcccagacccttaaaatgctaatctcttttggccttcttcttccttctcagattctctgtagaaaatcaatgaatccatctcctccccctatctaagctccctcttcttctcttctaacgtttgctctgtttcataagcttccagaagcatcaatggcggagttcatctgtttatacggaaaggacagtgcatctattgtaataaagcaaccaaagagatcacctttgttcctaagaatgatagttttggtgtttgcaatggtctgtggtctctacatttcctccgtctgcttaaaacagttcagtttccaaacctcacaacttgtcccaactcctatcactactcggattcattacccaaagccacagactttcaatagatctgaatgtgggcacaatccggtgaggttctttgcgatactctcaatgcagagatcaggaagcggctggttcgaaacgttgttaaacagtcacgacaacgtgagttccaacggagagatcttctcggtcttggaccgaagaaggaacgtttcttcaatcgttaagactcttgatagagtttataacctcgattggtttacgagcgcttcgaagaacgaatgctctgctgcgattgggttcaaatggatgcttaaccagggtttgattgataaccaccaagagattgttgattactttaaccggagaggtgtctcggctatttttttgttcaggaggaatcctctgaggagaatggtttctgtgttggctaattcttatgatcgctacgctaagcttttgaatggaacacacaagtctcatgttcattctcctgaagaggcagatgcactttctaggtacaagcctgttatcaactcatcatcgttgattcatgatttgcaagaaacagagagtttagctgcaaaggcattggaatatttcaacactactcgtcatatggttgtcttctatgaagatctcataacaaaacggacgagactggaacaagttcaagagtttttgaacattcctgtgaagaatttgtcgagcagacaggtgaagatacacagaggggatttgtcagatcacatcaagaactgggaagatataaataagacattgaatgggactgagtatgagaagtttctaggagcagattactagtgttttaaaaaaataattaattatgccatgactctttcttctacgtttaattaaaggttttgcaaaatgcaaaatagggtctttcttgttttgaaacttctatattagcaactggctgtataggggactggaagatgtatttgcttttggagttaattgctcccttttagagatcaaccaagttgcccttagtaagacacttattttcatgggtgaaataggcctctaaaaaggcccatgaaaaccatcaagaatcctgtttttaaggagttttttaagatgctaattttgtggccttaatataatcatgttgggcctcttctcgtcgacaaagattaataatcatggtggagaaattaatgttttcatgtcataacacaattaccattccaaatgtattttttctatttttttcttataaaatagtagcattctataataaaaatgtgtatcaccaacatattattatatttttctctaattttttttaattatattttattttaattttacaaccaatagtttttatttatgaaagtgaaaattaactccatttattttaacttttactatatttacttaaaattatgatgttatctaaactaaatatttcttaaaacattttttattttaataataatgcgactctattttcttataaaaattatacttctcaaaa

SEQ ID NO: 1427 - DNA, 1136 bp, Eutrema parvulum
ttgatgttgttgtaacaggacagttcagcgattgttttaaaacaaccaaagaagtcacctttgttcttaaggatgatagttttggtgtttgctatggtttgtggtctctacatttgctccgtttgcttaaaacagtttggtaatgtcagtctccaaagctcccaacttgtttcaaaccctattgattctcgctcattacacgttgttactcggattcactacccaaagccacagacttttaatagagctgaatgtgggcgtaatccggtaaggttctttgcgatactgtcgatgcagagatcaggaagcggttggtttgaaacattgttgaatagtcataacaatgtgagttctaacggagagattttctcggttttggatcggaggagaaacatttcttcaatcattcagactctcgatagagtttataatctcgattggtttacgagcgcttcaaagaacgaatgctctgctgcaattggattcaagtggatgcttaaccagggtttgttggataaccataaagaaatagtagattactttaaccggagaggtgtttcggctatatttctattcagaaggaaccctctaagaagaatggtttctgtgctggctaattcttatgatcgttacgcgaagctattgaatggaactcataagtctcatgttcattctcctgaagaggcagatgcactttctaggtacaagccagtaatcaactcaacatcgttgatccacgatttacaagaaacagagaatttagctgcaaaggctttagaatatttcaataccactcgtcatatggctgtcttctacgaagatctcataacaaatcgaacgagattgaaacaagttcaagagtttttgaacattcctgtgaaagatttgtcaagcagacaggtgaaaatacacagaggggatctgtcagatcacatcaagaactgggaagatataaacaaaacattgaatgggactgagtacgagaaatttctacgagcagattattagtgtttttaactttctaaagactctttcttctatttgcaaaatgcaaaaagaaaaaaggtcttcttgtttagaaactgtctacttcttaggttcttctgctcaaccacttgttgatcttcctctttcac

SEQ ID NO: 1428 - DNA, 2623 bp, Zea mays
cgccgcttatcatgcgctggcgaaggcgattgagcgagttcagcggctaatagattttcagttttatttccgggagaatgcggggtggcggcggggcttcctggctttcgtttcgcggcgtggtggtggaggaagaagaggcggtggtttcggcgccggaaaagccaatgcggcgggggcggcggaggtggggagcggaggtggacgacggctactcgccgagctccacgggcggcggcgggagcagctgctgcgattccttcggctgcgactcgcctttggccgggttcgtgcgcccagatggtgacccagacacagatctggagacagatgggttggccacttccacctccagtgcctttaccgagcggcaggacgacgaagcggaagaggcgctgtacggggtgaaggaagaggagtgggctcagatacaagaaccagccaagaatccggcattccgtgccaccccagaatgccacaaacagcggtaccggacggatgctgctgttcttttgcatggtaggaaggggtcgaaacagcggccggcctcacttgacctcggtagccctgggttccatggagccacgttttctccaagtttcgtgattggtggtgtggggttgatgaacaaaggacttggagcatcagtcatcaggtcagacgtgtttcatagtcctgggacgccgaactatccgcgccaccgtgcatcagtgttagggtgccataaagggtggagctctgagagagttccacatccttctaaaggaaataggcggtacccaggcagcagcatggcatttccttacagcaatgggaggacattgccctcgaaatgggaggatgcagagaggtggatcttcagtcccaattccagcgacgcgcttggaagaactacggttgctcatgctcggcgaccgaagtctaaaagtggccccctggggcctccaggaagacttggtggacagtattcatctgtttcttcagtgtcattgcttgataatgggagagctggacctattacagcaaattcaccttttgcggctggagtactaatgccggaacatgtttgtgaaggaaaaagtacaaatggaacctattcaagtagaccaattggtaacgaaatcaacattggaagaggagtcaaaatttgtccactgaatggtgggtctcatcctgttcgaacttccagagttcgccagcgattagattatgcagtcgaatcatctgtttcattgcctagcacgcaagaatctgtccaagacgagcaggttgaaatcacagaagattcagcttctactattgcttctataatttctagaaaagatgctgcaacccagaccagtccagagctaagtaggtcctcttcacccaacactagaccaacatttaatggttccttgtcaacagaacaagtgaaagagaacgggagctgtttgtcagatcttgatatcagggatgttcagatggatgatcgagtgactttgactaggtggtcaaagaaaaatgtaacacggtcgtctaacaagaattcaacaaacataatagagtggagcgaaaagacagtggaatcaaaatcttcgtcctggggctttgccaaagcgaagtgcatttctaagattgatagagaggacacagaaattactgcatgggagaatattgaaaaagcaaaagctgatgcagcaattcagaagttagtgattaagttagagaagaaaaggtcatcttcgcttgataagattttgaacaccctcaaatctgctcaaaggaaatcccaggtgatgcatgagcatgagcgtgatgcagtaacagcaaaccaagatggaaaaggctctaggaaggcaaaaaagagagcacaactcagcaagaatggccaaatcagttcactgagtggctgcttcacttgccatgctttctgatacatgtaattccaaaattgagaatcaggatccgacaaattccttcgcattccatgcaccaccttcatgttccccacatcaaaatctgggtgaagttcggagatccatcacatatcagtacataatatgatgatcccacagctggagattagacagagatctttcgaagatgctagctgcaggctccagctgctatgatagggacaatgccaaggggacaaataaaatgcagcacgaaggaaaggaggaacagtactgcgtacaccccatgtgcccgggtcgatgcctcctttatcattgtgctctgccttgtagctaggcactgtgaggctctgattgcaatcttgttgccaaagctgtatggatcatactaagagcaattccattgcacccaagggacagcaaaatcttgaggtacgaggagaaatcatgtcctgcttgtgcgtgtgactatttgagtgctctgctgggcgctggaagggaaccacgccccgttgtctcttttgtttggtacagtgctttatgaaggtgccatcggggtgactacttgcatttgcttttcagcagcgtcggtgtgttgtgttgtgtgtacctcttctctttgggaaactgagatgttggtttggcctggaaacttcggaatatcataaatatatgtatatacagggacgaaaataatcatcactatgacgatttgttgtgggtgt

SEQ ID NO: 1429 - DNA, 2674 bp, Setaria italica
gccgcttatcaatgcgctggcgacggagattgagcgagttcagcggctagaaggatttcgtttcttttttcctccgagagaatgcggggtggcggcggcggttccgggcttgggtttcggggcatggtggtggaggagggagaggaggaggaggtggtctcggcgccggagaggccaatgcagcgccgccgccggcggtggggggtggaggtggacgacggctactcaccgagttccacgggcggcggcgggagcagctgctgcgactccttcggctgcgactcgcctttggccgggttcgtgcgcccagatggtgacccagacacagatctggagacagatgggttggccacttcctcctccagtgccttcacggagcggcaggacgacgaggaggtgctgtgcggggtgaaggaagaggagtgggcgaaggtacaagaatcggccaaaaatctagcaggccgtgccactccagaatgccacaacgagcggtacggaacggaggctgctgttcttttgcatggtaggaaggggtcgaaacagcgaccagcctcgctcgacctcagtagccctgggtttcatggagccacattttctcccagtttcgtggttggtggtgtggggttgatgaaagcatcacacatcaggtcagacgtgtttcatagtcctggaacaccgaactatccacggcaccgtgcatcagtgttggggttccagaaagggtggtgctctgagagagtgccgcatccttctaaagcaagtaggaggtaccctgggagcagcatggcatttccttacagcaatgggagaacattgccctcgaaatgggaggacgctgagaggtggatcttcagtcctaattccagtgatgctcttataagaagcacggttgctcatgctcggcgaccaaagtctaaaagtggccccttgggacctccgggaagacttggcggacagtattcatctgtttcttcggtgtcattgcttgacagtgggagagctgggcctattacatcaaattcacctttcatggcaggagtactaatgccggaacatgtttgtggtgggaaaaatgcaaatggaatgtatttgggtagaccagctggtgacgaaaccgccataggaagcagtgtcaggttttgcgcaccgaatggtgtgtctcatgctattcgatcatcaagagttcgtcgtcaattagatgctgctgtcgagtcatctgcttcattgcctagcacacaagaatctatccaaggtgagcaggttgaaatcacagaagattcagctactacttttgcctcaatgatttctaggaaagatgctgcaactcaaactagcccagagctaagtaggtcctcttcgcccaacaccagaccaacatttacccgttcattgtcgacgcaacaagtcaaagagagcgagagctgtttctcagatcttgagatcagggatgttcagatggatgatcgagtgactctgactaggtggtcaaagaaaaatgtaacacgatcatctaataagaattcaacaaacataatagagtggaaggaaaagacagtggaatcaaaatcttcgtcctggggctttgccgaagcaaagtgcatatctaggattgagagagaggacgcaaaaattactgcatgggagaatattcaaaaagcaaaagctgaggcagcaattcagaagttagtgattaagctcgagaagaaaagatcatcttcacttgacaagattttgaacacactcaagtctgcccaaagaaaagcgcaggtgatgcgtgagcgtgatgcagcaacagcaaaccaagatgaaaaaggctctaggaaggcaaaaaagacagcacagcttagcaagaatggccaaatcagttcgctgagtggctgcttcacatgtcatgctttctgatacatgtgcctccacaattgagattcggcccgaggaattcctttggattctctacatcaaaatcagggagaagttcagacatccatcatatttcagtacataataacgatacttctgcatctggaacttacgtactcaaatcttccaaagatgctagctgcagctgctacgatagggaccgtgcaatatctacagtgctgctctgtgttagtttcgattgcgccaaggggacaaaagaaaatggagccacgaacgaaagggggaatggttctgcatacaccccatgtggtcgatgccccggcataacgatagaggcttcctttatcattgttccatttcctagccagccttgtatgctgtagctaggcactgtgagcctgtgatggctgtgggcttgccagagctgatatggatcatacgaagtgcaattccagatcgagagacaacagaatcttcaggtatgaggagaaagcattgcctgcttgtgctggtgagcaccctgctgatgttgcaagggaaccatgctactttgttgcttttgtttggtacagtgctttacaagcatgcgatggtggtggctgcttgcatttgctttcagcatcagcgtcggtgtgtacctcttttaggaacttgagatgctggtttggcctggatactttagaatatctttgcaaatgtacatatatacctttggcattacagcatctgtttcctatgttgtgggtgtttttacagcagttttcatctggaatgttagtggtttcttttgaca

SEQ ID NO: 1430 - DNA, 3833 bp, Panicum virgatum
caatgcgctgccgacggcggttgagcgagatcagcggctagaaggtggatttgttttgtttccggagagaatgcggggcggcggcggttccgggcttgggtttcgcggcgtgctggtggaggaggaaggggaggaggtgacctcggcgccggagaggccaatgcggcgccggcgccggcggtggggtgtggaggtggacgacggctactcgccgagctccacgggcggcggcgggagcagctgctgcgactccttcggctgcgactcgcctttggctgggttcgtgcgcccagatggtgacccagacacagatctggagacagatgggttggccacttcctcctccagtgcttctgcagccttcacggagcggcaggacgacgaggaggtgctgtgcggggtgaaggaagaggagtgggcgaagatacaagaacaggccaaaaatccggcaggccgttccaccccagaatgccacaaccagcggcatggaacggaggctactgttcttttgcacggtaggaaggggtcgaaacagcgaccagcctcgcttgacttcggtagccctgggtttcatggagccacattttcaccgaattttgtggttggtggtgtgggtttgatgaacaagggatttgtagcatcacacatcaggtcagacgtgtttcatagtcctggaacaccaaactatccgcggcaccgtgcatcagtgttggggttccagaaagggtggtgctctgagagagtgccgcatccttccaaaggaagcaggaggtaccctgggagcagcatggcatttccttacagcaatgggaggacattgccctcaaaatgggaggacgcagagaggtggatcttcagtcctaattccagtgaagctctcggaagaaacacagttgctcatgctcggcgaccaaagtctaaaagtggccccttgggacctccgggaagacttggcggacagtattcatctgtttcttcagtgtcactacttgacagtgggagagctggacctattacatcaaattcacctttcgtggcaggagtactaatgccagaacatgtttgtggaggaaaaaatgcaaatggaacgtattcgggtagaccagctggtgatgaaaccactgttggaagcaatctcaggttttgtccaccaaatggtggatctcatgctattcgatcttccagagttcgtcgtcgattagatgctgccatcgagtcatcttcttcactgcctagcacccgagaatctatccaaggtgagcaggttgaaatcacagaagattcggctactacatttgcctcgatgatttccaggaaagatgctgcaactcaaactagcccagagctaagtgggtcctcttcccccaacactagaccaacatttacccgttcacagtcgacgcaacaagtcaaagagagcgagagctgtttctcagatcttgagatcagggatgttcagatggatgatcgagtgactctaactaggtggtcaaagaaaaatgtaacacgatcatctaacaagaattcaacaaacataatagagtggaaggagaagacagttgaatcaaaatcttcgtcctggggctttgccgaagcaaagtgcatatctaagattgagagagaggatgcaaaaattaccgcatgggagaatattcaaaaagcaaaagctgaggcagcaatgcagaagttagtgattaagctcgagaagaaaaggtcatcttcgctggacaagattctgaacaccctcaagtctgctcaaaggaaagcacaggtgatgcgtgagcgtgatgcagcaacagcaaaccaagatgaaaaaggctctaggaagggaaaaaagacagcacagcttagtaagaatggccaaatcagtgcactgagtggctgcttcacttgccatgctttctgatacatgtgcttccactccacaatagagtaagttgcattcagactattactgtgcatcctttttgggtattgaattttcaagtagcttgatgctccatttctcagtgaagagtattagctgcccttgcagcagcatctgttctgaactttctgttgcatcaagcaagacagtagtttgttgacaacaaggaaattgttaaccaaccgtgtgcctatagtatgaaccactttaattgactttatgtttgcatagtattcaaaattgtaccagccaaatcatcatagttgctttcacatctctggcagattgtgctaaaagagccatactaatattaggttacccaaataaatcaccctaaattttacattcacagaacttcctcaattttttttaggaaaacaggaggggcgagacattccattgatcagctccttcagatttataggttcgtttaaggatatacatatacattgtttagagtctttgtaatgcaagtcttgaggttaatagtattgaggctagttcagttcttcaggctgtaaaaccgcctcaaataacactttcggagttttatttattatagtaatttctccatagatacaaggacagattcttaagtctgctatgatcatctggtcagatgcagtattttcagcaccaatttccttttcctacaactacaaatgtatgccttttaacttcaggacttgctatgctcaggagttggaacctgaggaattccttcatattctcaacatcaaaatcagggtgaagttcgtaggtccatcacatttcagtacataatagctgcagctgctatgatagggaccatgcagtatctacagttctgttctgtgttagtttctattctgccaaggggacaaaagaaaatgctgccacgaacgaaaaggggaacaggttctgcaaacactccatgtgcctggcggatgcctcggcataacgataaaggcctcctttatcattgttccattacctagccagccttgtatgctgtagctagttactgtgagcctgtgatttagaatgtgcttgccaaagccgatatggatcatacgaagtgcaattccagatcaacaggcaacagaatcttcaggtgaggagaaagcacggcctgcttgtgctggcgagtagagtgccctgctgggtgttggaacgggaacaaaagctgcttttgtttggtacagtgctttacgagcatgcgaatggtggtgactacttgcacctgctttcagcagcgtcggtgtgtatcctcttttgggaatatgagatactggtttagtggtttagcctaatatactatggaatgtctttgcatatgtacatgtatgccttcgcgtcacagcattttcttgtatgctgatttgttgtgggtgtcattttacaagcagcactacattcgtctggaatgatagtggtttcttcaccatattcttcacacgcttgggtggcatattttacgttatctctcagtgggccatttggtcggacaggataagataacttttgacaaggctagtttggtgtgcacttgttcgcttgtggtgcgtgcacctgtccgtcagtccgtggttgtctgctggtgttcccggcttcccgcacatgtttagttcttaaaaaaaaatttctacagtatccgtcacatcaaatgttcgaacacatacatggagcattaaatagaattaaaaaaataattaattatacagtctaactgattagcacgagatgaatcttctaaacctaattagtccatgattagacattatttgtcaagtaacaacgaaatattctacagtaccaaaattcaaactttttcgcgaactaaacaggcctttgattattaatgtgtgttttcttctgttcattgctgccggactgtgatatgatcgcaacaatccatgtcacctga

SEQ ID NO: 1431 - DNA, 1903 bp, Panicum virgatum
ccgccccagcgacctctattaaacgtcgacacctcacgctgccacacccgccgcttatcaatgggctgccgacggcgattgagcgagttcagcggctagaagaatttcttttgcttccggagagaatgcggggcggcggcggcggttccgggcttgggtttcccggcggcgtgctggtggaggaggaaggggaggaggtggtctcggcgccggagaggccaatgtggcgccggcggtggggagtcgaggtggacgacggctactcgccgagctccacgggcggcggtggaagcagctgctgcgactccttcggctgcgattcgcctttggctgggttcgtgcgcccagatggtgacccagacacagatctggagacagatgggttggccacttcctcctccagtgcttctgcagccttcacggagcggcaggacgacgaggaggtgctatgcggggtgaaggaagaggagtgggcgaaggtacaagaaccggccaaaaatccggcaggccgttccaccccagaatgccacaaccagcagcaccgaacggaggctactgttcttttgcacagtaggaagggatcgaaacagcggccagcctcgctcgacttcggtagccctgggttccatggagccacattttcaccgaatttcgtggttggtggtgtgggtttgatgaataagggacttgtagcatcacacatcaggtcagacgtgtttcatagtcctggaacaccgaactattcgcggcaccgtgcatcagtgttggggttccagaaagggtggtgctctgagagagtgccgcatccttccaaaggaagtagaaggtaccctgggagcagcatggcatttccttacagcagtgggaggacattgccctcgaaatgggaggacgcagagaggtggatattcagtcctaattccagtgaagctctcggaagaagcacggttgctcatgctcggcaaccaaagtctaaaagtggccctctgggacctccgggaagacttggcggacagtattcatctgtttcttcagtgtcactgcttgacagtgggagagctggacctattacatcaaattcaccttttgtggcaggagtactaatgccagaacatgtttgtggagggaagaatgcaaatggaacatattcgggtagaccagctggtgatgaaaccactattggaagcaatgtcaggttttgtccaccgaatggtggatctcatgctattcgatcttccagagttcgtcgtcgattagatgctgccattgaatcatcttcttcattgcctagcaccagagaatctatccaaggtgagcaggttgaaatcacagaagattcggctactactttcgcctcgatgatttccaggaaagatgctgcaactcaaactagcccagagctaagtaggtcctcttcgcccaacaacactagaccaacatttacccgttcgcggtcgacgcaacaagtcaaagagagcgagagctgtttctcagatcttgagatcagggatgttcagatggatgatcgagtgactctgactaggtggtcaaagaaaaatgtaacacgatcatctaacaagaattcaacaaacataatagagtggaaggaaaagacagttgaatcaaaatcttcgtcctggggctttgccgaagcaaagtgcatatctaagattgagagagaggatgcaaaaattaccgcatgggagaatattcaaaaagcaaaagctgaggcagcaattcagaagttagtgattaagctcgagaagaaaagatcgtcttcgctggacaagattttgaacaccctcaagtctgctcaaagaaaagcgcaggtgatgcgtgagcgtgatgcagcaacagcaaaaccaaagaatgaaaaaaaggacgtctaaggaagggaaaaaaa

SEQ ID NO: 1432 - DNA, 2387 bp, Saccharum officinarum
gtaagcacaacgctgtaaccagctcacagtttggagtcttactagtgtctcaatcggtctgagagcaacctgaccgccctttaaaacgagctagtgttgttaagcgtctgcagcctttaccgagcggcaggacgacgaagcggaggaggtactgtgcgggttgaaggaagaggagtgggctcaggtgcaagaaccagccaagaatccggcaggccgtgccaccccagaatgccacaaccagcggtaccggacggaggctgctgttcttttgcatggtaggaaggggtcaaaacagcggccagcctcccttgacctcggtagccctgggttccatggagccacgttttctccaagtttcgtgattggtggtgtggggttgatgaacaaaggacttggagcatcactcatcagatcagacgtgtttcatagtcctgggacgccgaactatccgcggcaccgtgcatcggtgttggggtgccagaaagggtggagctctgagagagttccacatccttcgaaaggaagtaggaggtacccaggcagcagcatggcatttccttacagcaatgggaggacattgccctcgaaatgggaggatgcagagaggtggatcttcagtcccaattccagtgatgcgcttggaagaactacgattgctcatgctcggcgaccaaagtctaaaagtggccccctggggcctccaggaagacttggtggacagtattcatctgtttcttcggtgtcattgcttgatagtgggagagctggacctattacagcaaattctccttttgcggcaggagtactaatgccggaacatgtttgtggaggaaaaaatacaaatggatcctattcaagtaggccaattggtgacgaaatcaacattggaagaggagtcaaaatttgtccactgaatggtgggtctcatcctattcgaacttccagagttcgccagcgattagattatgcagtcgaatcatctgcttcattgcctagcacgcaagaatctatccaagacgagcaggttgaaatcacagaagattcagcttctattgcctctataatttctaggaaagatgctgcaacccagaccagcccagagctaagtaggtcctcttcgcccaacaatagaccaacatttaatcgttccctgtcaacagaacaagtgaaagatagcgggagctgttcctcagatcttgatatcagggatgttcagatggatgatcgagtgactctgactaggtggtcaaagaaaaatgtaacacggtcatctaacaagaattcaacaaacataatagagtggaaggaaaagacagtggaatcaaaatctccgtcctggggctttgccgaagcgaagtgcatatctaagattgatagagaggacacaaaaactactgcatgggagaatattcaaaaagcaaaagctgaggcagcaattcagaagttagtgattaagctcgagaagaaaagatcttcttcgctggataagattttgaacaccctcaagtctgctcaaagaaaagcccaggtgatgcgtgagcctgagcgtgatgctgtaacagcaaaccaagatggaaaaggctctaggaaggcaaaaaagagagcgcagcttagcaagaatggccaaatcagttcgctgagtggctgcttcacttgccatgctttctgatacatgtaattccaaaattgagaatcaggatctgagaaattccttcgtattccctacattaccttcatgttctccacatcaaaatgtggatgaagttcagagatccatcacatgtcagtacataatatcgataatcctgcagctggaaatcacagattcagatctttcgaagatgctagctgcaggcctcagctgctatgataggaacaatgcaatatctacagtgctgctctttgttagtttcgattctgccaaggggacaagaaaatggagcacgaaggaaaggaggaacggttctgcctacaccccatgtgccccgttgatgcctcctttatcattgtgccattgcctggtctgccttgtagctaggcactgtgagcctgtgaggctctgatggcgatcttgttgccaaagctgtatcgatcatactatgtgcaattccataacaagagacagcaaaatcttcaggtacgaagagaaagcatggcctgcttgtgcgtgtgactatgtgagtaccaccatgctgggtattggaagggaaccacgcccctttgtttcttttgtttggtacagtgctttgcgaacatgccatggtgccatggtggtgactacttgcgtttgcttttcaacagcgtcggtgtgtgcctcttttaggaaactgagatgttggtttggcctggaaacttccgaatatcttcacatatatatgtacatatgg

SEQ ID NO: 1433 - DNA, 2512 bp, Pennisetum glaucum
cctgcggacccgctctcccgatctcgaaggactcgccgagctccacgggcggcggtgggagcagctgctgcgactccttcggctgcgactcgcctttggccgggttcgtgcgcccagatggtgacccagacacagatctggagacagatgggttggccacttcctcctccagtgcttctgcagccttcacggagaggcaggacgacgaggtgctgtgcggggtgaaggaagaggagtgggcgaaggtacaagaatcggccaaaaatctagcaggccgtgccactccagaatgccacaaccagcggtaccgaacggaggctgctgttcttttgcatggtaggaaggggtcgaaacagcggccggcatcgctcgacctcagtagcccaggcttccatggagctacattttctccggagtttttggtggtttggtggtgtgggtttgatgaaagcatcacacatcaggtcagacgtgtttcatagtcctggaacactgaactatccacgacactgtgcatcagtgttggggtttcagaaagggtggtgctctgagagagtgccgcatccttctaaaggaagtaggaggtaccctgggagcagcatggcatttccttacagcaatgggagaacattgccctcgaaatgggaggatgcagagaggtggatcttcagtcctaattccagtgacgctcttggaagaagcacggttgctcatgctcgccggccaaagtctaaaagtggccccttgggacctccgggaagacttggtggacagtattcatctgtttcttctgtgtctttgctggacagtggaagagctgggcctattacatcaaattcacctttcatggcaggagtactaatgccggaacatgtttgtggtgggaaaaatgcaaatggaacatatttgggtagaccagctggtgacgaaaccgccattggaagcagtgtcaggttttgcccaccgaatggtgggtctcatgctgttcgatcatccagagttcgtcgtcgagtagatgctgctgtcgagtcatgtgcttcattgcctagcacacaagaatctatccaaggtgaacaggttgaaattacagaagattcagctactacttttgcctcaatgatatataggaaagatgctgcaactcaaactagcccagagctaagtaggtcatcttcgcccaacaccagaccagcatttacccgttcattgtctacgcaacaagtcaaagagagcgagagctgtttctcagatcttgagatcagggatgttcagatggatgatcgagtgactttgactaggtggtcgaagaaaaatgtaacacgatcatctaataagaattcaacaaacatgatagagtggaaagaaaagacagtggaatcaaaatcttcgtcctggggctttgctgaagcaaagtgcatatctaggattgagagagatgacgcaaaaattactgcgtgggagaatattcaaaaagcaaaagctgaggcggcaattcagaagttagtgattaagctcgagaagaaaagatcatcttcacttgacaagattttgaacaccctcaagtctgctcaaagaaaagcgcaggtgatgcgtgagcgtgatgtagcaacagaaaaccaagatgaaaaaggctctaggaaggcaaaaaagacggcacagcttaaaaaaaatggccagatcagttcactgagtggctgcttcacttgtcatgctttctgatacatgtacctccacaattgagaatcgcccctgaggaatccctttgtttctctaccatcaaaatcaggatgaagttcagagatccatcacatttcagtacataaatacataatagccacacttctgcatccagagcttacgcgcacaaatcttccaaagatactagctgcagctgctaggatagataccggtgcagtatctacagtcctgctcggtgttagtttcgattgtgccaaggggacaaaagaaaatggatccacaaacgaaagggggaatgattctggctgcatacaccccatgtgcctggtcgatgccccggcataacgatagaggtctcctttatcatttgttccatttcctagccagccttgtatgctgtagctaggcactgtgagcctgtgatggctatgtgcgccagagctgatatggatcatacgaagtgcaattccagatcgagagacaacagaatcttcaggtatgaggagaaagcatcgcctgcttgtgctggtgtgagtaccctgctggatgttgcaagggaaccatgctgctttgctgcttttgtttggtatacagtgctttacaagcatgcgatggtggtggctgcttgcatttgctttcagcaccagcgtcggtgtgtaccctttttaggaaatgctgctggtttggccctggatgctttggaatatctttgcaaatgtacatatatgcctttggcattgcagcatttttcttcgtattttgtgggttcattttacagcagttttcatctggaatgctagtggtttcttcaaca

SEQ ID NO: 1434 - DNA, 2083 bp, Echinochloa colona
ccacgggcggcggcaggagcagctgctgcgactccttcggctgcgactcgcctttggccgggttcgtgcgcccagatggtgacccagacacagatctggagacagatgggttggccacttcctcctccagtgcttctgcaccattcacggagcggcaggacgaggaggaggtgctgtgcggggtgaaggaagaggagtgggcgcaggtacaagaatcagccaagaatccagcaggccgagccaccccagaatgccccaaccagcgctacggaacggaggctgctgttcttttgcacggtaggaaggggtcgaaacagcgaccagcctcgctcgacttcggtagtcctgggttccatggagctacattttctccgaattttgtggttggtggtgtggggttgatgaacaagggacttgtagcatcacgcatcaggtcagacgtgtttcatagtcctggaacaccgaactatccacggcatcgtgcatctgtgttggggttccagaaagggtggtgctctgagagagtgccacatccttctaaaggaagtaggaggtacccagggagcagcatggcatttccttatagcaatgggaggacattgccctcaaaatgggaggacgcagagaggtggatcttcagtcctaattccagtgatgctcttggaagaagcacaattgttcatgctcggcgaccaaagtctaaaagtggccccttgggacctccgggaagacttggtggacagtattcatctgtttcttcggtgtcaatgcttgatagtgggagagctggacctattacatcaaattcaccttttgtggcaggagtactaatgccggaacatgtctgtggagggaaaaatgcaaatggaatgtatataggtaggctagctggtgaggaaaccaccattggagatggtgtcaggttctgtccaccgaatggtgggtctcatgctgttcgatcttccagagttcgtcgtcgattagatgctgccgtcgagtcatctgcttcattacctagcacccgagaatctactggaggtgatcaggttgaaatcacagaagattcagctacaactattgcctcagtagtttccaggaaagatgctgcaactcaaactagcccagatctaagtaggtcctcttcacccaacaccagaccaacatttacccgttcactctcgatgcaacaagtcaaagagagtgagagctgtttgtcagatcttgagttcagggatgttcagatggatgatcgagtgactcttactaggtggtcgaagaaaaatgtaacacggtcgtctaacaagaattcaacagatataatagagtggaaggaaaaagcagtggaatcaaaatcctcatcctggggctttgctgaagcaaagtgcatatctaagattgagagaaaggatgcaaaaattactgcatgggagaatattcaaaaagcaaaagctgaggcagcaattcagaagttagtgattaagctcgagaagaaaagatcatcttcactggacaagatttggaacaccctgaagtctgctcaaagaaaagcgcaggtgatgcgtgagcgtgatgcagcaacggcaaaccaagatgaaaaaggctctaggaaggcaaaaaagacagcacagcttagcaggaatggccaaatcagttcactaagtggctgcttcacttgccatgctttctgatacatgtacttccacatttgagaagtggatccaatcaattcctccgtatttctacatcaaaatcatggtgaagtcaagatccatcacattacagtacgtaatactgatatgtctgcatctggagcttacatactcaaatcttccaaagatgctagctgcagctactatgatagggaccatgcaacatctacagtgatgccctacgttagtttcgattccgccaaggggacaaaagaaaatggagccacgaacgaaatgggtaacggttctgcaaacaccccatgtgcctggttgatgcctcggcatatcgataaaggcctccttatcattgtccagtacccggccatccttgtacggagagtcgtggtgtggtcggcgtctctcaaggcacgaca

SEQ ID NO: 1435 - DNA, 1415 bp, Vigna unguiculata
catgtggcctttgacagcacaaccatttatcaaatcccattttctcaaacacacacttccacttcttctcatggcaaaccaaacatcactctccttctcttctgggtctcccgttcacgcgcctctgaagcgcgtgggcacgcacaatggaagctttcactgcgacgaggcccttggttgcttcatgattcgcctcactcacaaattcaacaacgccgaaatcgttcgcacccgagaccctcaggtgttggagggtcttgatgctgttcttgatgttgggggagtctatgaccctgctcgagatcggtatgatcatcatcagaagggtttcgaagaagtttttgggcatggtttctccactaaattgagcagtgctggtcttgtttataagcattttggaaaggagattatagccaaagaactgaaggtagatgaggaaaaccaagatgtccatcagatatatttggctgtttacaagagcttcatggaggcaattgatgctatagacaatgggatcaatcggtatgatacagaccagcctccaaaatatgtgaataatactcatttatcctcaagagtagggaggttaaatttggactggacagatcctgatcaatcagctgaaaaagaaaatgaggcctttcaacgtgccatggctcttgctggcagtgaatttctggatagtgttcgatttcatgtaaagtcatggttaccggcaaggtcaattgtaatggagacgttagcagcaagacagactgttgatcctagtggagaaattctagttttgaccaaattttgtccttggaagctgcacttattcgagcttgaaggggagttgaaaactgatcctccaatcaaatatgttctatatcaggatgaaagaagcaaacaatggagagtgcaggcagttgcagtatctcctgacagttttgatagccgaaaggctcttcccttgcagtggcgaggattaagggatgaagaactgtcaaaggaggctggaattcctggctgtgtttttgtgcacatgagtggatttattggtggaaaccaaaactttgatggtgccttggccatggcaagggctgctttgaagatgtagacaggatcatgtgaaccaaggagggctatcatcattaattttccatactcaacaagattaggacttggcacagtggcttaaagattgttcgatatcaacttcaagaacttatttactgatatgtgggtataccttatccatattttctttcaatagtttaaccatgtataatgaatatatgatgtttaatttattgataattgttgtttgttgattttatcgttattatcatctattataggatatgaatattcttgtggctattttgttctcttgagacagcataagaaacatcagaaatcgataaaccaatttt

SEQ ID NO: 1436 - DNA, 1551 bp, Phaseolus vulgaris
gtgttagaatggaagaagagtgagtgttggaagaaagtggcatgtgggctgtcaccacaaaaccatttctcaaatcccattttctcaaactcactcttccatttcttctcatggcaaaccaaccatcactctccttctcttctggctctcctgttcacgcgtctctgaagcgcgtgggcactcacaatggaagctttcactgcgacgaggcccttggctgcttcatgattcgcctcactcacaaattcaacaacgccgaaatcgttcgctcccgagaccctctggtgttggaggctcttgatgctgttcttgatgttgggggagtctatgacccttcccgagatcggtatgatcatcatcagaagggttttgaagaagtttttgggcatggtttctccactaaattgagcagtgctggtcttgtttataagcattttggaaaggagattatagccaaagaactcaaggtagacgaggaacacaaagatgtccatcacatatatttggctgtttacaagagcttcatggaggcaattgatgctatagacaatggaatcaatcgatatgatacagatcagcctccaaagtatgtgaataatactcatttatcctcaagagtaggaaggctaaatttggattggacagatcctgaccaatcagctgcgaaagaaaatgaggcctttcaacgtgccatggctcttgctggcagtgagtttctggatagtgttcgatttcatgtaaagtcgtggttaccagcaaggtcaattgtaatggagactgtagcagctagacacacttttgatcctagtggagaaattctagttttgactaaattttgtccttggaagcttcacttattcgagcttgagggggagttgaaaattgaccctccaatcaaatatgttctgtatcaggatgaaagaagcaaacaatggagagtgcaggcagtagcagtatctcctgacagctttgaaagccgaaaggctctaccctcgcagtggagagggttaagggatgaagaactctcaaaggaggttggcattccaggctgtgtttttgtgcatatgagtggattcattggtggaaaccaaaactttgatggtgccttggccatggcaagggctgctttgaagatcatgtgaaccaagaagggttatcatcattattttgcatgctcaatcagatcaggacttggcacagtggcttaaagatggttcgatatcaacttcaagaacttatttactgatatgtgggtcttccttatccaaattttctttcaatagtttaaccgtgtataatggatttatgatctttattttcttgatatttgtcattggtcttatagttattgaaatctctgtttcaatatatgaattttggtgtgtctattttgttctcttgagacagcataagaacatcagaaattgataaaccaattctaagaatcatttggtattgcagaaagttatactcaatttgcagcatatgatctctagtagcagcaccaatgcaaaactgtaacaaaacttcaatggtgcatagttctccatc

SEQ ID NO: 1437 - DNA, 1582 bp, Cajanus cajan
gtgaaaagaatttgaaagaacgtttgggttaaaccctagaaaaaataatagggcagggttttggggaaggttggctggctggtatgtgggctgcggcaacaaatccattcatcaaattccaatttcagagacacactcttccatttctcctaatggcttcttcttcgctctccttttccaccgcgtctcctgctcacgcgcctctcaagcgcgtcggcacgcaccatggaagctttcactgcgacgaggcccttggctgcttcatgattcgcctcactcaaagattcaacaacgctcaaatcgttcgcacccgtgaccctcaggtgttggggggtcttgatgctgtttttgatgttgggggggtgtatgaccctgcccaagatcgctatgatcatcatcaaaagggatttgcagaagtttttgggcatggtttctccactaaattgagtagtgctggtcttgtgtataagcattttggaaaagagattatagctaaagaacttaaggtagacgaggaacatcgagatgtgcatcacatatatttggctgtttacaaaagcttcatggaggcaattgatgctatagacaatggaatcaatcagtatgatacagaccagcctccaaaatatgtgaacaacactcacttatcctcaagagtaggaaggctaaatttggattggacagatcctgatcagtcacctgagaaagaaaatgaggcctttcaacgtgccatggctcttgctggcagtgagtttctggatagtgttcgatatcatgtaaattcttggttaccagcaaggtcaattgtaatggagaccatattggctagacagactgttgatcctactggagaaattttagttttgactaaattttgtccttggaagcttcacttattcgagcttgagggggagatgaaaattgaccctccaatcaaatatgttctgtatcaggacgaaagaagcaagtcctggcgagtgcaggcagttgcagtatctcctgaccggtttgagagccgaaaggctctaccctcgcagtggcgaggtttaagggatgaagaactgtcaaaggagtctggtattccaggctgtgttttcgtgcatatgagtggatttattggcggaaaccaaacctttgatggtgccttggacatggcaagggctgccttgaaggtgtagacaaaggatcacatgaacaaaggactatcattccttaattttgcatactcattcacagtacagtttactgattgcattgaagaatcggatggcactgggaatagtgtcttaaagatggttcaatatcaagttcattaacttgtttactgatgcaggtctatcttatccaaattttctttcagtagttttaatcatgtaagttaatgaattcttgtgtctattttcttgataattgtcattgatattattatcagcatgcgttataggatatgaatttgttgtctattttgttaacttgtgagaccattataacttcagaatacacagtaaattcctaaaagtccaagttgctaccatcacaagcttttgtatcctgtttgtcattctttgccgtattattttct

SEQ ID NO: 1438 - DNA, 2362 bp, Glycine max
atatactcttatataataactaattattgttattttttttaaataatttttttagcatccctacccgaaactactatatatattttgttcgttttcaatctcagcctttaatttcctttaaaagaaatgaatggactagatgcatccgcgtcctttcctcttctcaagtcgtttttttttttttttttttttttttttttttatggttaaactaaaaccctacagcattttggtgttgagggaaaaaagtggcatgtgggctgcagcaacaaaaccattcgtccaattccaattccgcagacacactactacttctctccttccgattcttctgatggcaaaccaagcttcactctccttctcttcggggtctccagttcacgcgcctctgaagcgcgtgggcacgcacaacggaagcttccactgcgacgaggcccttggctgcttcatgattcgcctcacgaacaaattcaacagcgccgaaatcgttcgctcccgagaccctcaggtgttggaggatcttgatgctgttcttgatgttgggggagtgtatgaccctgctcgagatcggtatgatcatcatcaaaaaggatttgaagaagtttttgggcatggtttctccactaaattgagtagtgctggtcttgtttataagcattttggaaaggagattatagccaaagaacttaaggtagatgaggaacaccgagatgtgcattacatatatttggctgtttacaagagcttcatggaggcaattgatgctatagacaatggaatcaatcggtatgatacagaccaacctccaagatatgtgaataatactcatttatcctcaagagtaggaaggctaaatttagattggacagatcctgatcagtcacctgagaaagaaaatgaggcctttcaacgtgcaatggctcttgctggcagtgagtttctggatagtgttcgatttcatgtcaattcatggttaccagcaaggtcaattgtaatggagaccctagaggctagacatactgttgatcctagtggagaaattctagttttgactaaattgtgtccttggaagcttcacttatttgagcttgagggagagttgaaaaatgacccttctgtcaaatatgttctgtatcaggatgaaagaagcaaacaatggcgagtgcaggcagttgcagtatctcctgacagttttcagagccgaaaggctctaccctcacagtggcaagggttaagggatgaagaattgtcgaaggagtctggcattccaggatgtgtttttgtgcatatgagcggatttattggtggaaacaaaaactttgacggtgccttggccatggcgaaggctgctttgacaatgtagacgaggatcatatgaaccaagggctatcgtttttgcacgctcattcactgtacagtttactgattacattgaaaaatcaaatggagactgggaacagtggtttaaagatagttctatatcaagttctttaactcatttcctgacaggggagtctatcttatccaaattttctttcaatagtttaaccgtgtataagttaatgaatttgttgtgtctattatgttgttgtcattgatcttattgttataaccatctgtttataacaatgaacttcttgtgtctatttggttcacttgagaattagaacttcagaaaaaatgacaaatcatttctaaaggtcttctatccagtttgtcattctttcccgtcttactttttgtcaatttagctactagtttccttggctataagttataacaatatgtctagtagcaccacccctaccccaagcctaaccaaactactttagttgtgattgaatcttttggaaaccatttcaggtatgcaaatacgggagctgaattatttggtatgtcttgaattcattttaaccctgctcctccttacctgagctactttactgatgcttatgtttgaattttaaggttatataacctaaatagtggaataggatccttgaacatgtaatgtcacgatttattaattccttagtcttggattggattttggaattcatgcatgtgaaaagatatcgttgaggttgcaattttgaggtgttttgaaagattttcgagaaagtgatcttcaggaatctcattatgttttgtacaattttttaaaaaaatatttctagttaattcttagaaatataagttactttccttaaaaaaagaaaaaaagaaatataagttactcgtacttttttcttattttcctttcatagtaaaaggtggatattgtgtattctcatgaaaatgaaaataaaagctatataactgccacatgtcgctttatcgtgcagttcaaaccttgtttttt

SEQ ID NO: 1439 - DNA, 1322 bp, Trifolium pratense
atcaacaacaacaacaaagacatcatttttattcaacaatttccatttcaacaaacatttgactcttccaattcgtcttctaatgtctaattctaaaactgctagggtttctgattcttcttcaccttcttctcacgcgtcactcaagcgcgttggtactcacaatggaagcttccactgtgatgaagctcttggttgcttcatgattcgtctcactcgcaagttcttcaatgctgaaatcgttcgcactcgtgaccctcaggtgttggagggtcttgatgctgttcttgatgttggaggtgtgtatgaccctgcccgagatcgatatgatcatcaccagaaaggatttgaggaggtttttgggcatggtttctccactaaattgagtagtgctggtcttgtttataagcattttggaaaggagattatagccaatgaacttaaggtagatgaagagcaccaagatgtgaattacgtatatttggctgtttacaggagcttcatggaggcaattgatgctgtagacaatggaatcaatcaatacgacacagaccagcctccaaaatatgtgaataatactcatttatcttcaagagtagggaggtttaatttggattggacagatcctgatcagtcatctgagaaagaaaatgaggcctttcatcgtgccatggctcttgctggcagtgagtttctggatagtgttcgatttcatgtaaactcatggttaccagcaaggtcaatagtaatggagactgtggcggctagacaaactgttgatccttctggagaaattttagttttgaaaaaattctgtccttggaagcttcacttattcgagcttgagggtgagttgaaaattgacccaccaatcaaatatgttctgtatcaggatgagagaagcaaacagtggcgagtgcaggctgtttcagtatctcccgatagatttgagagccggaaggctttaccttcacagtggcgaggcttaagggatgatgtgctctcaaaggaagctgacattcctggttgtgtttttgtgcatatgagtggatttattggcggaaaccaaacttttgaaggtgccttggccatggccaaagctgctttgaagatgtaggcagaggattgtaaaatcatccattaattttgcagaatctttcacagtcttgttttctgattgattgcattaaagagacagaaggggataggaacattggcttaaaagataattataatcataattgctgagttattaactttctttacttatgtatgtggatctatcttatccaaaatttcattttgtaatttaacattgtata

SEQ ID NO: 1440 - DNA, 1523 bp, Trifolium pratense
agggaaactactaaaaaatagaaccgtaattgttaaaacctagaggaagggttttggggtatgaatttgagtttttaaatccccacaagtcatgtgggcaatatcatcaacaaagacattattattattcaacaatttcaatttccacaaacagaagaagaacaacaacaaccacttcactctttcaattcgtcttctaatgtctaattctaaaactgctagggtttctgattcttcttcaccttcctctcacgcctctctcaagcgcgttggtactcacaatggaagcttccattgtgatgaagctcttggttgtttcatgattcgtctcactcgcaagttcctcaatgctgaaatcgttcgtactcgtgaccctcaggtgttggagggtcttgatgctgttcttgatgttggaggtgtgtatgaccctgcccgagatcggtatgatcatcaccagaaaggatttgaggaagtttttggacatggtttctccactaagttgagtagtgcaggtcttgtgtataagcattttggcaaggagattatagccaatgaacttaaggtagatgaagagcaccaagatgtgaattacgtatatttggctgtttacaggagcttcatggaggcaattgatgctgtagacaatggaatcaatcaatacgacacagatcagcctccaaaatatgtgaataacactcatttatcttcaagagtaggaaggtttaatttggattggacagatcccgatcagtcatctgagaaagaaaatgaggcctttcatcgtgccatggctcttgctggcagtgagtttctggatagtgttcgatttcatgtaaactcatggttaccagcaaggtcaatagtaatggaaactgttgcggctagacaaactgttgatccttctggagaaattttagttttgaaaaaattctgtccttggaagcttcacttattcgagcttgagggtgagttgaaaattgacccaccaatcaaatatgttttgtatcaggatgagagaagcaaacagtggagagttcaggctgtttcagtatctcccgatagatttgagagccggaaggctctaccttctcagtggcgaggtttaagggatgacatactgtcaaaggaagctggtattcctggctgtgtttttgtgcatatgagtggatttattggcggaaaccaaacttttgaaggtgctttggcaatggcaaaagctgctttgaagatgtaggcaaaggattgtaaaatcatccattaattttgcagaatcttttacggccttgtcttgtgattgattgcattaaagagacgaaaggggatgggaaacagtggcttaaagatatttataattattgagttattaactttctttacttatgcggatctatcttaaccaaaacttctttctgtaatttaaccttgtagacatgatggattctggatgctgtttttgataaaatgtcatgggttttgtttaatcgaggatgtttcaatataataacatgaatttcatgtgtcta

SEQ ID NO: 1441 - DNA, 1409 bp, Lupinus angustifolius
ggtaaaagtaggtcaagggttttaggttgtaatgttgatgttaggagtagcaattatcaaagcaacaaagccattattcttcaatttcttccattttcaaagacacccatttcttcctctcatggccacttcttactcttcttctccttctcattctccacttcacgcgccttttaagcgcgtcggtacccacaacggaagcttccattgcgatgaagctcttggctgcttcatgattcgactcactcacaaattctctaacgctgaaatcattcgcacccgtgacccgaaggtgttggagggtcttgatgctgttcttgatgttggcggagtgtatgaccccagccgagatcggtatgatcatcaccagaaaggatttggagaggtttttggacatggtttctccacaaaattgagcagtgctggtcttgtttataagcattttgggaaggagattatagccaatcaacttcgggtaaatgaagaacacccagatgtgcatcacatatttttggctgtttacagaagtttcatggaggcaattgatgctatagacaatggaatcaatcagtatgatacagaccagtctccaaaatatgtgaataatacacatttatcctcaagagtaggaaggttaaatttggattggacagatcttgatcagtcaccggagaaagaaaatgaatcctttcaacgtgccatggcccttgctggcagcgagtttctcgatagtgttcgatttcatgtcgggtcttggttaccagctaggtcaattgtaaaggagacccttttggctaggcaaactgtcgatcctagtggagaagttctagttttgaataaattttgtccttggaagcttcacttatttgagcttgaaggtgagctgaaaatcgaccctcccatcaaatatgttctctatgaggatgagagaagcaagcagtggcgagtgcaggcagtttcagtatctcccgataggtttgagagccgaaaggctctaccctcgcagtggcgcggtcttagggatgatgaactgtcaaatgaagctggcattcctggttgtgttttcgtgcatatgagtggatttattggcggaaaccaaaattttgatggcgccttggccatggcgaaagctgctttgaaaatttaggcaaaggatttataacttttggtctatcgattttcgtctatcgattttacaaatgcctttacattaaagcttacttgattggatcgaagactcggacagaggctgggaattctatgtttagttattaacttctgtactgtactgatgctgtttatcttaatccaaattttcattccatagcttaaccatgtcttgatggtgttgttattttcacattcctctcttttgatgcttttcttggataaagtttattaatttattt

SEQ ID NO: 1442 - DNA, 1387 bp, Trifolium pratense
tttggggtatgagtttgagtttttaaatccccacaagtcatgtgggcgatatcatcaacaaagacattattattattcaacaatttcaatttccacaaacagaagaagaacaacaacaaccacttcactctttcaattcgtcttctaatgtctaattctaaaactgctagggtttctgattcttcttcaccttcctctcacgcctctctcaagcgcgttggtactcacaatggaagcttccattgtgatgaagctcttggttgcttcatgattcgtctcactcgcaagttcttcaatgctgaaatcgttcgcactcgtgaccctcaggtgttggagggtcttgatgctgttcttgatgttggaggtgtgtatgaccctgcccgagatcggtatgatcatcaccagaaaggatttgaggaagtttttggacatggtttctccactaagttgagtagtgcaggtcttgtgtataagcattttggcaaggagattatagccaatgaacttaaggtagatgaagagcaccaagatgtgaattacgtatatttggctgtttacaggagcttcatggaggcaattgatgctgtagacaatggaatcaatcaatacgacacagatcagcctccaaaatatgtgaataacactcatttatcttcaagagtaggaaggtttaatttggattggacagatcccgatcagtcatctgagaaagaaaatgaggcctttcatcgtgccatggctcttgctggcagtgagtttctggatagtgttcgatttcatgtaaactcatggttaccagcaaggtcaatagtaatggaaactgttgcggctagacaaacagttgatccttctggagaaattttagttttgaaaaagttctgtccttggaagcttcacttattcgagcttgagggtgagttgaaaattgacccaccaatcaaatatgttctgtatcaggatgagagaagcaaacagtggcgagtgcaggctgtttcagtatctcccgatagatttgagagccggaaggctttaccttcacagtggcgaggcttaagggatgatgtgctctcaaaggaagctgacattcctggttgtgtttttgtgcatatgagtggatttattggcggaaaccaaacttttgaaggtgccttggccatggccaaagctgctttgaagatgtaggcagaggattgtaaaatcatccattaattttgcagaatctttcacagtcttgttttctgattgattgcattaaagagacagaaggggataggaacattggcttaaaagataattataatcataattgctgagttattaactttctttacttatgtatgtggatctatcttatccaaaatttcattttgtaatttaaccttgtata

SEQ ID NO: 1443 - DNA, 1298 bp, Trigonella foenum-graecum
aaaacattattgttcaacaaattccaattccatttccacttccccaagtacaagcagaagcatttgactcttcaacttcgtctaatgtctaacgcaaaaacagctagggtttctgattcttcttctccttcttctcacgcctctctcaagcgcgtcggtacccacaatggaagcttccattgcgatgaagctcttggttgcttcatgattcgtctcactcgcaagtttttcaatgctgaaatcgttcgcactcgtgaccctcaggtgttggagggtcttgatgctgttcttgatgttggaggggtgtatgaccctgcccgagatcggtatgatcatcaccagaaagggtttgaggaggtttttgggcatggtttctccactaagttgagtagtgctggtcttgtttataagcattttggaaaagagattatagccaatgaacttaaggtggatgaagagcaccaaaatgtgcattacatatatttggctgtttacaggagcttcatggaggcaattgatgccgtagacaacggaatcaatcaatacgacacagatcagcctccaaaatatgtgaataatactcatttatcctcaagagtaggaaggtttaatttggattggacagatcccgatcagtcatctgagaaagaaaatgaagcctttcatcgtgccatggcacttgctggctgtgagtttcttgatagtcttcgatttcatgtgaactcatggttaccagcaaggtcaattgtgatggagaccgttgcggctagacggactgttgatccttctggagaaattatagttttgaaaaaattctgtccttggaagcttcacttatttgagcttgagggggagatgaaaactgacccaccaatcaaatatgttttgtatcaggatgagagaagcaagcagtggagagtgcaggcagtttcagtatctcctgatagattcgagagccggaaggctctaccttcacagtggcgaggtttaagggatgacgtactgtcaaaggaatctggcgttcctggttgtgtttttgtccatatgagtggatttattggcggaaaccaaacttttgaaggtgctttagccatggcaaaagctgctttgaagatgtaggcgaagaattgtaatgtgtcaaacactatcatccactaattttgcagaatatttcagtctagttttctgattgcattgaagagacagagggatgggaacagaggcttaaagataattataatactgagttattaactttcttatggatatttataatattgagttattaactttcttca

SEQ ID NO: 1444 - DNA, 1501 bp, Medicago truncatula
gttaaaaaactagaggagagattttaggtatgaatgtgagtttaaatccaaaagtgatatgatgtgggtaacaacatcaacaacaacaaagacattattattcaacaaattcaatttccacttctccaagtacaagcagaagcacttcactcttcaacttcgtctaatgtctaacgctaaaacagctagggtttctgattcttcttctccttctcacgcgtctctcaagcgcgttggtacccacaatggtagcttccattgtgatgaagctcttggttgcttcatgattcgtctcactcgcaacttcttcaatgctcaaatcgttcgcactcgtgaccctcaggtgttggagggtcttgatgccgttcttgatgttggaggggtgtatgatccttcccgagatcgttatgatcatcaccagaaaggatttgaggaggtttttggtcatggtttctccactaagttgagcagtgctggtcttgtttataagcattttggaaaagagattatagctaatgaacttaaggtagatgaagagcaccaaaatgtccactacatatatttggctgtttacaggagcttcatggaggcaattgatgccgtagacaatggaatcaatcaatacgacaccgaccagcctccaaaatatgtcaataatactcatttatcctcaagagtaggaaggtttaatctggattggacagatcccgatcagtcatctgagaaagaaaatgaagcctttcatcgtgccatggcacttgctggcagtgagtttcttgatagcgttcgttttcatgtgaactcgtggttgcctgcaaagtcaattgtgatggagaccattgcggctagacaaactgtcgatccttctggagaaattttagttttgaaaagattctgtccttggaagcttcacttatttgagcttgagggggagatgaaaattgacccaccaatcaaatatgttctgtatgaggatgagagaagcaaacagtggcgagtgcaggcagtttcagtatctcccgatagattcgagagccggaaggctctaccttcacagtggcgaggtttaagggatgacatactgtctaaggaatctggcattcctggttgtgtttttgtccatatgagtggatttattggcggaaaccaaacttttgaaggtgctttggccatggcaaaagctgctttgaagatgtaggcaaaggattgtaacaagtcaaacactatgatccattaattttgcaggaacatttcacagtctagttttatggttgcattaaaggggcagagggatgggaacagaggtttaaagataataatactgagctattaactttcttaaggataattacaattgagttgttaactttattcactaatgtattctggatgctcttttatgataaaatgtcactggtttttgtttaatcaggatgtatccccataacatgaatttttttgttttcttgagagctctagagtctcagactatgaaaattcc

SEQ ID NO: 1445 - DNA, 1463 bp, Quercus alba
ctcgcgtgtcattcccgggatcttaaaaccagagactcttcactttccacacccacttcactcctcttcttcttcctctcatggctactagggtttccgctttctcttccgccggttctcccaaccacgcgcccctaaagcgcgttggcactcacaacggtagcttccactgcgacgaggcccttggttgtttcatgattcgcctcaccgataagttttccaacgccgaaatcgttcgctctcgcgaccctcaggtattggagggccttgatgctgttcttgatgttgggggtgtgtatgatccgagtcgggatcggtatgatcatcaccagaaggggtttgatgaggtttttgggcatggcttctcaacgaagctcagtagtgccggtcttgtttacaagcattttggaaaggagataatagctaaggagcttcaagttgatgaggagcatccaaatgtgcatcgattatttttggccatctacaagagcttcatggaggcaattgatgctgttgacaatgggataaatcggtatgatacagacaagcctcctagatatgtgaataatacacacttgtcttcaagagttggaagattaaatttggattggatagaacctgatcaatcgcctgagaaggagaatgaggcttttcagcgagcaatggctttggctggcagtgagtttttagatagtgttcggtatcatgcaaaatcctggttaccagcacgatcaattgtattggagtgtcttacagcgagacaagatattgatcctagtggagaaattatggttttgactacattctgtccttggaagcttcacttatttgagcttgaggaggagatgaagactgaacccaccgtcaaatatgttctctatcaggatgacaggagcaaacattggagagtgcaggcggtggcagtatctcctgatagtttcgagagcagaaagcctctcccttctcaatggcgaggtctgagggatgatgaactctcaagggaagcaggtatccctggttgtgttttcgtccatatgagtgggtttattggtggaaatcaaagttatgagggtgcattggccatggcaaaggctgctttgaagctttaactgaagaagagcaatatgctatgtctatgttattgttagtttgaacaacaagatttttacagccattttaaattttagcacaatcaatatcaattgctcatgaccgttcttccattttgtgcctcagggcattagttttgtagctcctatagttcttcttagatcttgttttagctggggttctcccatataagattgtttggaagattatatattgaaatactgagtcaaaatacactggaagcggattggtagatttctttttatccgtttcccgtttagaaagatgtttttgatatactcttctcaacagaattttcttcaatcacgtattttgtattagcctacagtgct

SEQ ID NO: 1446 - DNA, 1353 bp, Arachis hypogaea
gtgtaaaacatagcatgttggtggcaacaacgccatttctcagaaacttgttcagcttccgctctcactctcactctcacttctttcgaatggcagcaacaagttcaaccagttctattctttccgagcattccgacgcttacgcgccgttcaagcgcgtgtgcgttcgcgtcggcacacacaacggcagcttccattgcgacgaggcgcttggctgcttcatgattcgactcaccaacaaattctacaacgctcaagttgttcgctctcgtgatcctcaggtcttggagggtcttgatgccgttcttgatgttgggggagtgtatgaccccagccgagatcgctacgatcatcaccagaaaggttttgaggaggtttttggccatggcttctcaaccaagttgagtagcgcaggtcttgtttacaagcactatggaaaggagattatagctaaggaacttagggtagatgaagagcacccagatgtgcatcgcatatatctggctgtttacaaaagcttcatggaggcaattgatgctatagacaatggaataaatcaatatgatactgaccagcccccaaaatatgtgaataatacacatctgtcctcaagagtgggaaggttaaatttagattggacagatcctgatcagtcatctgaaaaagaaaatgaagcctttcaacgtgccatggttcttactggtagcgaatttatggatagtgttcgatttcatattaattcatggttaccagcaaggtcaattgtaaatgagacgcttgaagctagatatagtgttgatcctagtggagaaattttggttttggagaaattctgtccgtggaagcttcacttatttgagcttgagggggagatgaaaattgaccctcccattaaatatgttctatatcaggatgaaagaagccaacagtggcgagtgcaggctgttgcagtatctccggataggtttgagagccgtaagcctctaccatcgcaatggcggggtcttagggatgatgaactgtccaaggaatgtggccttcctggctgtgtatttgtccacatgagtggatttatcggtggaaaccgaagttttgatggtgccttggccatggcaagagctgcattgaagatgtaagcaaagaaacgatcataatattttgcagtagctttaacaatacagtttactgattgcattgaagactcagaagaggactgggaacagtggcttatagatagttctgtattgattggtcaacttgtttaatataatcatgtattattcaaacattattatgattgattatactattagcttatctggattttgctcaattgagagagatttataacaa

SEQ ID NO: 1447 - DNA, 1630 bp, Cicer arietinum
atggagaaacacactggagagtgcccacagacacaaacgataattattatagtaataatattgcttaaaccctacaaaataatattggaggagggattttgggtatgaatgtgagtttaaatccaaaaggcatgtgggcagcagtaacaacaacaaagacattattcaacaattttcatttccattttcacaaacagaatcataagcattggaacttcactattccaattcttcttctaatgtctaatccaacaactgctagggtttctgcttccttctcttcttcaccttctcccgcgtctcctcttcacgcctctctcaagcgcgttggtactcacaatggaagcttccattgtgatgaagctcttggctgtttcatgattcgtctcactcggaagttttttgatgctgaaattgttcggactcgtgacgctcaggtgttggagagtcttgatgctgttcttgatgttgggggggtgtatgaccctgcccgagatcggtatgatcatcatcagaaaggatttgaggaggtttttgggcatggtttctccactaagttgagtagtgctggtcttgtttacaagcattttggaaaggagattatagccaatgaacttaaggtagatgaagagcaccaagatgtgcattacatatatttggcggtttacaggagcttcatggaggcaattgatgccgtagacaatggaatcaatcaatacgacacagaccagccaccaaaatatgtgaataatactcacttatcatcaagagtaggaaggtttaatttggattggacagatgctgatcagtcatctgagaaagaaaatgaggcctttcatcgtgccatggctcttgctggcagtgagtttatggatagtgttcgatttcatgtaaactcatggttaccggcaaggtcaattgtaatggagaccgttgcggctagacaaactgttgatccttctggagaaattttagttttgaataaattctgtccttggaagcttcacttattcgagattgaggggcagatgaaaattgaccctcccatcaaatatgttctgtatcaggatgagagaagcaaacagtggcgagtgcaggccgtttcagtatctcccgatagatttgagagccgaaaggctctacccttgcagtggagaggtttaagggatgacgtactgtcaaaggaagctggcattcctggttgtgtttttgttcatatgagcggattcattggcggaaaccaaacttttgaaggtgccttggccatggcaaaagctgctttgaagatataggcaaagaaaggattgtgatgagttaaacactgtcatccattaattttgtataatctttgaacagtggcttaaagataattttaacattgagttattaacttttttacttatgtaggtctatcatatccacaatttctttctataggtgaaccttgtatctatgatgtattcccgatactcggtcattgatattttgttttgattagatatcattgatttttgtttaatcaggatgtttccctatcacacgagtttcttgtgtctgttttgtttacttgagagaacactagagcttcagagtatgaaaattcttcctaaatcgaatatttcttgtgaac

SEQ ID NO: 1448 - DNA, 2464 bp, Phaseolus vulgaris
ttaaaccccaaaaattgtaaatttaatgtgcgaaaattaattagtcctagtccagtaagccatggacaatggtatataagccgttccataaacattagagagagtcttcccctcccctttgaactgtggctactctctcttaatccgatccattgctgttacaggcatggccacacaagtgacaccagtagcagcatttcttctgcttcttcttattctccctttctccacttctatctctcactctcaccgatccgctgccatcaacctcttcgctacctctcccgcaagcttagaagacgcttacgaggcgcttagagtgtttgagattatcggattcgaagagaagaagactcacgtgagcggggacacgtgtcagaaagtgttggaaaatctaaactcggcttcccctctcaaggatttgttctatgccttgaaagttaacgccattttaaaatgcgatgttaatagggaggctttaaaggatattgcttcaagacttaaggctactgttcatgatgcgagcactttgcttgacatatactactcgattggaggcttggttcttataaaggatcaggattccaatgttgatccgtatcttgctcatgttgatggggtttttcaatcaatcaaggctcttagtcaaagtgatggaagatggcgctatagttctgataatccggagtccagtacctttgctgctggattagcaattgaagcacttgcaggagtgatttcactagcatcttccgaaattgatcagtctaaggtcaatatagtgaaaaaggacatagtaaagctttttgatttcattgagaaatatgatgatggaaccttttattttgatgaaaaatttgttggtggagatgagcaacggggttctcttgccgcaacttcttcagttgttagagggtttactgcatttgctgctgtaacttctggagaaataaatcttccaggggataaaatattgggtttggcaaaatttttcttgggcattggaatcccaggagatgccaaggacttcttcaatcaagttgagtcgttagcttttctagagaccaacaggatttccattccattgatattgtcactccccgaaacagtttattcattgaccaagaaaggccagcttaaggttaaggtgaatacagtgcttggttcagctgcaccacctttaacagttaagcttgcccgtgcttttagaactggtgcaaaagattcagctattattgacagcaaggagctctggtatgaccaagaaagtggatttcatgtcttggatgctttccctaagaacgtggaggtgggaacgtacgtgtttgtttttgagattgtgcttcatgattctggcagtgaaaaagtttatgcaactggaggacaaattcatgtaccaatatatgtcactgggtttattaaagtcagcaatgcagaaatcactgttgtggacagtgatcttgggcgtgcccaatcccagaaaaagctagatttggctggaaatgatgcagtttcactctcagctaaccacttgcagaagttgaagttttctttccaattgacaacacctaatggtcatgtttttaagccgcatcaggcatttttgaagttgagacatgagacaaagattgaacacatctttgtggttggaaacaccggcaagaagtttgagataattcttgattttcttggcttggtggagaaacttttttatctgtcaggcagatatgacattgagttgactgttggtgatgccgtcatggagaactctttcttacggctacttggccatctcgatttaaatcttccagaagcacctgagaaagcagctcgtcctccatccccacctgttgacccttattcaagatatgggccgaaagaagagattacacatatattcagggttcatgaaaagagaccaccccagaatctttctcttattttcttgggtttaatccttttgccaatcattggctttttggttgggttattgcgattgggagtgaacctaaagaatttccctggttcaacagtaccagctacatttgggatccttttccatgttggtattgctggggttttgttactttatgtgcttttctggttgaagctggacctgttcactacactcaaggcatttggtcttttgggagctattctgatgtttgtggggcacagaattctttctcatctcgctttgacatcagccaaattgaaatctgcataagttggacgacaaataatttctatttttagagacaacgagaatgagtttttccattaaaggaatggcactaatccaattttgtaggaccattgttgaattatctaatgacaaatgaccaatttagagaggtgaattgtatcttttcgagaaaagaactaaattatattgcaagagaaaagtgactatatatatgggtttatcctggtgaaccacattgaaaagaaaggatttttatca

SEQ ID NO: 1449 - DNA, 2522 bp, Cicer arietinum
ataagacattaaatattaattaaccagccatttggagtttggacaagattaattaaccagcaatttggagtttgggcaagattaattttgtccaaccacagtaacacggtagtcgaaatgcaacgccagtataattaaccacctacattacattacacatcagtggaagtcgtcgcctgcaaagtgaaatcactctctccgatctcctctcatcgaatccagcgaatggccacaaccgttgtaggagcagcatttctgctgttactacttctccccttctcaatctcccaaccgatctccgattctcaccgatccgccgcttccgatctcttcaacaaaatctctccaagtttggaagatgcgtatgaggcactgagagtttttgagattctcgcgatagagaagaagcctcctgttaccactgacacttgtcatacagtgttggaaaatcttggatcgtcttcttcccctcttaaggatctgttctatgccttgaaagttagtggcatattaaaatgtgatgttgacggtgcggttttgaagaaaattgcctcaagacttaaagccactgtccatgatgcaagtactttgcttgacatatactactcagtaggaagtttggttcttataaaggatcaggattctaatgttgatgttctgcttactgatgctgatgagattttccgttcgatcaaggctctaagccaaagtgatggaagatggcgctacagttctaataacccagagtctagtacctatgctgctgggttagcacttgaagcacttgctggagtgatttcacttgcatcttctgagattgatcagagcaaggtcagcatagtgaaaaatgatatagcaaagcttttcgacagaattgagaaatatgatgatggagcatattattttgatgagaaatttgttagcgggtcagagcatcaggattctctttccacaacttcttcagttgttcggggtgttacttcatttgctgcagtaacttctgggagaataaatcttccaggggatacaatattgggtttagcaaaatttttccttggcatcggaatcccaggcgataccaaggacttcttcaatcaagttgaatcattatcgtttttagagagcaacaggatttcaattccgttgatattgtcacttcctgaaacagtttattcattgaccaagaaaggccagcttaaggtcaaggtcaatacagtgcttggttcagctgcaccacctctgacagttaagcttatccgagcttttagcactggtgcaaaagattcagctattattgacagcaaggagcttcagtataaccaaaacggtggatttcatttcttggatgctttcccaaaaaatgttgatgtgggaacatatgtttttgtttttgagattgtgctacatgattctgacagtgaaaaaatttatgttgctggtggtcaaattcatgtgccaatatatgtcactggaattattaaagttggcagtgctgaaatcgcagtgctggacagtgatcttggaaatgttgaaacccataaaacactagatttggctggaaatgatgtcgtttcactctcagctaaccacctgcagaagttgaggctctccttcgagttggagtctcctcgcggtcgtttgtttaagcctcatcaggcatttttaaagttgactcatgaaactaagattgaacacatctttttggttggaaatactggcaagaagttcgagaacgtttttgattttcttggcttggtggaaaaacttttttatctttctggcagatatgagattgagctgactgttggtgatgctgtcatggagaactctttctcacgactactgggccatgttgaattagatcttccagaagctcctgagaaagcagcacgtcctccttctccacctgttgacccttactcaagatatgggcccaaagctgagattaaccacatattcagggttcctgaaaagcgaccacaccagaaactttctcttgtgtttttgggcttgatccttttgccattcattggctttttggttgggttgttacgtttgggggtgaacctgaagaatttccctggttcaacggtacctgctacatttggcttccttttccatcttggtctggctgcagttctgttgctctatgtacttttctggttgaagctggacttatttacaacactcaaaacacttggtcttttgggagcttttacgatgtttgttggacacaggattctttctcatcttgctttaacatcgtccaagttgaaatctgcatgagtgaaacaaatagtgtctatttataaagagataagagaatttaagtttttcctctagagaaatggtactaatccaattttgtaggacttttgttgtattatgtgcttacaattttagagatcattatgggctcaacctgtttgttagtttttttattaaatgatttttaaagtatttaatctttttgttttaattttttataaagaatttgaaaacaagttttaaagtagacagaa

SEQ ID NO: 1450 - DNA, 2446 bp, Trigonella foenum-graecum
gtcttcgaagtgaaacaaatcacactctctccgatctcctctcatccatggccacaaccgccgtaggagcagcagcatttctcctgctgctacttctccctttctccatctccatctctcaaccgatctccgattctcaccgatccgccgcttccaatctcttcaccgaaatctctcccagtttagaagattcgtatgaggcactgagagtttttgagattctatcaattgagaagaagccaattgttaccaaagacacttgtcacaaagtgttggaaaatctagtctcgctttcttctcctcttaaggatgtgttctatgcgttgaaagttaatggcatattaaaatgcgatgtcgatgccgccgttttcaagggtattgcctcaagacttaaagccaccgtcaatgatgcaagtaatttgcttgacttatactactcggtaggaagtttggttcttataaaggatcaggattctaatgttgatgttcttcttactgatgctaatggcgtttttcattcaatcaaggctctgagccaaagtgatggaagatggcgctacagctccgataatccagagtctagtatccatgctgctggattggcacttgaagcgcttgctggagtgatttcactagcatcttctgaaattggtcagagtaaggtcagtatagtaaacaatggtatagtgaagcttttcgacagcattgagaaatatgatgatggagcattttattttgatgagaaaattgttagaggatctgagcatcaaggttctctttccacgacttcttcagttgttcgaggggttacttcatttgctgcagtaacgtctgggaaaataaatgttcaaggggatataatattgggtttagcaaagtttttcctcggcattggaatcccaggagaagccaaggacttcttcaatcaagttgaatcattatcctttttagaaagcaacaggatttccattccgttgatattgtcacttcctgaaacagtttattcattgaccaaaaaagggcagcttaaggtcaaggtcaatacagtgcttggttcagctgcacctcctctgacagttaagcttgtccgagcttttagcaccggtgcaaaagattcagctattattgaaagcaaggagcttcagtatgaccaagaaagtggatttcatttcttggattccttcccaaaaaatgttgatgtgggaacatatgtttttgttttggagattgtgttacatggttctgaaagtgacaaagtttatgttactgggggccaaattcacgtgccaatatatgtcacgggcattattaaagttggcagtgcagaaatagcagttctggacagtgatcttggaaatgttgaaacccataagacgctagatttggctggaaatgatgttgtttcactctctgctacccaccttcaaaagttgaggctttctttccaattggaaacacctcatggtcatgttttcaagcctcaccaggcatttttaacattgagacatgaaacaaagattgaacacgtgtttttggttggaaatactggcaagaaatttgagaataaatttgattttcttggcttggtggaaaaacttttttatctctctggcaaatatgacattgagctgactgttggtgatgccgtcatggagaactctttctcacgactactgggccatgtcgaattagatcttccagaagctcctgaaaaagcagcacgtcctcctgcaccacctgttgatccttactcaagatatggccccaaagcggagattaatcacatattcaggactcctgaaaagcgaccaccccagaaactttctctcgtgtttttgggtttgatccttctgccattcattggctttttggttgggttgttacgattgggagtgaacctgaagaatttccctagttcaacagtacctgctacatttgccacccttttccatcttggtcttgctgcaattctgttgctttatgtacttttctggttgaagctggacctatttaccacactcaaaacacttggtcttttgggagcttttacgatgattattggacacaggattctttcgcatcttgcttcaacatcgaccaagttgaaatcagcttgagcaaaacaaattatgtctatttataaagagatagaaaatttgagttctttcctctagagagataatccaattttgtaggacctttgttgtattttgtaataacaaatttagagatcattatattgcacgaggaaagctttaacttgatcttggtttattctgatgaagctatcggtacaaaccgcctattttagcatatgctacctgcctttgatgtttacatagcaagcttatcttaattaaagggcgagttcattttagagaggccttatcttaattctcatgatatgtaatttatgtgcaaggtttgtttttaaccatttgagttt

SEQ ID NO: 1451 - DNA, 2283 bp, Medicago truncatula
gaagtcgtcgtcttcgaagtgtaacaaaccacactctctctccgatctcatctcatccatggctacaaccgccgtaggagcagcagcgtttctcctgctgctacttctccctttctccttctccatctctccaccgatctccgattctcaccgatccgctgcttccaatctcttcacccaagtctctcccagtttggaagattcgtatgaggctttgagagtttttgagattctatcaattcagaagaagccaattgttaccaaagacacttgtcagaaagtgttggaaaatctaggctcatcttcttcgcctcttaaggatgcgttctatgcgttgaaagttaatggcatattgaaatgcaaggttgatgctgcgattttcaaggatattgcctcaagacttaaagccaccgtcaatgatgcaagtaatttgcttgacatatactactcagttggaattttggttcttatcaaggatcaggcttctaatgttgatgttcttcttactgatgctaatggcgtttttcattcaatcaaggctctaagccaaagtgatggaaaatggcgctacagctccaataatccagagtctagtatccatgctgctggattagcacttgaagcgcttgctggagtggtttcacttgcctcttctgaaattgatcagagtaaggtcagtatagtaaacaatggtatagtgaagcttttcgacagcattgagaaatatgatgatggagcattttattttgatgagaaaactgttaggggatctgagcatcaaggttctctttccgcgacttcttcagttgttcgaggggttactgcatttgctgcagtaacgtctgggaaaataaatgttccaagggatacaatattgggcttagcaaagttcttcctcggcattggaatcccaggagatgccaaagacttcttccatcaagttgaatcgttatcttttttagagagcaacaggatctccattccattgatattgtcacttcctgaaacagtttattcattgaccaaaaaagggcagcttaaggtcaaggtcaatacagtgcttggttcagctgcaccacctctgacagttaagcttgtccgagcttctagcactggtgcaaaagactcagctattattgaaagcaaggagcttcagtatgaccaaaaaagtggatttcatttcttggattccttcccaaacaatgttgatgtgggaacatatgtttttgttttcgagattgtgctacaagattctgaaagtgacaaagtttatgctactgggggccaaattcatgtgccaatttacatcactggaattattaaagttggcagtgcagaaatagcagttctggacagcgatcttggaaatgttgaaacccataagacgttggatttggctggaaatgatgttgtttcactctccgccacccaccttcagaagttgaggctttctttccaattggaaactcctcatggtcgtgttttcaagcctcatcaggcatttttaacattaagacatgaaacaaagattgaacacgtgtttttggttggaaatactggcaagaaatttgagattaaatttgattttcttggcttggtggaaaaacttttttatctctctggcaaatatgatattgagctgactgttggtgatgctgtcatggagaactctttctcacgactactaggccatgtcgaattagatcttccagaagctcctgaaaaagcagcacgtcctcctgcaccacctgttgatccttactcaagatatggccccaaagcggagattaatcacatattcagggctcctgaaaagcggccaccacagaaactttctcttgtgtttttgggtctgatccttttgccattcattggctttttggtcgggttgttacgattgggggtgaacctgaagaatttccctggttcaacagtacctgctacatttgccacccttttccatcttggtcttgctgcaattctgttgctttatgtacttttctggttaaagctggacctatttaccacactcaaaacacttggtcttttgggagcttttacgatgattgttggacacaggattctttcccatcttgcttcaacatcagccaagttgaaatcggcatgagcaaaacaaaaaatgtctatttataaagcgatagaaaatttgagtttttcctctagagagatggtactaatccaattttgtaggacctttgttgtattatgttataacgaatttagagatcattatattgcacaacttgatcatggtttattctg

SEQ ID NO: 1452 - DNA, 2363 bp, Trifolium pratense
actgcaagtcgtcgcctgcgtgtactgttctgaaacaaaccacacactctccgatctcctctcattcaatccaacgaatggccacaaccgcagtaggagcagcatttctcctgctgctacttctcccattctccatctccatccctcaaccaatctccgattctcaccgatccgccgcttccaatctcttcaatcaaatctctccaagtttagaagatgcgtatgaggcactgagagtttttgagattctcgctattgagaagaagcctcttgataccgcagacacttgtaaaaaagtgttggaaaatctaggctcttcttcccctcttaaggatgtgttctatgcgttgaaagttaatggcatattaaaatgcaatattgatggcacaattttcaaggatattgcctcaagacttaaagccactctccatgatgcaagtactttgcttgacatatactactcagttggaagtttggttcttataaaggatcaggcttctgatgttgacgttcttcttactgatgctaatggcatttttcattcaattaaggctctaagccaaagtgatggaagatggcgctacagctccgataatccagagtctagtacctatgcttccggattagctcttgaaggtctttctggagtgatttcactagcatcttctgaaattgatcagagtaaggtcagtatagtaaaaaatggtattgtgaagctttttgacagcattgagaagtatgatgatggagcattttattttgatgagaaatttgttagaggatctgagcctcaaggttctctttctacaacctcttctgttgttcgaggggttaatgcgtttgctgcagtaacttctgggaaaataaatcttccaggggatacaatattgggtttagcaaaatttttcctcagcattggaatcccaggagatgccaaggacttcttcaatcaagttgaatcattatcctttttagatagcaacaggatttccattccattgatattgtcacttcccgaaacagtatattcgttgaccaagaaaggccagtttaaggtcaaggtcagtacggtgtttggttcagctgcacctcctctaacagttaagcttgttcgagcttttagcactggtgcaaaagattcagctattattgacagcaaggagcttcagtataaccaagaaagtggatttcatttcttggattctttcccaaaaaatgttgatgtggggacatatgtttttgttttggagattgtgctacatgattctgaaagtgaaaacgtctatgctactggaggccaaattcatgtgccaatatatgtcatcggcgttattaaagttggcaatgcagaaattgcagttctggacagtgatcttggaaatgttgaaacccataagacgctagaattggctggaaatgatattgtttcactctcggcaaaccaccttcagaagttgagactgtctttccaattagaaactcctaatggtcgtgtttttaagcctcatcaggcatttttaaagttgcaccatgaaactaagattgaacacatctttttggttggaaatactggaaagaagtttgagataatttttgattttcttggcttggtggaaaaacttttttatctctctggcaaatatgacattgagctgactgttggtgatgctgtcatggagaactctttctcacgacttctgggccatgtcgaattagatcttccagaagctcctgagaaagcagcgcgtcctcctctaccacctgttgatccttactcaagatatggtcccaatgcggagattaaccacatattcagggctcctgaaaagcgaccaccccaaaaactttctctcgtgtttttgggtttgatccttttgccattcattggctttttggtcggcttgttacgattgggagtgaacttgaagaatttccctggttcaacagtacctgctacatttgccacccttttccatcttggtcttgctgcagttctgttgctttatgtgcttttctggttgaagctggacctatttaccacactcaaaacacttggtcttttgggagtttttacaatgttttttggacacaggattctttcctatcttgctttaacatcgaccaaattgaaatctgcatgagtgaaacaaataatgtctattcataaagagataagagcattagagttttcctctagagttatgatactgatccaattttgtaggacctttgttgtattatttaatgacaaatttagagatcattatattgcacgaggtaagctttaacttgatcttggtttattctgatgaagccatccccacaaatagcctatcttggtttaacttgatcatgtcacattt

SEQ ID NO: 1453 - DNA, 2393 bp, Trifolium pratense
actgcaagtcgtcgcctgcgtgtactgttctgaaacaaaccacacactctccgatctcctctcattcaatccaacgaatggccacaaccgcagtaggagcagcatttctcctgctgctatttctccccttctccatctccatccctcaaccgatctccgattctcaccgatccgccgcttccaaactcttcagtcatatctctccaagtttagaagatgcttatgaggcactcagagtttttgagattctcgctattcagaagaagcctcttgataccgcagacacttgtaaaaaagtgttggaaaatctaggctcatcttcttcttcccctcttaaggatgtgttctatgcattgaaagttaatggcgtattaaaatgcaatgttgatgccgcgattttcaaggatattgcttcaagacttaaagctactgccaatgatgcaagtactttgcttgacatatactactcagttggaagtttggttcttataaaggatcagacttctgatgttgacgttcttcttactgatgctaatggcatttttcattcaatcaaggctctaagccaaaatgatggaagatggcggtacagctccgataatccagagtctagtacctatgctgccggattagctcttgaagcactttctggagtgatttcactagcatcttctgaaattgatcagagtaaggtcagtatagtaaaaaatggcattgtgaagctttttgacagcattgagaaatatgatgatggagcatattattttgatgagaaatttgttagaggatctgagcctcaaggttctctttctacaacctcttctgttgttcgaggggttaatgcatttgctgcagtaacttctgggaaaataaatctttcaggggatacaatattaggtttagcaaaatttttcctcggcattggaatcccaggagatgccaaggacttcttcaatcaagttgaatcattatcctttttagatagcaacaggatttccattccattgatattgtcacttcctgaaacagtatattcgttgaccaagaaaggccagcttaaggtcaaggtcagtacagtgcttggttcagctgcacctcctctaacagttaagcttgttcgagcttttagcactggtgcaaaagattcagctattattgacagcaaggagcttcagtataaccaagaaagtggatttcatttcttggattctttcccaaaaaacgttgatgtggggacatatgtttttgttttggagattgtgctacatgattttgaaagtgaaaaagtttatgctactggaggccaaattcatgtgccaatatatgtcaccggcattattaaagttggcaatgcggaaattgcagttctggacagtgatcttggaaatgttgaaacccataagacgctagaattggctggaaacgatattgtttcactctcggcaaaccaccttcagaagttgagactttctttccaattggaaactcctaatggtcgtgttttgaagcctcatcaggcatttttgaaattgcaacatgaaactaagattgaacacatctttttggttggaaatactggaaagaatattgagatagtttttgattttcttggcttggtggaaaaacttttttacctctctggcaaatatgacattgagctgactgttggtgatgctgtcatggagaactctttctcacgactactgggccatgttgaattagatcttccagaagctcctgagaaagcagcgcgtcctcctctaccacctgtagatccttactcaagatatggccccaaagcagagattaaccacatattcagggctcctgaaaagcgaccaccccaaaaactttctctggtctttttgggtttgatcgttttgccattcattggctttttggttggcttgttacgattgggagtgaacctgaagaatttccctggttcaacagtacctgctacatttgccacccttttccatcttggtcttgctgcagttctgttgctttatgtacttttctggttgaagctggacctatttacgacactgaaaacacttggtcttttgggagtttttacaatgttttttggacacaggattctctcctatcttgctttaacatcgtccaagttgaaatctgcatgagtgaaacaaataatgtctatttataaagagataagagtatttgagttttttctctagagatatgatactaatccaattttgtaggacctttgttgtattatttgatgacaaatttagagatcattatagtgcaccagataagcttaacttgatgttggtttatttgatgaagccatccacacaaatagtctattttagcatatgctacctccctttgatgttaagtagtaagcttggcttttttga

SEQ ID NO: 1454 - DNA, 2386 bp, Lupinus angustifolius
gttctaattatcatttctacagtaataatggccaaaatctcagtaccacactttctcttgcttcttctctctttctcgatctgcattgccgctaagatctaccaacctatctcagattctcaccgttctcttgcttctgatctcttcacttccactgatccatcatatccaagtttagaagctgcatatgaggccctacgagtttttgaggttcttgaaattgaaaaaaagactcaagtgagcacaacctcttgtccgaaagtattggaaaatctcgggtcatcttcgcctcttaaggatttgtactatgccttgaaagttaatgccatattaaaatgcaaggttgatgccaaggttctcaaggatgttgcttcaagacttaaagccactgtcaaagatgcaagtactttgcttgacatatactactcaataggaagtttggttcttataaagaatcaggattctaatgttgatgtgcttcttgctgatgctgatgggacttttcattcaatcaaggcactaagccaaagtgatggaagatggcgctatagttctgataatccaaagtctagtacctatgctgctggattagcacttgaagcgcttgctggggtgatttcactagcatcttctgaaattgaccagtctaaggtcaatactgtcaaaaatgatatatcaaagctttttgataccattgagaaatatgatgatggaaccttttattttgatgagaaatttgtcgatggtcatgagcatcagggttctctttccactacttcttcagttgttcgaggggttacagcttttgctgctgcaattgctggaaaaataaatcttccaagggaaaaaatattaggtttagcaaaatttatcttgggcattggaatccctggagatgcgaaggacttattcaatcaagttgaatcattagcttttctagagagcaacaggatttctatcccattaatattgtcactccctgaaacagtttattccctgaccaagaaagaccagcttaaggttagagtgactactgcacttggttcaactgcaccacctttaacagttaagcttgtccgagctttcagcactggtgcaaaagattcagctataattgagagcaaggagctccggtatgaccaaaaaagtggacttcatgtcttggatagtttcccaaagaatgtagatgtgggggcatatgtttttgtttttgagattgtgcttcttgactctgacagtaaaaaggactatgctactggaggccaaatccatgtgccaatttatgttactggaattattgaagttagcaatgcagaaattgcaattcttgacagtgatcttggaagtgttgaaactcggaaaacgctagatttggctggaaatgatgttgtttcactctctgctaaccaccttcagaagttacgtttttctttccagttaacaactccacatggtcatgtttttaagcctcatcaggcatttttgaagttgagacacgagacagaagttgaacacatcttcgtggttggaaataccaacaagaagtttgagatagttcttgattttcttggcttggtggagaaacttttttatctttcaggcaaatatgacattgagctgactgttggtgatgctgtcatggagaactctttcttaaggctacttggccatgtcgaattagattttccagaagcacctgagaaggcatcccgtcctcctccaccagctgttgatccttactcaagatatgggcccaaagcagagatagcccacatattcagggttcctgaaaagcgaccaccccagaatctctctcttgtttttctgggtttgatccttttgccatttgttggctttctgatcgggcttttacgtcttggggtgaacctgaagaatttccctagctcaactgtacctgctacatttgccattcttttccaactcggcattggtgcagttttgttgctttatgtgcttttctggttaaagctggacctgttcactacactcaaaacacttggatttttgggagctttcttgttgtttgtgggacactcaactctttcccatcttgcctcgacatcagccaagttgaagtctgcataagtaaaacagtaatgtctaattataaagagatgacaagtggatttgagttttttccttaaaagggatggtactaatccaattttgtagaagctttgttgtactaatgacaaatttagagaacttaattatattgtttagagaaagagctgaatgacatggtagtatgaaaactttaccttggtcatgctttatcctgatgaaagccattgacaaccactttacaatatgctacacaccctgacattatggcaagattagatttttaagacttaatgctttc

SEQ ID NO: 1455 - DNA, 2451 bp, Trifolium pratense
tacactagcactgcaagtgcaagtcgtcgcctgcgtgtactgttctgaaacaaaccacactctctccgatctcttttcattgaatccaacgaatggccacaaccgcagttggagcagcatttctcctgctgctgctatttctccccttctccatctccatccctcaaccgatctccgattctcaccgatccgccgcttccaaactcttcagtcatatctctccaagtttagaagatgcttatgagacactcagagtttttgagattctcgctattcagaagaagccacttgataccgcagacacttgtaaaaaagtgttggaaaatctaggctcatcttccccccttaaggatgtgttctatgcattgaaagttaatggcatattaaaatgcaatgttgatgccgcgattttcaaggatattgcctcaagacttaaagctactgtcaatgatgcaagtactttgcttgacatatactactcagttggaagtttggttcttataaaggatcagacttctgatgttgacgttcttcttactgatgctaatggcatttttcattcaatcaaggctctaagccaaaatgatggaagatggcggtacagctccgataatccagagtctagtacctatgctgccggattagctcttgaagcactttctgcagtgatttcactagcatcttctgaaattgatcagagtaaggtcagtatagtaaaaaatggcattgtgaagctttttgacagcattgagaaatatgatgatggagcatattattttgatgagaaatttgttagaggatctgagcctcaaggttctctttctacaacctcttctgttgttcgaggggttaatgcatttgctgcagtaacttctgggaaaataaatctttcaggggatacaatattaggtttagcaaaatttttcctcggcattggaatcccaggagatgccaaggacttcttcaatcaagttgaatcattatcctttttagatagcaacaggatttccattccattgatattgtcacttcccgaaacagtatattcgttgaccaagaaaggccagtttaaggtcaaggtcagtacggtgtttggttcagctgcacctcctctaacagttaagcttgttcgagcttttagcactggtgcaaaagattcagctattattgacagcaaggagcttcagtataaccaagaaagtggatttcatttcttggattctttcccaaaaaacgttgatgtggggacatatgtttttgttttggagattgtgctacatgattctgaaagtgaaaaagtctatgctactggaggccaaattcatgtgccaatatatgtcatcggcgttattaaagttggcaatgcagaaattgcagttctggacagtgatcttggaaatgttgaaacccataagacgctagaattggctggaaatgatattgtttcactctcggcaaaccaccttcagaagttgagactttctttccaattggaaactcctaatggtcgtgtttttaagcctcatcaggcatttttgaaattgcaacatgaaactaagattgaacacatctttttggttggaaatactggaaagaattttgagatagtttttgattttcttggcttggtggaaaaacttttttatctctctggcaaatatgacattgagctgactgttggtgatgctgtcatggagaactctttctcacgactactgggccatgttgaattagatcttccagaagctcctgagaaagcagcgcgtcctcctctaccacctgtagatccttactcaagatatggccccaaagcggagattaaccacatattcagggttcctgaaaagcgaccaccccaaaaactttctctggtcttcttgggtttgatccttttgccattcattggctttttggttggcctgttacgattgggagtgaacctgaagaatttccctggttcaacagtacctgctacatttgccacccttttccatcttggtcttgctgcagttctgttgctttatgtacttttctggttgaagctggacctatttacgacactgaaaacacttggtcttttgggagtttttacaatgttttttggacacaggattctctcctatcttgctttaacatcgtccaagttgaaatctgcatgagcgaaacaaataatgtctatttataaagagataagagtatttgagttttttctctagagatatgatactaatccaattttgtaggacctttgttgtattatttgatgacaaatttagagatcattatagtgcaccagataagcttaacttgatgttggtttatttgatgaagccatccacacaaatagtctattttagcatatgctacctccctttgatgttaagtagtaagcttggcttttttgagacttagttcatgctttcacacagtcgtatcatgtatttttcaacg

SEQ ID NO: 1456 - DNA, 2918 bp, Lupinus angustifolius
aatgctactactctcgcgtatgtctcactctccatcttatttatttccattgtactaattttcacactctcattcttcacaatccattcacgctcattcttccacgaatggccaaaaacactgtaacgccgtttctctttcttatccttctcgctttctcgatctgcgtcgccgctacgatccaccacccgatctctgattctcaccgatctgctgcttctgaactcttcgcttccaccgatggatcttttccaagtttagaagcttcttatgaggccctgcgagtttttgatgttcttggaattgaaaaaaaatctcaagtgagcacagcaacctgtcagaaagtattggaaaatctaaagccatcttcccctctcaaggatctgtactattccctgaaagttaatggcatattaaaatgcaaggttgacgggaaggtttacaaggaaattgcttcaagacttaaagccactgtcaaggatgcaagtactttgcttgacatacactacttaataggaagtttggttcttataaaggatcaggattcaaatgttgatgtgcttcttgttgatgccgacgggacttttcattcaattaaggctctaagccaaagtgatggaagatggcgttacagctctgataatccagagtctagtacctatgcttctggattagcacttgaagcgcttgctggggttatctcactagcatcttctgaagttgatcagtctaaggtcaacactgtgaaaagggatatattgaagctttttgacaccattgagaagtatgatgatgggaccttttattttgatgagaaatttgttggtggacatgagcatcagggttctctttccaccacttcttcagttgttcgagggattacagcttttgctgctgcaatttctggaaaaataaatctgccaagtgataaaatattggggttggcaaaatttatcttgggtattggaatcccaggagatgccaaggacttgttcaatcaagttgaatcattagcttttctagagagcaacagggtttccatcccattaatattgtcacttcctgaaacagtttattcgttgaccaagaaagaccagcttaaggttagcgtgaatacagcacttggttctgctgcaccacctctaacagttaagcttgtccgagctttcagcactggtgcaaaagattcagctgtaattgagagcaaggagcttcagtatgacaaaaaaagtggatttcatgttttggatactttcccaaagaatgtaaacgtgggggtgtataattttgtctttgagattgtgcttcatgactctgacagtgaaaaagactatgttactggaggacaaattcatgtgccaatatatgttactggaattattgatgttagcaatgcagaaattgcagttcttgacagcgatcatggaagtgttgaaaccctgaaagcgctagatttggctggaaatgatgtagtttcactctcagctaaccaccttcagaagctgcgtttttctttccagttgaaaactccacatggccatgtttttaagcctcatcaggcatttttaaagttgagacatgagacaaaggttgaacacatctttgtggttggaactacgggcaagaagtttgagataattcttgattttcttggcttggtggagaaacttttttatctttcaggcaaatatgacattgagttaactgttggtgatgctgtcatggagaactctttcttacggctacttggccatgtcgaattagattttcctgaagcacctgagaaggcagcccgtcctcctccaccacctgttgattcttactcaagatatgggcccaaagcagagatagcccacatattcagggttcctgaaaagcgaccacctcagaatctctctcatgcttttttgggtttgatccttttgccattcattggatttctgattggactattacgtctgggggtgaacctgaagaatttccctggatcaactgtacctgctacatttgccattcttttccaactcggtattggtgcagttttgttgctttatgtgcttttctggttgaagctggacctgttcactacactgaaaacactgggtcttttgggagctttgttgttgtttgtgggacacagaactctttcacatcttgcctcaacatcagccaagttgaagtctgcttgatgagtcaaataaataatgtttatttataaagagaatgagttttcctttaagggacggcgtaggccaattttatataacctttgttttactagctactgacaaatttagagagctcaattatatggtttagagaaaagagctcaattacgtccgaatagaacttatctttggtcttgctatgaggatagccattgataaaccacctattttagcatgttctacaccctctctttattatcagtttcaatctttcatgttccctgtcacatgttttcccgaggcagctcagttggtagagttgcgttatataacgtgtgatggtgtgagcaattgagtttaaacatcagctgcagcacaatttcccctgcctaaacaaaaaaccttacctgtgaaaaaatcattcccttccacatgaattatccacctaccctgttttctattactagtcattatctcctttacacatttaattttttaagatttctagtcttctaaaagtttattcattttttaatctgaggattcttgaaagtactgtcactcagggctagaagctcatgctcaaatgcttctacctttttgtttgtgcttaagcgttattcttggaaattagatagacattataatagggtgacataaaaacacgagttcagttttgtatttgacccattctataaacagaagtggataataggctgaaagtacaatattttagttccattaaattga

SEQ ID NO: 1457 - DNA, 1959 bp, Glycine max
tctcataataatattagaagacattaattattgtgaagaagaatcatttttcccaaaatgacccttttgttttgtttctgtactcttcctccccccaaagagtttgaaagttgcacactcataaataagccaccacctagatagtgtcacagttcataacagctttaattcaaactttcaaaaccccatttttatttttttttctttatctctttctttcttgtgtgcctttctagcgtcttggacttcctggttttctgcttctttctgggtctttgttgagagatttttctctcttcccattagtgatgagatgctttgagatccttcaacagtgttagctgattgacaccattgttctctcttctcgtgcaaaatagtgtcatcaaaggctctcatcattgctaagctactgattcaaaaaagaagtccatgaataacaaactacattagactacaaatcagaagccaaggtgagacttttttagccaacaaatccttcacagtatttcatcgtttgctatcttcaagcatatcaaatgccaagatcaagggggtcagagttgcctcaaaggcagtctccacgaggtgcacatcaacatcggacatcaagttctgactctgatccattgcatcatcggccgattgctgaccgaagtccaaagctaggagatcggcgttcccccagaggtactcaatctgagggattaaatcagaagaagctaggaactcgcattgcagatttggaatctcagcttggtcaagcacaagtagagttgaaagttttaaaggaccagctagcttctgctgaagccgcaaagaaagaagctcaagatgagctagtgaagaaagctgtgcaatcagtagtgccagtggtagagaagctccaagagaaatccacttccaagaatgctccagagactaataaaactgaaagcaaatcccaagatattatacctgatgacaaccaacaagagactgatgtgtttgaagttccaattgagaagttgacaattgaattcagcaaacctgctgatcaatcagaaaaggaaactcaaccatctgaagactctaacgcaccagcaatatcaaagccttctgtggatgaacacgaactaacactaaagaatgacgaaattgcattgttgaaaaccggtttggaagagaaaggaaaggagttagagtccatgactaacgaaaaggagaatctgaagaaccaactgaatgaagcagtttcaaaagtgtctgctgctcaaaccaaggaagaagaaatgaccttgcagttgaaccaactgagagaagagttggaagccagtaaagccaatggagacaagttggatgagaagttgaaatctatggaagcaagaaaggaggggttggagtcagagatgaagaagctaagggtgcaaactgagcaatggagaaaagcagcagatgctgcagcagcagtgcttgctgggggtgtggatatgagtgcaaggattcctgaaaggtgtggctccatggataagcactttggtggcacatttgagacacctgctggtagatacaatggctatgtggggtctcccggtatggctgatgtcttggatgatggttttggaggtggtaagaggaagggttctgggattagaatgtttggtgatttatggaaaaagaagagccaaaagtgatttatggcttatatattcagtgagtgaattagtagtactttaactaaggtcatgttttgatggtagcagaaacttccaaagcagttgcttactgttttgcatctttctggtatctttagtcttttgtggtattattaaggccattaagcgtgtagtgttactgttgcatcatctgtgcaaggtagtgatgtgaactttttgaaagatggattatatatttcacttctcctaaagctgtgatgagcacttttacttgtttttaggcatattctccggttttgcacta

SEQ ID NO: 1458 - DNA, 1754 bp, Cajanus cajan
ataacagctttaattcaaactttcaaaccccattttcctctcttcttttctactttcttggacttcatccttgttttctgcttctgggagattttttctctcttcccatttgtggtggaagttcactctctcatcatgtgatgctttcagatccctgaacagtgtttgctcattaacatttaacaccattgtcctcttatgcaaacatcaaagcaggtgaaacatttttagccaacaaatccttccaagtgtcccatcattttccatcttccagattcaaatgccaagatcaaggggatctgatttgcctcagaggcagtctccaagaggtccacatcaactccggacatcaagttctgactctgatccgttgcatcatcgaccgattgctgaccgaagtccgaagctaggagagcgccgttccccaagaggcactcaatctgaggcactaaatcagaagaagctaggaactcgcattgcagatttggagtctcagcttggtcaagcacaagaagagttgaaagttctaaaggaccaactagtttctgctgaagctgcaaagaaagaagctcaagatgagctagtgaagaaagctgtgcaatcagtagtggtagagaagttccaagagaagtgcacttccaagaatgctcaagagactaacaaaactgaaaccaaaccccaacaaattgtacctgatgacaaccaacaagagactgatgtgtttgaagttccaattgagaagttgacaattgagttcatcaagcctgctgacaaatcagaaaaggaaactcaaccatttgaagactcgaatgcaccagcagtatcaaagccttctgtggaggaacatgaactcacactaaagaatgatgagattgcattgttgaaatccagtttggaagagaaggggaaggagttagagtccatgagtaatgaaaaagagaatctgaagaaccaactgaatgcagcagtttcaaaagtgtcagctgctgaaaccaaggaagaaggaatgaccttgcagttgaagcaactgagagaagagttggaagctagtaaagtcaatgcagacaagttagatgagaagttgaaatctgtggaagcagaaaaggaggggttggaatcagagatgaagaagctgagggtgcaaactgagcaatggagaaaagcagcagatgctgcagctgcagtgcttgctgggggtgtggatatgagtgcaaggattcctgaaaggtgtggctccatggataagcactttggtggcacatttgagacacctgctggtaggtacaatggatatgtggggtctcctggcatggctgatgacttggatgatggttttggaagtggaaagaggaagggttctgggattagaatgtttggtgatttatggaagaagaggagccagaagtgatttctggcttttatattcagtgagtgaattagcaccacattaactaaggtcatattttgatggtagcagaaactgcaaaaacaattgcttactgttttgcattttctgttatcctggtcatttctggtattattaaagccactaagcgtgttgtgctactgttgcatgatatgtgcaagttagtgatgtgaactttttgaaagatggattatatatttcacttctatgctgagatgaagccacttttcttgaaaggcctgtgtttaggcatattatcttgtttgcactgtgctttggagttaatgtcttaagtaacatgcttcattttatgttaactttggtatga

SEQ ID NO: 1459 - DNA, 1568 bp, Phaseolus vulgaris
gctccatatgcttcaagtcctttaaacttaagtgaaatcttgaagaatgttttctcctccgcatttctctgctgtttaacattttgctaaaaaggtgagactttttagcaaagaaatccttcagtgttccatcatttgccatcttcaagcatatcaaatgccaagatcaaggggatctgatttgcctcaaaggcagtctccacgaggtcctcatcaacttcggacatcaagttctgactctgatccattgcatcatcggccgatcgctgaccgaagtcctaagctaggagaccggcgttcaccaagaggcacccaatctgaggcactaaatcagaagaagctaggaactcgcattgcagatttggaatctcagcttggtcaagcacaagaagagttaaaagttttgaaggatcagctagtttctgctgaagccgcaaagaaagaagctcaagatgagctagtgaagaaagctgtgcaatcagtagtgcctgtggtagagaagttccaagagaagtgcacttccaagaatgatcaagagtctaacaaaactgaaaccaaatcccaagatgttatttcgtatgacaaccaacaagagactgatgtgtttgaagttccaattgagaagttggcaattgaattcggcaaacctgcagatcaatcagaaaaagaaactctatcgtttgaagactcaaatgaaccagcaatatcaatgccagaaaagccttctgtggatgagcatgaactgtcactgaagaatgatgaaattgctttgttgaagtccagtttggaagagaaagggaaggagttagagtccattactaatgcgaaagagaatctaaagaaccaactggatgaagcagtttcaaaagtgtcagctgctcaatccaaggaagaaggaatgaccttgcagttggaccaactgagagaagagttggaagcaagtaaagccaatgcagataagttgaatgggaagttaaaatctgtggaagcagaaaaggatggattagaatcagagatgaagaagctaagggtgcaaactgagcaatggagaaaagcagcagatgctgcagctgcagtgcttgctgggggtgtggatatgagcgcaaggattcctgaaagatgtggttccatggataagcactttggtggaacgtttgagacacctgctggtaggtacaatggttatgtggggtcccctggtatggctgatgacttggatgaaggttttggaggaggaaagaggaagggttctgggattagaatgtttggtgatttatggaaaaagaagagccaaaagtgatttctggtttatatattcagtgagtgaattattagtactttttaactaagctcatgttttgaaggtagcagaaactgcaaatacagttgcttactgctttgcaccttctgccatctgtagtcatttctggtattatcaaggccattaattgtgtagtgttactgttgcatgatctgtgcaaggtagtagtgatgtgaagttatgaactttttgaaagatggataatatatttcacttctcctcagctttgatgaaggcacttttacaa

(The sequence listing continues in the following parts.)
